(19) United States
(12) Patent Application Publication
(10) Pub. No.: US 2026/0015617 A1
(43) Pub. Date: Jan. 15, 2026

(54) DOUBLE STRANDED RNAi AGENTS, COMPOSITIONS AND METHODS OF USE

(71) Applicant: Novartis AG, Basel (CH)

(72) Inventors: Margaret Elizabeth BROUSSEAU, Dracut, MA (US); Shaun Robert COUGHLIN, Cambridge, MA (US); Payel GHATAK, Westwood, MA (US); Stefan HAEMMIG, Bottmingen (CH); Caitlin Jeanette HAGEN, Wilmington, MA (US); Zhihong HUANG, San Diego, CA (US); Juerg HUNZIKER, Aarau (CH); Ge TAN, Bottmingen (CH); Jan WEILER, Lorrach (DE)

(21) Appl. No.: 19/265,019

(22) Filed: Jul. 10, 2025

Related U.S. Application Data
(60) Provisional application No. 63/670,342, filed on Jul. 12, 2024.
(60) Provisional application No. 63/786,760, filed on Apr. 10, 2025.

(51) Int. Cl. C12N 15/113; A61K 9/00; A61K 45/06; A61P 3/06

(52) U.S. Cl. CPC C12N 15/1137; A61K 9/0019; A61K 45/06; A61P 3/06; C12N 2310/11; C12N 2310/14; C12N 2310/312; C12N 2310/315; C12N 2310/321; C12N 2310/322; C12N 2310/351; C12N 2320/31; C12Y 101/01034; C12Y 304/21061

(57) ABSTRACT

Disclosed are, inter alia, double stranded RNAi (dsRNAi) agents inhibiting expression of 3-hydroxy-3-methylglutaryl-CoA reductase (HMGCR), for example, human HMGCR, compositions including the same, and methods of treatment using the same.

### CROSS-REFERENCE TO RELATED APPLICATIONS

[0001] The present application claims priority and benefit to the U.S. Patent Application No. 63/670,342 filed Jul. 12, 2024 and U.S. Patent Application No. 63/786,760 filed Apr. 10, 2025, the disclosure of each of which is incorporated herein by reference in its entirety.

### SEQUENCE LISTING

[0002] The instant application contains a Sequence Listing which has been submitted electronically in XML format and is hereby incorporated by reference in its entirety. Said XML copy, created on Jul. 1, 2025, is named PAT059649-US-NP_SL.xml and is 23,177,182 bytes in size.

### TECHNICAL FIELD

[0003] The present disclosure provides, inter alia, double stranded RNAi (dsRNAi) agents inhibiting expression of 3-hydroxy-3-methylglutaryl-CoA reductase (HMGCR), for example, human HMGCR, compositions including the same, and methods of treatment using the same.

### BACKGROUND

[0004] Cumulative low-density lipoprotein cholesterol (LDL-C) exposure in the arterial wall is a major cause of atherosclerotic cardiovascular disease (ASCVD). The level of LDL-C in the arterial wall can be controlled (e.g., lowered) by modulating cholesterol homeostasis (e.g., cholesterol biosynthesis in liver cells) and upregulating LDL-C uptake from the blood.

[0005] 3-Hydroxy-3-methylglutaryl-CoA reductase (HMGCR) is a key enzyme that converts 3-hydroxy-3-methyl-glutaryl-CoA (HMGCoA) into mevalonate in the rate-limiting step in the cholesterol biosynthesis pathway. Due to its critical role in cholesterol biosynthesis, HMGCR has been a target for drug development for the treatment of high cholesterol and cardiovascular disease risk reduction (CVRR). For example, statins, small molecule inhibitors of HMGCR, are the current standard of care for lowering cholesterol. However, statins also have adverse side effects such as myalgia and rhabdomyolysis, a rare, but potentially fatal, breakdown of skeletal muscle. Real-world studies demonstrate that a staggering 80% of US patients on standard of care do not achieve their LDL-C goal. This is due, in large part, to poor adherence.

[0006] Therefore, there is an unmet need in the art for alternative treatments (e.g., lowering cholesterol or LDL-C) for subjects having lipid metabolism disorders.

### SUMMARY OF THE INVENTION

[0007] Provided herein are, inter alia, compounds that can inhibit expression of HMGCR in a subject, for example, e.g., in liver cells of a subject.

[0008] In an aspect, provided is a double stranded RNAi (dsRNAi) agent comprising:
[0009] a sense strand comprising a nucleotide sequence selected from SEQ ID NOs: 1 to 405 and 1434 to 1440 in Table 1; and
[0010] an antisense strand forming a duplex with the sense strand and comprising a nucleotide sequence selected from SEQ ID NOs: 406 to 810 and 1441 to 1447 in Table 1.

[0011] In some embodiments, the sense strand is 21 to 23 nucleotides in length and the antisense strand is 23 to 25 nucleotides in length.

[0012] In some embodiments, all the nucleotides in the sense strand and the antisense strand are modified nucleotides.

[0013] In some embodiments, each of the modified nucleotides independently comprises one or more modifications selected from a 2′-deoxy modification, a 2′-O-alkyl modification, a 2′-halo modification, a threofuranosyl nucleotide (TNA) modification, a 2′-5′-linkage modification, a conformationally restricting modification, an abasic modification, a 2′-amino-modification, a 2′-O-allyl modification, 2′-C-alkyl modification, a 2′-O-alkoxyalkyl modification, a morpholino modification, a phosphoramidate modification, a non-natural nucleobase modification, a modification in a tetrahydropyran, a modification containing a 1,5-anhydrohexitol, a modification containing a cyclohexenyl, a modification containing a phosphorothioate group, a modification containing a 5′-vinyl-phosphonate, a modification containing a 5′-phosphate, a modification to form a thermally destabilizing nucleotide, a glycol nucleic acid (GNA) modification, and a 2-O-(N-methylacetamide) modification.

[0014] In some embodiments, each of the modified nucleotides independently comprises one or more modifications selected from 2′-deoxy modification, 2′-O-alkoxyalkyl modification, 2′-O-alkyl modification, 2′-O-allyl modification, 2′-C-allyl modification, 2′-halo modification, modification containing a non-natural nucleobase, GNA modification, and TNA modification.

[0015] In some embodiments, all the modified nucleotides comprise a modification on a 2′ sugar ring.

[0016] In some embodiments, the modified nucleotides are selected from a 2′-O-alkyl modified nucleotide, a 2′-halo modified nucleotide, a 2′-deoxy modified nucleotide, a 2′-O-alkoxyalkyl modified nucleotide and TNA modification.

[0017] In some embodiments, one or more of the modified nucleotides further comprises a 3′-phosphorothioate (PS) modification.

[0018] In some embodiments, each of the modified nucleotides independently comprises one or more modifications selected from 2′-deoxy modification, 2′-O-methyl (2′-OMe) modification, 2′-fluoro (2′-F) modification, 2′-O-methoxyethyl (2′-MOE) modification, the modification containing a non-natural nucleobase, TNA, GNA, 3′-phosphorothioate (PS) modification, and 5′-vinyl-phosphonate (5′-VP) modification.

[0019] In some embodiments, the sense strand comprises one or two 2′-MOE modified nucleotides positioned at the 1^{st} and/or 2^{nd} nucleotides from the 5′-end of the sense strand.

[0020] In some embodiments, the sense strand comprises one or two 2′-MOE modified nucleotides positioned at the 1^{st} and/or 2^{nd} nucleotides from the 3′-end of the sense strand.

[0021] In some embodiments, the sense strand comprises one or two TNAs positioned at the 1^{st} and/or 2^{nd} nucleotides from the 5′-end of the sense strand.

[0022] In some embodiments, the sense strand comprises one or two TNAs positioned at the 1^{st} and/or 2^{nd} nucleotides from the 3′-end of the sense strand.

[0023] In some embodiments, the antisense strand comprises a 5′-VP group at the 1^{st} nucleotide from 5′ end of the antisense strand.

[0024] In some embodiments, the antisense strand comprises a 5′-(E)-VP group at the 1^{st} nucleotide from 5′ end of the antisense strand.

[0025] In some embodiments, the antisense strand comprises a 5′-(E)-VP-2′-OMe nucleotide at the 1^{st} position from 5′ end of the antisense strand.

[0026] In some embodiments, each of the sense strand and the antisense strand independently comprises two, three, four, five or six 2′-F modified nucleotides.

[0027] In some embodiments, the sense strand comprises one or two 3′-PS group at the 1^{st} and/or 2^{nd} nucleotides from 5′-end of the sense strand.

[0028] In some embodiments, the antisense strand comprises one or two 3′-PS group at the 1^{st} and/or 2^{nd} nucleotides from 5′-end of the antisense strand, and/or one or two 3′-PS group at the 1^{st} and/or 2^{nd} nucleotides from 3′-end of the antisense strand.

[0029] In some embodiments, the sense strand is 21 nucleotides in length and the antisense strand is 23 nucleotides in length.

[0030] In some embodiments, the sense strand comprises one to four 2′-MOE modified nucleotides positioned at the 1^{st}, 2^{nd}, 20^{th}, and/or 21^{st} nucleotides from the 5′-end of the sense strand.

[0031] In some embodiments, the sense strand comprises only four 2′-MOE modified nucleotides.

[0032] In some embodiments, the sense strand does not comprise a 2′-MOE modified nucleotide at the 3^{rd} to 19^{th} positions from 5′-end of the sense strand.

[0033] In some embodiments, the sense strand comprises one to four TNAs positioned at the 1^{st}, 2^{nd}, 20^{th}, and/or 21^{st} nucleotides from the 5′-end of the sense strand.

[0034] In some embodiments, the sense strand comprises two, three, or four 2′-F modified nucleotides positioned at the 7^{th}, 9^{th}, 10^{th}, and/or 1^{th} nucleotide from 5′-end of the sense strand.

[0035] In some embodiments, the sense strand comprises 2′-F modified nucleotides positioned at the 7^{th}, 9^{th}, 10^{th}, and 11^{th} nucleotides from 5′-end of the sense strand.

[0036] In some embodiments, the remaining nucleotides in the sense strand comprise 2′-OMe modified modification.

[0037] In some embodiments, the antisense strand comprises a 5′-(E)-VP group at the 1^{st} nucleotide from 5′ end of the antisense strand.

[0038] In some embodiments, the antisense strand comprises two, three, or four 2′-F modified nucleotides positioned at the 2^{nd}, 6^{th}, 14^{th}, and/or 16^{th} nucleotides from 5′-end of the antisense strand.

[0039] In some embodiments, the antisense strand comprises 2′-F modified nucleotides positioned at the 2^{nd}, 6^{th}, 14^{th}, and 16^{th} nucleotides from 5′-end of the antisense strand.

[0040] In some embodiments, the antisense strand comprises 2′-F modifications positioned at the 2nd, 6th, 14th, and 16th nucleotides from the 5′ end; and (i) a GNA positioned at the 5^{th} nucleotide from 5′ end, or (ii) a TNA positioned at the 3rd nucleotide from the 5′ end.

[0041] In some embodiments, the remaining nucleotides in antisense strand comprise 2′-OMe modified modifications.

[0042] In some embodiments, the sense strand comprises one to eight 3′-PS group at the 1^{st} 2^{nd}, 3^{rd}, 4^{th}, 17^{th}, 18^{th}, 19^{th} and/or 20^{th} nucleotides from 5′-end of the sense strand.

[0043] In some embodiments, the antisense strand comprises one to eight 3′-PS group at the 1^{st}, 2^{nd}, 3^{rd}, 4^{th}, 19^{th}, 20^{th}, 21^{st} and/or 22^{nd} nucleotides from 5′-end of the antisense strand.

[0044] In some embodiments, at least one of the 3′-PS groups in each sense strand and antisense strand has a stereopure Rp configuration.

[0045] In some embodiments, at least one of the 3′-PS groups in each sense strand and antisense strand has a stereopure Sp configuration.

[0046] In certain aspects, provided is a double stranded RNAi (dsRNAi) agent comprising:
[0047] a sense strand having a nucleotide sequence selected from SEQ ID NOs: 812 to 1052 in Table 2 and SEQ ID NOs: 1294 to 1297, 1448 to 1462, and 1481 to 1482 in Table 3; and
[0048] an antisense strand forming a duplex with the sense strand and having a nucleotide sequence selected from SEQ ID NOs: 1053 to 1293 in Table 2 and 1298 to 1301, 1463 to 1477, and 2600 to 2605 in Table 3.

[0049] In some embodiments, the dsRNAi comprises a ligand.

[0050] In some embodiments, the ligand comprises a N-acetylgalactosamine (GalNAc) moiety.

[0051] In some embodiments, the ligand has a structure of:

[chemical structure]

[0052] wherein:
[0053] each L¹ is independently a linker which may be same or different in each occurrence;
[0054] L² is a linker;
[0055] n is an integer from 1 to 3; and
[0056] [symbol] is an attachment point to the sense strand or an antisense strand.

[0057] In some embodiments, the ligand comprises the following structure of

[chemical structure]

[0058] wherein:
[0059] each p1, p2, p3, q1, q2, r1, r2 and r3 is independently an integer from 0 to 12;
[0060] each n1, n2, and n3 is independently an integer from 1 to 3; and
[0061] “*” is an attachment point to L².

[0062] In some embodiments, the ligand has a structure of:

[chemical structure]

[0063] wherein:
[0064] each L¹¹, L¹², L¹³, L¹⁴, and L¹⁵ is an independently a linker;
[0065] L² is a linker;
[0066] [symbol] is an attachment point to the sense strand or the antisense strand.

[0067] In some embodiments, the ligand has a structure of:

[chemical structure]

[0068] wherein:
[0069] each p11 and q11 is independently an integer from 0 to 12;
[0070] each z1, z2, and z3 is independently an integer of 0 to 12; and
[0071] [symbol] is an attachment point to the sense strand or the antisense strand.

[0072] In some embodiments, the ligand comprises the following structure:

[chemical structure]

[0073] wherein
   [0074] [symbol] is an attachment point to the sense strand or the antisense strand.

[0075] In some embodiments, the ligand is conjugated to 3′ end of the sense strand to form the following structure:

[chemical structure]

[0076] or a pharmaceutically acceptable salt,
   [0077] wherein W is —OH or —SH.

[0078] In some embodiments, the ligand is conjugated to 5′ end of the sense strand to form the following structure:

[chemical structure]

[0079] or a pharmaceutically acceptable salt,
   [0080] wherein W is —OH or —SH.

[0081] In some embodiments, W is —OH.

[0082] In some embodiments, the dsRNAi agent is in a pharmaceutically acceptable salt form.

[0083] In some embodiments, the pharmaceutically acceptable salt is a sodium salt.

[0084] In certain aspects, provided is a pharmaceutical composition comprising the dsRNAi agent as described herein, and a pharmaceutically acceptable carrier.

[0085] In some embodiments, the composition is in an aqueous solution form.

[0086] In some embodiments, the pharmaceutical composition further comprises an additional therapeutic agent selected from a proprotein convertase subtilisin kexin 9 (PCSK9) inhibitor, a lysophosphatidic acid (LPA) receptor inhibitor, an angiotensinogen (AGT) inhibitor, a fibrate, a bile acid sequestrant, niacin, an antiplatelet agent, an angiotensin converting enzyme inhibitor, an angiotensin II receptor antagonist, an acylCoA cholesterol acetyltransferase (ACAT) inhibitor, a cholesterol absorption inhibitor, a cholesterol ester transfer protein (CETP) inhibitor, a microsomal triglyceride transfer protein (MTTP) inhibitor, a cholesterol modulator, a bile acid modulator, a peroxisome proliferation activated receptor (PPAR) agonist, a gene-based therapy, a composite vascular protectant, a glycoprotein IIb/IIIa inhibitor, aspirin or an aspirin-like compound, an IBAT inhibitor, a squalene synthase inhibitor, a monocyte chemoattractant protein (MCP)-I inhibitor, and a combination thereof.

[0087] In some embodiments, the additional therapeutic agent comprises the PCSK9 inhibitor.

[0088] In some embodiments, the PCSK9 inhibitor is a second dsRNAi agent.

[0089] In some embodiments, the second dsRNAi agent comprises inclisiran.

[0090] In certain aspects, provided is a combination of the dsRNAi agent as described herein and a second agent selected from a proprotein convertase subtilisin kexin 9 (PCSK9) inhibitor, a lysophosphatidic acid (LPA) receptor inhibitor, an angiotensinogen (AGT) inhibitor, a fibrate, a bile acid sequestrant, niacin, an antiplatelet agent, an angiotensin converting enzyme inhibitor, an angiotensin II receptor antagonist, an acylCoA cholesterol acetyltransferase (ACAT) inhibitor, a cholesterol absorption inhibitor, a cholesterol ester transfer protein (CETP) inhibitor, a microsomal triglyceride transfer protein (MTTP) inhibitor, a cholesterol modulator, a bile acid modulator, a peroxisome proliferation activated receptor (PPAR) agonist, a gene-based therapy, a composite vascular protectant, a glycoprotein IIb/IIIa inhibitor, aspirin or an aspirin-like compound, an BAT inhibitor, a squalene synthase inhibitor, a monocyte chemoattractant protein (MCP)-I inhibitor, and a combination thereof.

[0091] In some embodiments, the second agent is a second dsRNAi agent.

[0092] In some embodiments, the second dsRNAi agent is a dsRNA agent that targets one or more of the genes selected from the group consisting of PCSK9, LPA, AGT, ACE, ACE2, AGTR1, AGTR2, ACAT, CETP, MTTP, PPAR, IBAT, FDFT1, ERG9, SQS1, Ccl2, CCR2, CCL7, CCL8. CCL13, and CCL16.

[0093] In some embodiments, the second dsRNAi agent comprises inclisiran.

[0094] In certain aspects, provided is a pharmaceutical composition comprising the combination as described herein.

[0095] In some embodiments, the second dsRNAi agent is in a pharmaceutically acceptable salt form.

[0096] In some embodiments, the pharmaceutically acceptable salt of the second dsRNAi agent is a sodium salt.

[0097] In some embodiments, the dsRNAi agent and the second agent are formulated in the same composition.

[0098] In some embodiments, the dsRNAi agent and the second agent are formulated in the separate compositions.

[0099] In certain aspects, provided is a method of inhibiting expression of 3-hydroxy-3-methylglutaryl-CoA reductase (HMGCR) in a subject comprising:
[0100] administering to the subject the dsRNAi agent as described herein or a pharmaceutically acceptable salt thereof, or the pharmaceutical composition as described herein.

[0101] In certain aspects, provided is method of lowering a level of low-density lipoprotein cholesterol (LDL-C) in a subject, comprising:
[0102] administering to the subject the dsRNAi agent as described herein or a pharmaceutically acceptable salt thereof, or the pharmaceutical composition as described herein.

[0103] In certain aspects, provided is a method of treating or preventing an HMGCR-associated disorder or disease in a subject, comprising:
[0104] administering to the subject the dsRNAi agent as described herein or a pharmaceutically acceptable salt thereof, or the pharmaceutical composition as described herein.

[0105] In some embodiments, the HMGCR-associated disorder or disease is hyperlipidemia, hypercholesterolemia, hypertriglyceridemia, mixed hyperlipidemia, primary hyperlipidemia, heterozygous familiar hypercholesterolemia (HeFH), homozygous familiar hypercholesterolemia (HoFH), congestive heart disease (CHD) or atherosclerosis.

[0106] In certain aspects, provided is a method of treating or preventing hyperlipidemia in a subject, comprising:
[0107] administering to the subject the dsRNAi agent as described herein or a pharmaceutically acceptable salt thereof, or the pharmaceutical composition as described herein.

[0108] In some embodiments, the hyperlipidemia is hypercholesterolemia, or hypertriglyceridemia.

[0109] In certain aspects, provided is a method of treating or preventing atherosclerotic cardiovascular disease (ASCVD) in a subject, comprising:
[0110] administering to the subject the dsRNAi agent as described herein or a pharmaceutically acceptable salt thereof, or the pharmaceutical composition as described herein.

[0111] In some embodiments, the dsRNAi agent or the pharmaceutical composition is administered subcutaneously or intravenously.

[0112] In some embodiments, the methods further comprises administering to the subject an additional therapeutic agent selected from a proprotein convertase subtilisin kexin 9 (PCSK9) inhibitor, a lysophosphatidic acid (LPA) receptor inhibitor, an angiotensinogen (AGT) inhibitor, a fibrate, a bile acid sequestrant, niacin, an antiplatelet agent, an angiotensin converting enzyme inhibitor, an angiotensin II receptor antagonist, an acylCoA cholesterol acetyltransferase (ACAT) inhibitor, a cholesterol absorption inhibitor, a cholesterol ester transfer protein (CETP) inhibitor, a microsomal triglyceride transfer protein (MTTP) inhibitor, a cholesterol modulator, a bile acid modulator, a peroxisome proliferation activated receptor (PPAR) agonist, a gene-based therapy, a composite vascular protectant, a glycoprotein IIb/IIIa inhibitor, aspirin or an aspirin-like compound, an IBAT inhibitor, a squalene synthase inhibitor, a monocyte chemoattractant protein (MCP)-I inhibitor, and a combination thereof.

[0113] In some embodiments, the additional therapeutic agent is a second dsRNAi agent.

[0114] In some embodiments, the second dsRNAi agent comprises the PCSK9 inhibitor.

[0115] In some embodiments, the second dsRNAi agent comprises inclisiran.

[0116] In some embodiments, the dsRNAi agent or the pharmaceutical composition and the additional therapeutic agent are administered simultaneously.

[0117] In some embodiments, the dsRNAi agent or the pharmaceutical composition and the additional therapeutic agent are administered subsequently.

[0118] In some embodiments, the dsRNAi agent is administered before administering the additional therapeutic agent.

[0119] In some embodiments, the additional therapeutic agent is administered before administering the dsRNAi agent.

[0120] In some embodiments, the additional therapeutic agent is administered subcutaneously or intravenously.

[0121] In certain aspects, provided is a method of lowering a level of low-density lipoprotein cholesterol (LDL-C) in a subject, comprising:
[0122] administering to the subject the pharmaceutical composition as described herein.

[0123] In certain aspects, provided is a method of treating or preventing an HMGCR-associated disorder or disease in a subject, comprising:
[0124] administering to the subject the pharmaceutical composition as described herein.

[0125] In some embodiments, the HMGCR-associated disorder or disease is hyperlipidemia, hypercholesterolemia, hypertriglyceridemia, mixed hyperlipidemia, primary hyperlipidemia, heterozygous familiar hypercholesterolemia (HeFH), homozygous familiar hypercholesterolemia (HoFH), congestive heart disease (CHD) or atherosclerosis.

[0126] In certain aspects, provides is a method of treating or preventing hyperlipidemia in a subject, comprising:
[0127] administering to the subject the pharmaceutical composition as described herein.

[0128] In certain aspects, provided is a method of treating or preventing atherosclerotic cardiovascular disease (ASCVD) in a subject, comprising:
[0129] administering to the subject the pharmaceutical composition as described herein.

[0130] In some embodiments, the dsRNAi agent and the second agent is administered subcutaneously or intravenously.

[0131] In some embodiments, the dsRNAi agent and the second agent are administered simultaneously.

[0132] In some embodiments, the dsRNAi agent and the second agent are administered subsequently.

[0133] In some embodiments, the dsRNAi agent is administered before administering the second agent.

[0134] In some embodiments, the second agent is administered before administering the dsRNAi agent.

[0135] In some embodiments, in any of the methods described herein, the subject is a human.

[0136] In some embodiments, in any of the methods described herein, the subject has or is diagnosed with hyperlipidemia, hypercholesterolemia, hypertriglyceridemia, mixed hyperlipidemia, primary hyperlipidemia, heterozygous familiar hypercholesterolemia (HeFH), homozygous familiar hypercholesterolemia (HoFH), congestive heart disease (CHD) or atherosclerosis.

[0137] In some embodiments, in any of the methods described herein, the subject does not have a muscle side effect after the administrating the pharmaceutical composition of as described herein.

[0138] In certain aspects, provided is a method of reducing the risk of a major adverse cardiovascular event in a subject, comprising administering to the subject the dsRNAi agent as described herein or a pharmaceutically acceptable salt thereof, the pharmaceutical composition as described herein, the combination as described herein, or the pharmaceutical composition comprising the combination as described herein.

[0139] In some embodiments, the major adverse cardiovascular event is cardiovascular death, non-fatal myocardial infarction, non-fatal ischemic stroke, or urgent coronary revascularization.

[0140] In some embodiments, the subject has an established cardiovascular disease.

[0141] In some embodiments, the subject has not experienced a major atherosclerotic cardiovascular disease (ASCVD) event.

[0142] In certain aspects, provided is a kit comprising the dsRNAi agent as described herein or a pharmaceutically acceptable salt thereof, or the pharmaceutical composition as described herein.

[0143] In some embodiments, the kit further comprises an additional therapeutic agent selected from a proprotein convertase subtilisin kexin 9 (PCSK9) inhibitor, a fibrate, a bile acid sequestrant, niacin, an antiplatelet agent, an angiotensin converting enzyme inhibitor, an angiotensin II receptor antagonist, an acylCoA cholesterol acetyltransferase (ACAT) inhibitor, a cholesterol absorption inhibitor, a cholesterol ester transfer protein (CETP) inhibitor, a microsomal triglyceride transfer protein (MTTP) inhibitor, a cholesterol modulator, a bile acid modulator, a peroxisome proliferation activated receptor (PPAR) agonist, a gene-based therapy, a composite vascular protectant, a glycoprotein IIb/IIIa inhibitor, aspirin or an aspirin-like compound, an IBAT inhibitor, a squalene synthase inhibitor, a monocyte chemoattractant protein (MCP)-I inhibitor, and a combination thereof.

[0144] In some embodiments, the additional therapeutic agent is a second dsRNAi agent.

[0145] In some embodiments, the second dsRNAi agent is a dsRNA agent that targets one or more of the genes selected from the group consisting of PCSK9, LPA, AGT, ACE, ACE2, AGTR1, AGTR2, ACAT, CETP, MTTP, PPAR, IBAT, FDFT1, ERG9, SQS1, Ccl2, CCR2, CCL7, CCL8. CCL13, and CCL16.

[0146] In some embodiments, the second dsRNAi agent comprises the PCSK9 inhibitor.

[0147] In some embodiments, the second dsRNAi agent comprises inclisiran.

[0148] In some embodiments, the dsRNAi agent and the additional therapeutic agent are contained in a single vial.

[0149] In some embodiments, the dsRNAi agent and the additional therapeutic agent are contained in separate vials.

[0150] In certain aspects, provided is a kit comprising the pharmaceutical composition including the combination as described herein.

[0151] In some embodiments, the dsRNAi agent and the second agent are contained in a single vial.

[0152] In some embodiments, the dsRNAi agent and the second agent are contained in separate vials.

[0153] In some embodiments, the kir further comprises one or more applicators.

[0154] In some embodiments, the one or more applicators comprises a syringe.

[0155] Other aspects of the invention are disclosed infra.

### BRIEF DESCRIPTION OF DRAWINGS

[0156] FIGS. 1A to IC: Transcriptomic profiling with different lead sequences. The siRNA284, for example, which can be formed by SEQ ID NO: 284 and SEQ ID NO: 689, or modified variants thereof had HMGCR significant down-regulation as shown in FIG. 1A. The siRNA3, for example, which can be formed which can be formed by SEQ ID NO: 3 and SEQ ID NO: 408, or modified variants thereof had an exquisite off-target profile as shown in FIG. 1B. The siRNA6, for example, which can be formed by SEQ ID NO: 6 and SEQ ID NO: 411, or modified variants thereof (e.g., with or without GNA) had still some seed-mediated off-targeting profiling as shown in FIG. 1C.

[0157] FIG. 2: Compounds 1-4 as outlined in Table 5 of the disclosure are depicted and each modification (e.g., 2′ modified nucleosides and linkages) are depicted. “PO” means a chemical group to form a phosphate (phosphodiester) linkage and “PS” means linking group to form a phosphorothioate linkage, and “L96” refers to a ligand that is connected to the 3′-end of the sense strand via phosphate (phosphodiester) linkage. Figure discloses SEQ ID NOS 2606-2613, respectively, in order of appearance.

[0158] FIGS. 3A to 3B: Liver HMGCR mRNA concentrations for male C57BL/6 mice (n=4 per timepoint for each group) administered a single subcutaneous dose of either Compound 7 (gray) or Compound 6 (black) at 6 mg/kg are shown in FIG. 3A. Statistical significance was determined by ordinary one-way ANOVA and Sidak's multiple comparisons test. For Compound 7, statistically significant reductions in HMGCR mRNA abundance versus vehicle were observed at all post-dose timepoints, with the exception of day 28. A maximum mean reduction of 77±3% (P<0.001) occurred on day 21 and was, in large part, sustained through day 35 (−68±12%, P<0.01). Compound 6 also reduced liver HMGCR mRNA abundance in this model, with a maximum decrease of 79±12% at day 7. Incorporation of guide strand into liver RISC over time is illustrated in FIG. 3B. Statistical significance was determined by ordinary one-way ANOVA and Sidak's multiple comparisons test. In male C57BL/6 mice (n=4 per timepoint for each group) dosed with 6 mg/kg Compound 6 (black circles), a steep decline in RISC-loading was observed between days 7 and 21 post-dose. In contrast, RISC-loading was sustained through day 21 in mice administered Compound 7 at 6 mg/kg (gray squares). Moreover, at day 42 post-dose, RISC-loading was 100-fold greater in the Compound 7 versus Compound 6 group.

[0159] FIGS. 4A to 4B: Liver HMGCR mRNA concentrations for male C57BL/6 mice (n=4 or 5 per group) administered a single subcutaneous dose of PBS (white), Compound 5 (white/black), Compound 7 (black) or Compound 8 (gray) at 3 mg/kg are shown in FIG. 4A. The siRNAs share a same nucleotide sequence but have different chemical modifications. Statistical significance was determined by ordinary one-way ANOVA and Sidak's multiple comparisons test. At day 35 post-dose, statistically significant reductions in hepatic HMGCR mRNA abundance versus vehicle (PBS) were observed in mice dosed with Compound 7 (−55%, P<0.05 vs. PBS) and Compound 8 (−70%, P<0.01 vs. PBS). In mice dosed with Compound 8, liver HMGCR mRNA levels were significantly reduced vs. vehicle through day 56 post-dose (−51%, P<0.05). These results show durable HMGCR knockdown in mice, with Compound 8 performing better than Compound 7 in this experiment. Incorporation of guide strand into liver RISC over time is illustrated in FIG. 4B. Male C57BL/6 mice (n=4 or 5 per group) were administered a single subcutaneous dose of PBS (white) or Compound 5 (white/black), Compound 7 (black) or Compound 8 (gray) at 3 mg/kg. Statistical significance was determined by ordinary one-way ANOVA and Sidak's multiple comparisons test. Consistent with the liver HMGCR mRNA results, Compound 8 showed the highest RISC-loading at both timepoints evaluated. The difference observed between Compound 5 and Compound 8 at day 35 was robust and statistically significant (P<0.0001). These results show durable RISC-incorporation (through day 56 post-dose) for Compound 8 in mice.

[0160] FIGS. 5A to 5B: Nine- to ten-week old male Wistar Han rats received a single subcutaneous dose of vehicle (0.9% sodium chloride for injection, USP) or HMGCR GalNAc-conjugated siRNA (Compound 9) on study day 1. Livers for the measurement of HMGCR mRNA abundance were collected at necropsy (30 days post-dose). HMGCR mRNA levels are normalized to TATA-box binding protein (TBP) and represent mean±SD (n=5 per group) in FIG. 5A. Statistical significance was determined by ordinary one-way ANOVA and Dunnett's multiple comparisons test. Statistically significant reductions in hepatic HMGCR mRNA abundance versus vehicle were observed for all siRNA groups. Maximum target knockdown was achieved with doses of >30 mg/kg. Nine- to ten-week old male Wistar Han rats received a single subcutaneous dose of vehicle (0.9% sodium chloride for injection, USP) or HMGCR GalNAc-conjugated siRNA (Compound 9) on study day 1. Right bicep femoris skeletal muscle samples for the measurement of HMGCR mRNA abundance were collected at necropsy (30 days post-dose). Mean HMGCR mRNA abundance for vehicle and GalNAc-conjugated HMGCR siRNA (Compound 9) groups are shown in FIG. 5B and represent mean±SD (n=5 per group). Relative to vehicle, skeletal muscle HMGCR mRNA levels were minimally increased in all dose groups, with no dose-relatedness evident. None of these differences achieved statistical significance, when compared to the vehicle group. These findings demonstrate that, at doses up to 300 mg/kg, target knockdown is not observed in skeletal muscle 30 days post-dose.

[0161] FIGS. 6A to 6B: Low density lipoprotein receptor (LDLR) protein levels in a human liver cell line (Huh7) treated with HMGCR siRNA (Compound 1) or atorvastatin at a concentration of 25 nM are provided in FIG. 6A. Briefly, Huh7 cells were transfected with test or control siRNA using lipofectamine and incubated at 37° C. for 6 hours. After changing the culture media, cells were incubated for another 24 hours prior to processing for the measurement of mRNA abundance or LDLR protein levels. The same incubation times were used for cells treated with atorvastatin. Atorvastatin (25 μM in DMSO) was diluted in culture medium to achieve a concentration of 25 nM. HMGCR mRNA was reduced by 61% versus control in Huh7 cells treated with HMGCR siRNA (Compound 1). Total LDLR protein levels, as determined by Western blotting, increased by 57% or 20% in cells treated with HMGCR siRNA (Compound 1) or atorvastatin, respectively. These results demonstrate that, like a statin, an HMGCR siRNA (Compound 1) increases LDLR protein in a human liver cell line. LDLR protein levels in primary human hepatocytes (PHH) treated with HMGCR siRNA (Compound 1) or atorvastatin at a concentration of 10 nM are provided in FIG. 6B. Briefly, PHH were transfected with test or control siRNA using lipofectamine and incubated at 37° C. for 24 hours prior to processing for the measurement of mRNA abundance or LDLR protein levels. The same incubation times were used for cells treated with atorvastatin. Atorvastatin (25 μM in DMSO) was diluted in culture medium to achieve a concentration of 10 nM. HMGCR mRNA was reduced by 65% versus control in PHH cells treated with HMGCR siRNA (Compound 1). Total LDLR protein levels, as determined by Western blotting, increased by 48% or 80% in cells treated with HMGCR siRNA (Compound 1) or atorvastatin, respectively. These results demonstrate that, like a statin, an HMGCR siRNA (Compound 1) increases LDLR protein in primary human hepatocytes.

[0162] FIGS. 7A-7B: HMGCR protein levels in a human liver cell line (Huh7) treated with Compound 1 at a concentration of 12.5 or 25 nM are provided in FIG. 7A. Briefly, Huh7 cells were transfected with test or control siRNA using lipofectamine and incubated at 37° C. for 6 hours. After changing the culture media, cells were incubated for another 24 hours prior to processing for the measurement of HMGCR protein levels by Western blotting. Relative to the control siRNA, Compound 1 reduced HMGCR protein content by 51% and 73% at concentrations of 12.5 and 25 nM, respectively. These results demonstrate that Compound 1 significantly, and dose-dependently, reduces HMGCR protein content in a human liver cell line. HMGCR protein levels in a human liver cell line (Huh7) treated with atorvastatin at a concentration of 12.5 or 25 nM are provided in FIG. 7B. Atorvastatin (25 μM in DMSO) was diluted in culture medium to achieve the desired concentrations. Huh7 cells were incubated with atorvastatin or DMSO at 37° C. for 6 hours. After changing the culture media, cells were incubated for another 24 hours prior to processing for the measurement of HMGCR protein levels by Western blotting. Relative to DMSO, atorvastatin markedly augmented HMGCR protein levels, with 96% and 123% increases observed relative to control at concentrations of 12.5 and 25 nM, respectively. These results demonstrate that, in contrast to Compound 1, atorvastatin robustly increases HMGCR protein expression in a human liver cell line.

[0163] FIG. 8A-8B: Effects of Compound 1 on plasma total cholesterol concentrations in mice with humanized livers. Mean percent change ±SD in total cholesterol level versus baseline for the PBS and Compound 1 groups are shown in FIG. 8A, while results for individual animals in the Compound 1 group are presented in panel FIG. 8B. TC, total cholesterol.

[0164] FIGS. 9A-9B: Hepatic HMGCR mRNA abundance in male cynomolgus monkeys at pre-dose and days 28 and 85 after subcutaneous injection of two doses of Compound 1 given 34 days apart. A total of 3 liver biopsy samples were obtained from each animal during the study: one pre-dose (day 12) and two post-dose (days 28 and 85 after the first dose) to enable the measurement of hepatic HMGCR mRNA expression by RT-qPCR. HMGCR mRNA levels are normalized to TATA-box binding protein (TBP) and represent mean±SD (n=4 per group). Shapes indicate values for individual animals in each group. Statistical significance was determined by paired t-test. Mean hepatic HMGCR mRNA abundance was reduced versus pre-dose in all groups at both day 28 and 85; however, only the Compound 1, 5 mg/kg group, showed statistically significant reductions in target knockdown at both timepoints. *P<0.0003, **P<0.05 for the comparison with pre-dose values.

[0165] FIG. 10: Serum HDL cholesterol concentrations in male cynomolgus monkeys at post-dose timepoints through day 85 after subcutaneous injection of two doses of Compound 1 given 34 days apart. On days 1 and 35, male cynomolgus monkeys (n=4 per group) received Compound 1 at 5 or 10 mg/kg via subcutaneous injection. Blood samples were collected at 3 pre-dose timepoints and at multiple post-dose timepoints for the determination of serum HDL cholesterol levels, using a Cobas 8000 chemistry analyzer. Data represent mean±SD percent change versus pre-dose (average of measurements conducted on samples from 3 pre-dose blood collections) through day 85 (day of final liver biopsy) post initial dose.

[0166] FIG. 11: Dose response curve in Hep3B cells transfected with nine siRNAs (S1-S9) of Example 10 in an 8-point dilution series starting at 40 nM with a dilution factor of 1:6. % remaining HMGCR mRNA levels are displayed.

[0167] FIG. 12: Dose response curve in Hepa-1-6 cells transfected with nine siRNAs (S1-S9) of Example 10 and with reporter plasmid TR030 in a 7-point dilution series starting at 6.7 nM with a dilution factor of 1:6. % remaining luciferase signal was normalized to renilla signal.

[0168] FIG. 13: Dose response curve in Hepa-1-6 cells transfected with nine siRNAs (S1-S9) in Example 10 and with reporter plasmid TR029 in a 7-point dilution series starting at 6.7 nM with a dilution factor of 1:6. % remaining luciferase signal was normalized to renilla signal.

[0169] FIGS. 14A-14B: Liver HMGCR mRNA concentrations for male C57BL/6 mice (n=3 or 4 per group) administered a single subcutaneous dose of PBS (white), No1 and No2 siRNAs at 3 mg/kg are shown in FIG. 14A. No1 and No2 siRNAs share a same nucleotide sequence but have different chemical modifications. These results show durable HMGCR knockdown in mice, with No1 siRNA (with 2′-MOE clamp in the sense strand) performing better than No5 siRNA (without 2′-MOE clamp in the sense strand) at both timepoints evaluated (10 days or 42 days). Incorporation of guide strand into liver RISC over time is illustrated in FIG. 14B. Male C57BL/6 mice (n=3 or 4 per group) were administered a single subcutaneous dose of PBS, No1 siRNA, or No5 siRNA at 3 mg/kg. Statistical significance was determined by ordinary one-way ANOVA and Sidak's multiple comparisons test. Consistent with the liver HMGCR mRNA results, No1 siRNA showed the higher RISC-loading than No5 siRNA at both timepoints evaluated (10 days or 42 days).

[0170] FIGS. 15A-15B: Liver HMGCR mRNA concentrations for male C57BL/6 mice (n=3 or 4 per group) administered a single subcutaneous dose of PBS (white), No1 to No4 siRNAs at 3 mg/kg are shown in FIG. 15A. No1 to No4 siRNAs share a same nucleotide sequence but have different chemical modifications. These results show durable HMGCR knockdown in mice, and No1 and No2 (with MOE clamp and six or eight 3′-PS in the sense strand) performed similarly as No3 and No4 (with TNA clamp and six or eight 3′-PS in the sense strand) in this experiment. Incorporation of guide strand into liver RISC over time is illustrated in FIG. 15B. Male C57BL/6 mice (n=3 or 4 per group) were administered a single subcutaneous dose of PBS, No1 to No4 siRNA at 3 mg/kg. Statistical significance was determined by ordinary one-way ANOVA and Sidak's multiple comparisons test. Consistent with the liver HMGCR mRNA results, No1 to No4 siRNAs showed similar RISC-loading at 42 days.

[0171] FIG. 16: Luciferase reporter assay results with Compounds 11-13 (Example 12) targeting HMGCR mRNA at position 115 in comparison to Compound 10 (targeting HMGCR mRNA at position 126).

[0172] FIG. 17: Luciferase reporter assay results with Compounds 14-16 (Example 12) targeting HMGCR mRNA at position 2835 in comparison to Compound 10 (targeting HMGCR mRNA at position 126).

[0173] FIG. 18: Percent reduction in plasma LDL-C concentrations in cynomolgus monkeys administered inclisiran and an HMGCR siRNA in Table 4 compared to the plasma LDL-C concentration administered inclisiran alone (inclisiran+PBS).

### DETAILED DESCRIPTION

### Definitions

[0174] Unless defined otherwise, all technical terms, scientific terms, abbreviations, chemical structures, and chemical formulae used herein have the same meaning as is commonly understood by one of ordinary skill in the art. The chemical structures and formulae set forth herein are constructed according to the standard rules of chemical valency known in the chemical arts. All patents, applications, published applications, and other publications referenced herein are incorporated by reference in their entirety unless stated otherwise.

[0175] All patents, applications, published applications, and other publications referenced herein are incorporated by reference in their entirety unless stated otherwise. Unless otherwise indicated, conventional methods of mass spectroscopy, NMR, HPLC, protein chemistry, biochemistry, recombinant DNA techniques, and pharmacology are employed.

[0176] Furthermore, use of the term “including” as well as other forms, such as “include”, “includes,” and “included,” is not limiting. As used in this specification, whether in a transitional phrase or in the body of the claim, the terms “comprise(s)” and “comprising” are to be interpreted as having an open-ended meaning. That is, the terms are to be interpreted synonymously with the phrases “having at least” or “including at least.” When used in the context of a process, the term “comprising” means that the process includes at least the recited steps, but may include additional steps. When used in the context of a compound, composition, or device, the term “comprising” means that the compound, composition, or device includes at least the recited features or components, but may also include additional features or components. As used herein, the term “a,” “an,” “the” and similar terms used in the context of the present invention (especially in the context of the claims) are to be construed to cover both the singular and plural unless otherwise indicated herein or clearly contradicted by the context.

[0177] Unless otherwise indicated, all numbers, values, and/or expressions referring to nucleotide lengths, inhibition, activities, dosages, contents, and formulations used herein are to be understood as modified in all instances by the term “about” as such numbers are inherently approximations that are reflective of, among other things, the various uncertainties of measurement encountered in obtaining such values. Further, unless specifically stated or obvious from context, as used herein, the term “about” is understood as within a range of normal tolerance in the art, for example within 2 standard deviations of the “mean. “About” may be understood as within 10%, 9%, 8%, 7%, 6%, 5%, 4%, 3%, 2%, 1%, 0.5%, 0.1%, 0.05%, or 0.01% of the stated value. Unless otherwise clear from the context, all numerical values provided herein are modified by the term “about.”

[0178] The term “nucleic acid” means a compound containing at least two nucleotide monomers covalently linked together. Nucleic acids include polynucleotides and oligonucleotides, including double-stranded oligonucleotides and single-stranded oligonucleotides, and modified versions thereof.

[0179] The term “nucleotide” means a compound including a nucleoside and a phosphate group (or interchangeably, phosphodiester linkage) that are covalently attached at 5′ position or 3′ position of the pentofuranosyl sugar (e.g., ribose or deoxyribose). In certain aspects, the nucleotide is a ribonucleotide (RNA) having the ribose as the pentofuranosyl sugar. In certain aspects, a nucleotide is a deoxyribonucleotide (DNA) having the deoxyribose (2′-deoxyribose) as the pentofuranosyl sugar. Unless otherwise specifically indicated, when referring a “nucleotide” in a chain of nucleotides (e.g., oligonucleotides), e.g., X₁ to X₂₁ and X₁ to X_{23′}, a nucleotide is meant by a nucleoside and a phosphate group (or phosphodiester linkage) that is covalently attached at 3′ position of the pentofuranosyl sugar (e.g., ribose or deoxyribose).

[0180] The term “nucleoside” means a monomer consisting of a nucleobase and a pentofuranosyl sugar (e.g., ribose or deoxyribose). A nucleoside including a ribose sugar ring has to a structure of

[chemical structure]

or a pharmaceutically acceptable salt thereof, and a nucleotide including a deoxyribose sugar ring has a structure

[chemical structure]

or a pharmaceutically acceptable salt, wherein in each structure, “Base” is a nucleobase.

[0181] The term “nucleobase” or “base,” as used herein, means the heterocyclic base moiety of a nucleoside or nucleotide. Non-limiting examples of nucleobases includes cytosine or a derivative thereof (e.g., cytosine analogue), guanine or a derivative thereof (e.g., guanine analogue), adenine or a derivative thereof (e.g., adenine analogue), thymine or a derivative thereof (e.g., thymine analogue), uracil or a derivative thereof (e.g., uracil analogue), hypoxanthine or a derivative thereof (e.g., hypoxanthine analogue), xanthine or a derivative thereof (e.g., xanthine analogue), 7-methylguanine or a derivative thereof (e.g., 7-methylguanine analogue), deaza-adenine or a derivative thereof (e.g., deaza-adenine analogue), deaza-guanine or a derivative thereof (e.g., deaza-guanine), deaza-hypoxanthine or a derivative thereof, 5,6-dihydrouracil or a derivative thereof (e.g., 5,6-dihydrouracil analogue), 5-methylcytosine or a derivative thereof (e.g., 5-methylcytosine analogue), or 5-hydroxymethylcytosine or a derivative thereof (e.g., 5-hydroxymethylcytosine analogue) moieties. In some embodiments, the nucleobase is adenine, guanine, hypoxanthine, xanthine, theobromine, caffeine, uric acid, or isoguanine, which may be optionally substituted or modified. In some embodiments, the nucleobase is

[chemical structure]

which may be optionally substituted or modified, wherein “ [symbol] ” denotes the point of attachment to a pentofuranosyl sugar ring (e.g., 1′ position).

[0182] The term “phosphate,” or “phosphate group” as used herein a chemical species made of one phosphorus atom and four oxygen atoms

[chemical structure]

or esters, salts, or acids thereof. In certain aspects, when the phosphate groups are positioned between adjacent nucleosides in RNA or DNA strand and form a “backbone” of the oligonucleotides, these terms “phosphate,” or “phosphate group” may be interchangeable used as “phosphate group,” “phosphate linkage,” “phosphodiester linkage,” or “linkage.” For example, the phosphate or phosphodiester linkage in the backbone of RNA or DNA may have the structures of

[chemical structure]

or esters, salts (e.g., pharmaceutically acceptable salts), or acids (e.g.,

[chemical structure]

thereof, wherein “ [symbol] ” denotes the point of attachment to pentofuranosyl sugar rings (e.g., 5′ and 3′ positions) in adjacent nucleosides. In certain aspects, a variant of a phosphate or phosphodiester linkage, e.g., phosphorothioate (PS) linkage, can replace a phosphate group (or phosphodiester linkage) in the backbone and connect two adjacent nucleosides. In certain aspects, a variant of a phosphate or phosphodiester linkage, e.g., phosphorothioate (PS) linkage or vinylphosphonate (VP) group, may be additionally attached at 3′ end or 5′ end of the oligonucleotides (e.g., RNA or DNA), e.g., 3′-OH or 5′-OH position of the terminal pentofuranosyl sugar (e.g., ribose or deoxyribose), so as to act as chemically or biologically functional group. In certain aspects, a variant of phosphate or phosphodiester linkage may also be referred as a phosphorus-derived internucleoside linkage that includes at least one phosphorus atom in the backbone.

[0183] Unless otherwise indicated herein, an unmodified RNA (or “ribonucleotide”) in a chain of nucleotides (e.g., mRNA, rRNA, or sense strand or antisense strand of siRNA) as disclosed refers to a structure of

[chemical structure]

or a pharmaceutically acceptable salt thereof. Likewise, an unmodified DNA (or “deoxyribonucleotides”) in a chain of nucleotides (e.g., genomic DNA or cDNA) as disclosed herein specifically refers to a structure of

[chemical structure]

or a pharmaceutically acceptable salt thereof. In each structure “Base” is a nucleobase and [symbol] is an attachment point to the adjacent nucleotides.

[0184] Unless otherwise indicated herein, when an unmodified RNA is the first nucleotide from the 5′ end of an RNA chain (e.g., mRNA or sense strand or antisense strand of siRNA), that nucleotide has a structure of

[chemical structure]

or a pharmaceutically acceptable salt thereof. Likewise, when an unmodified DNA is the first nucleotide from the 5′ end of a DNA chain (e.g., genomic DNA or cDNA), that nucleotide has a structure of

[chemical structure]

or a pharmaceutically acceptable salt thereof. In each structure “Base” is a nucleobase and [symbol] is an attachment point (5′ oxygen) to the adjacent nucleotides.

[0185] Alternatively, for example, the first nucleotide from the 5′ end of an RNA chain (e.g., mRNA, or sense strand or antisense strand of siRNA), that nucleotide has a structure of

[chemical structure]

or a pharmaceutically acceptable salt thereof and the first nucleotide from the 5′ end of a DNA chain (e.g., genomic DNA or cDNA), that nucleotide has a structure of

[chemical structure]

or a pharmaceutically acceptable salt thereof, when [symbol] is an attachment point (5′ oxygen) to the adjacent nucleotides.

[0186] Unless otherwise indicated herein, when an unmodified RNA is the first nucleotide from the 3′ end of an RNA chain (e.g., mRNA, or sense strand or antisense strand of siRNA), that nucleotide has a structure of

[chemical structure]

or a pharmaceutically acceptable salt. Likewise, when an unmodified DNA is the first nucleotide from the 3′ end of a DNA chain (e.g., genomic DNA or cDNA), that nucleotide has a structure of

[chemical structure]

or a pharmaceutically acceptable salt thereof. In certain embodiments, when an unmodified RNA is the first nucleotide from the 3′ end of an RNA chain (e.g., mRNA, or sense strand or antisense strand of siRNA) that nucleotide does not include 3′ end phosphate group or phosphodiester linkage, for example, which has been removed during hydrolysis or synthesis, has a structure of

[chemical structure]

or a pharmaceutically acceptable salt. Likewise, when an unmodified DNA is the first nucleotide from the 3′ end of a DNA chain (e.g., genomic DNA or cDNA), that nucleotide does not include 3′ end phosphate group, for example, which has been removed during hydrolysis or synthesis, has a structure of

[chemical structure]

or a pharmaceutically acceptable salt thereof. In each structure “Base” is a nucleobase and [symbol] is an attachment point (e.g., phosphorus of the phosphate linkage) to the adjacent nucleotides.

[symbol]

[0187] A code “A”, “G”, “C”, or “U” presented in a sequence list as disclosed herein stand for a RNA nucleotide that contains adenine, guanine, cytosine, or uracil as a base, respectively. A code “dA”, “dG”, “dC” or “dT” presented in a sequence list as disclosed herein stand for a DNA nucleotide that contains adenine, guanine, cytosine, and thymine as a base, respectively. In some embodiments, the code “T” may be present in a RNA sequence then it may refer to a nucleotide (e.g. modified nucleotide) that thymine as a base.

[0188] The term “oligonucleotide” means a shorter length nucleic acid, e.g. of less than 100 nucleotides in length. Oligonucleotides may be single-stranded or double-stranded. In some embodiments, an oligonucleotide may include naturally occurring ribonucleotides, naturally occurring deoxyribonucleotides, and/or nucleotides having one or more modifications to a naturally occurring terminus, sugar, nucleobase, and/or internucleoside linkage. Non-limiting examples of oligonucleotides include double-stranded oligonucleotides (e.g., dsRNA), single-stranded oligonucleotides (e.g., single stranded RNA or ssRNA), antisense oligonucleotides (“ASO”), small interfering RNA (siRNA), microRNA mimics, short hairpin RNAs (shRNA), single-strand small interfering RNA (ssRNAi), RNaseH oligonucleotides, anti-microRNA oligonucleotides, steric blocking oligonucleotides, exon-skipping oligonucleotides, CRISPR guide RNAs, and aptamers. In certain aspects, the oligonucleotide is a dsRNA and each strand has a length less than 100 nucleotides (“nt”), less than 90 nt, less than 80 nt, less than 70 nt, less than 60 nt, less than 50 nt, less than 40 nt, less than 35 nt, less than 30 nt, less than 28 nt, less than 26 nt, less than 25 nt, less than 24 nt, less than 23 nt, less than 22 nt, less than 21 nt, less than 20 nt, less than 19 nt, less than 18 nt, less than 17 nt, less than 16 nt, or 15 nt.

[0189] The terms “iRNA”, “RNAi agent,” “iRNA agent,”, “RNA interference agent” as used interchangeably herein, refer to an agent that contains RNA as that term is defined herein, and which mediates the targeted cleavage of an RNA transcript (mRNA) via an RNA-induced silencing complex (RISC) pathway. An RNAi agent directs the sequence-specific degradation of mRNA through a process and thereafter inhibits expression of the gene encoded by the mRNA in a cell in vivo, e.g., in a subject (e.g., any vertebrate, mammal, or human).

[0190] The term “small interfering RNA” or “siRNA” means a double-stranded oligonucleotide (dsRNA) formed with two anti-parallel, and partially, substantially or fully complementary nucleic acid strands (e.g., a first strand and a second strand; or a “sense” strand and an “antisense” strand), which interferes with the expression of genes in a sequence-specific manner by facilitating mRNA degradation before translation through the RNA interference pathway. In some embodiments, depending on the context, the first strand can be a “guide” or antisense strand, and the second strand can be a “passenger” or sense strand. In some embodiments, depending on the context, the “first” strand can be a passenger or sense strand, and the “second” strand can be a guide or antisense. In certain aspects, an “RNAi agent” or “siRNA agent,” as used herein, refers a double-stranded RNA (dsRNA) with or without a ligand or other conjugate, and may be interchangeably used with a term “double stranded RNAi agent (dsRNAi agent),” or “dsRNA agent.” In certain aspect of the disclosure, the term “siRNA” can be used to describe a dsRNA with specific nucleotide sequences (unmodified or modified nucleotide sequences), without a ligand or other conjugate.

[0191] The term “antisense strand,” as used herein, refers an oligonucleotide (e.g., RNA) of an siRNA or a dsRNAi that is complementary (e.g., partially, substantially, or fully complementary) to the target mRNA and is incorporated into the RNA-induced silencing complex (RISC) to direct gene silencing in a sequence-specific manner through the RNA interference pathway. An antisense strand may also be referred to as the “guide strand.” In some embodiments, the antisense strand may have a length from 15-30 nt, 15-26 nt, 15-23 nt, 15-22 nt, 15-21 nt, 15-20 nt, 15-19 nt, 15-18 nt, 15-17 nt, 18-30 nt, 18-26 nt, 18-23 nt, 18-22 nt, 18-21 nt, 18-20 nt, 19-30 nt, 19-26 nt, 19-23 nt, 19-22 nt, 19-21 nt, 19-20 nt, 19 nt, 20-30 nt, 20-26 nt, 20-25 nt, 20-24 nt, 20-23 nt, 20-22 nt, 20-21 nt, 20 nt, 21-30 nt, 21-26 nt, 21-25 nt, 21-24 nt, 21-23 nt, 21-22 nt, 9 nt, 10 nt, 11 nt, 12 nt, 13 nt, 14 nt, 15 nt, 16 nt, 17 nt, 18 nt, 19 nt, 20 nt, 21 nt, 22 nt, 23 nt, 24 nt, 25 nt, 26 nt, 27 nt, 28 nt, 29 nt, 30 nt, 31 nt, 32 nt, 33 nt, 34 nt, 35 nt, or 36 nt.

[0192] The term “sense strand,” as used herein, refers an oligonucleotide that is complementary (e.g., partially, substantially, or fully complementary) to the antisense strand. The sense strand is typically degraded following incorporation of the antisense strand into RISC. The sense strand may also be referred to as the “passenger strand.” In some embodiments, the sense strand may have a length from 15-30 nt, 15-26 nt, 15-23 nt, 15-22 nt, 15-21 nt, 15-20 nt, 15-19 nt, 15-18 nt, 15-17 nt, 18-30 nt, 18-26 nt, 18-23 nt, 18-22 nt, 18-21 nt, 18-20 nt, 19-30 nt, 19-26 nt, 19-23 nt, 19-22 nt, 19-21 nt, 19-20 nt, 19 nt, 20-30 nt, 20-26 nt, 20-25 nt, 20-24 nt, 20-23 nt, 20-22 nt, 20-21 nt, 20 nt, 21-30 nt, 21-26 nt, 21-25 nt, 21-24 nt, 21-23 nt, 21-22 nt, 9 nt, 10 nt, 11 nt, 12 nt, 13 nt, 14 nt, 15 nt, 16 nt, 17 nt, 18 nt, 19 nt, 20 nt, 21 nt, 22 nt, 23 nt, 24 nt, 25 nt, 26 nt, 27 nt, 28 nt, 29 nt, 30 nt, 31 nt, 32 nt, 33 nt, 34 nt, 35 nt, or 36 nt.

[0193] The term “complementary” means that a nucleotide (e.g., RNA or DNA) or a sequence of nucleotides are capable of base pairing non-covalently via hydrogen bonding with another nucleotide or sequence of nucleotides. As described herein and commonly known in the art the complementary (matching) nucleotide of adenosine is thymidine or uridine and the complementary (matching) nucleotide of guanosine is cytidine. The complementarity of sequences may be partial, in which only some of the nucleic acids match according to base pairing, or complete, where all the nucleic acids match according to base pairing. For example, two sequences that are complementary to each other, may have a specified percentage of nucleotides that participate in nucleobase-pairing (i.e., about 50% complementarity, preferably 50%, 55%, 65%, 70%, 75%, 80%, 85%, 90%, 91%, 92%, 93%, 94%, 95%, 96%, 97%, 98%, 99%, or greater complementarity over a specified region). In some embodiments, two sequences are partially complementary when the percentage of nucleotides that participate in nucleobase-pairing is about 50%, about 55%, about 65%, about 70%, about 75%, or about 80%, or ranges from about 50% to about 80%. In some embodiments, two sequences are substantially complementary when the percentage of nucleotides that participate in nucleobase-pairing is about 80%, about 81%, about 82%, about 83%, about 84%, about 85%, about 86%, about 87%, about 88%, about 89%, about 90%, about 91%, about 92%, about 92%, about 93%, about 94%, or about 95%, or ranges from about 80% to about 95%.

[0194] Examples of complementary (e.g., partially, substantially, or fully complementary) sequences are sense and antisense sequences, wherein the sense sequence contains complementary (e.g., partially, substantially, or fully complementary) nucleotides to the antisense sequence and thus forms the complement of the antisense sequence. In certain aspects, a sense strand and an antisense strand of a double-stranded oligonucleotide (e.g., double stranded RNA) are substantially or fully complementary over their entire lengths. In some embodiments, a sense strand and an antisense strand of dsRNA are substantially or fully complementary over the entire length of the double-stranded region of the siRNA, and one or both termini of either strand comprises single-stranded nucleotides.

[0195] Another examples of complementary (e.g., partially, substantially, or fully complementary) sequences are an antisense strand and its target mRNA sequence. In certain aspects, an antisense strand is substantially or fully complementary to its target mRNA. For example, the complementary (e.g., partially, substantially, or fully complementary) sequences may be between an antisense strand and a coding region of the target mRNA, or a non-coding sequence of the target mRNA. In certain aspects, an antisense strand is substantially, or fully complementary to its target mRNA to reduce or eliminate off-target profile for and to improve down-regulation of the target gene (e.g., gene of the target mRNA sequence).

[0196] The terms “identical” or percent “identity,” in the context of two or more nucleic acids or polypeptide sequences, refer to two or more sequences or subsequences that are the same or have a specified percentage of amino acid residues or nucleotides that are the same (i.e., at least 60% identity, or at least 61%, 62%, 63%, 64%, 65%, 66%, 67%, 68%, 69%, 70%, 71%, 72%, 73%, 74%, 75%, 76%, 77%, 78%, 79%, 80%, 81%, 82%, 83%, 84%, 85%, 86%, 87%, 88%, 89%, 90%, 91%, 92%, 93%, 94%, 95%, 96%, 97%, 98%, 99%, or within a range defined by any of two of the preceding values, identity over a specified region when compared and aligned for maximum correspondence over a comparison window or designated region) as measured using a BLAST or BLAST 2.0 sequence comparison algorithms with default parameters described below, or by manual alignment and visual inspection (see, e.g., NCBI web site or the like). This definition also refers to, or may be applied to, the complement of a test sequence. The definition also includes sequences that have deletions and/or additions, as well as those that have substitutions. As described below, the preferred algorithms can account for gaps, insertions and the like. Alignment for purposes of determining percent sequence identity can be achieved in various ways that are within the skill in the art, for instance, using publicly available computer software such as BLAST, BLAST-2, ALIGN, ALIGN-2 or Megalign (DNASTAR) software. Appropriate parameters for measuring alignment, including any algorithms needed to achieve maximal alignment over the full-length of the sequences being compared can be determined by known methods.

[0197] As used herein, “target sequence” or “target gene” refer to a contiguous portion of the nucleotide sequence of an mRNA molecule formed during the transcription of a gene including mRNA that is a product of RNA processing of a primary transcription product. The target portion of the sequence will be at least long enough to serve as a substrate for RNAi-directed cleavage at or near that portion. For example, the target sequence will generally be from 9-36 nucleotides (“nt”) in length, e.g., 15-30 nt in length, including all sub-ranges therebetween. As non-limiting examples, the target sequence may have a length from 15-30 nt, 15-26 nt, 15-23 nt, 15-22 nt, 15-21 nt, 15-20 nt, 15-19 nt, 15-18 nt, 15-17 nt, 18-30 nt, 18-26 nt, 18-23 nt, 18-22 nt, 18-21 nt, 18-20 nt, 19-30 nt, 19-26 nt, 19-23 nt, 19-22 nt, 19-21 nt, 19-20 nt, 19 nt, 20-30 nt, 20-26 nt, 20-25 nt, 20-24 nt, 20-23 nt, 20-22 nt, 20-21 nt, 20 nt, 21-30 nt, 21-26 nt, 21-25 nt, 21-24 nt, 21-23 nt, 21-22 nt, 9 nt, 10 nt, 11 nt, 12 nt, 13 nt, 14 nt, 15 nt, 16 nt, 17 nt, 18 nt, 19 nt, 20 nt, 21 nt, 22 nt, 23 nt, 24 nt, 25 nt, 26 nt, 27 nt, 28 nt, 29 nt, 30 nt, 31 nt, 32 nt, 33 nt, 34 nt, 35 nt, or 36 nt.

[0198] The term “ligand,” as used herein, refers to a compound or moiety that can impose characteristics to provide additional properties, e.g., affinity or cell delivery efficiency, to an RNAi (e.g., dsRNAi) as described herein. The ligand may be coupled or conjugated directly to the RNAi (e.g., sense strand or antisense strand of dsRNA), or indirectly to the RNAi agent (e.g., sense strand or antisense strand of dsRNA) via an intervening linker (“linker”). When a ligand is conjugated or coupled indirectly to the RNAi (e.g., dsRNA) via a linker, the ligand may be formed of a core moiety (e.g., targeting moiety) that has specific function to provide affinity or efficacy and the linker that provides merely an optimal distance, e.g., between the core moiety and the RNAi agent (dsRNA). In certain aspects, the term “ligand” embraces the ligand in combination with the linker. Examples of ligands or targeting moieties thereof may include, but not be limited to, one or more selected from a synthetic or natural compound, a peptide, an antibody, a carbohydrate (e.g., sugar moiety), or an additional nucleic acid.

[0199] The term “modified nucleotide” means a nucleotide having one or more modifications relative to a naturally occurring nucleotide, e.g., RNA. The modified nucleotide may be selected over an unmodified form because of desirable properties such as, for example, enhanced cellular uptake, enhanced affinity for other oligonucleotides or nucleic acid targets, increased stability in the presence of nucleases, and/or reduced immune stimulation. In certain aspects, the modification may be present in at least one of (i) an internucleoside linkage (“linkage”), (ii) a nucleobase, and (iii) a sugar moiety of the nucleotide. In certain aspects, the modification is present in the internucleoside linkage, e.g., by chemically modifying a phosphate (or phosphodiester) linkage or replacing a phosphate (or phosphodiester) linkage with other linking groups. In certain aspects, the modification is present in a sugar moiety, i.e., ribose ring, by substituting hydroxyl group on 2′ position of the ribose ring with other chemical group or by replacing a ring structure with other heterocycloalkyl or cycloalkyl, glycol group having a structure of

[chemical structure]

bicyclic or bridged ring on the ribose such as locked nucleic acid (LNA) having a structure of

[chemical structure]

or the like. In certain aspects, the modification is present in a nucleobase (e.g., A, G, C, T, or U) by chemical modification in a nucleobase by replacing the nucleobase with other moiety, for example, by replacing one naturally occurring nucleobase with another naturally occurring nucleobase. In certain aspects, a modified nucleotide may contain a modification in a sugar moiety and an unmodified phosphate (or phosphodiester) linkage. In certain aspects, a modified nucleotide may have a modification in a sugar moiety but with an unmodified nucleobase. In certain aspects, a modified nucleotide may have a modification in a sugar moiety and a nucleobase. In certain aspects, a modified nucleotide may have a modification in a sugar moiety and a phosphate (or phosphodiester) linkage. In certain aspects, a modified nucleotide may have a modification in a sugar moiety, a phosphate (or phosphodiester) linkage and a nucleobase. In certain aspects, a modified nucleotide may have an unmodified sugar moiety and an unmodified phosphate (or phosphodiester) linkage. In certain aspects, a modified nucleotide may have an unmodified sugar moiety and an unmodified nucleobase. In certain aspects, a modified nucleotide may have an unmodified sugar moiety and a modified nucleobase. In certain aspects, a modified nucleotide may have an unmodified sugar moiety and a modified phosphate (or phosphodiester) linkage. In certain aspects, a modified nucleotide may have a modified sugar moiety, a modified phosphate (or phosphodiester) linkage and a modified nucleobase.

[0200] The term “modified phosphate group,” or “modified phosphodiester linkage” as used herein refers to a chemical group in place of a phosphate group (or phosphodiester linkage) in a nucleotide as being attached to the 3′ end (3′ carbon) of the pentofuranosyl group.

[0201] The terms “identical” or percent “identity,” in the context of two or more nucleic acids or polypeptide sequences, refer to two or more sequences or subsequences that are the same or have a specified percentage of amino acid residues or nucleotides that are the same (i.e., at least 60% identity, or at least 61%, 62%, 63%, 64%, 65%, 66%, 67%, 68%, 69%, 70%, 71%, 72%, 73%, 74%, 75%, 76%, 77%, 78%, 79%, 80%, 81%, 82%, 83%, 84%, 85%, 86%, 87%, 88%, 89%, 90%, 91%, 92%, 93%, 94%, 95%, 96%, 97%, 98%, 99%, or within a range defined by any of two of the preceding values, identity over a specified region when compared and aligned for maximum correspondence over a comparison window or designated region) as measured using a BLAST or BLAST 2.0 sequence comparison algorithms with default parameters described below, or by manual alignment and visual inspection (see, e.g., NCBI web site or the like). This definition also refers to, or may be applied to, the complement of a test sequence. The definition also includes sequences that have deletions and/or additions, as well as those that have substitutions. As described below, the preferred algorithms can account for gaps, insertions and the like. Alignment for purposes of determining percent sequence identity can be achieved in various ways that are within the skill in the art, for instance, using publicly available computer software such as BLAST, BLAST-2, ALIGN, ALIGN-2 or Megalign (DNASTAR) software. Appropriate parameters for measuring alignment, including any algorithms needed to achieve maximal alignment over the full-length of the sequences being compared can be determined by known methods.

[0202] Throughout the disclosure, nucleotide positions or coordinates are relative to the beginning (5′ end) of the reference transcript.

[0203] The term “overhang” or “nucleotide overhang” herein refers to at least one unpaired nucleotide that protrudes from the end of at least one of the two strands of the duplex structure of an RNAi agent. In some embodiments, when a 3′-end of one strand extends beyond the 5′-end of the other strand, or vice versa, this forms a nucleotide overhang, e.g., the unpaired nucleotide(s) form the overhang.

[0204] “Blunt” or “blunt end” means that there are no unpaired nucleotides at that end of the double stranded RNAi agent, i.e., no nucleotide overhang. A “blunt ended” RNAi agent is a dsRNA that is double-stranded over its entire length, i.e., no nucleotide overhang at either end of the molecule.

[0205] A “mismatch” is defined herein as a difference between the base sequence (e.g., A instead of G) or length when two sequences are maximally aligned and compared. In certain aspects, the term “mismatch” means a nucleobase of a first oligonucleotide (e.g., a first strand) that is not capable of pairing with a nucleobase at a corresponding position of a second oligonucleotide (e.g., a second strand).

[0206] The term “non-end” herein refers to a position between the 3′ end and the 5′ end of the sense or antisense strand.

[0207] The term “3-hydroxy-3-methylglutaryl-CoA reductase,” as used herein and also interchangeably used with the term “HMGCR,” refers to a gene or protein (e.g., enzyme or reductase) thereof that converts 3-hydroxy-3-methylglutaryl coenzyme A (“HMG-CoA”) to mevalonate in cholesterol or isoprenoid synthesis. The term “HMGCR” also includes isoforms of proteins encoded by HMGCR mRNA sequences expressed in any vertebrate or mammals (e.g., human, mouse, rat, monkey, dog, cat, horse, pig, or cow).

[0208] In certain aspects, HMGCR may be identified with NCBI Gene ID, for example, human HMGCR Gene ID: 3156, mouse HMGCR Gene ID: 15357, rat HMGCR Gene ID: 25675, Rhesus monkey HMGCR Gene ID: 705479, dog HMGCR Gene ID: 479182, or cat HMGCR Gene ID: 101098922.

[0209] In certain aspects, HMGCR may be identified with mRNA transcript, for example, human HMGCR mRNA transcript (e.g., NM_000859.3; NM_001130996.2; and NM_001364187.1), mouse HMGCR mRNA transcript (e.g., NM_008255.2; NM_001360165.1; and NM_001360166.1), rat HMGCR mRNA transcript (e.g., NM_013134.2), Cynomolgus monkey HMGCR mRNA (e.g., XM_005557178.1), Rhesus monkey HMGCR mRNA (e.g., XM_001104607.4; and XM_002804417.3), dog HMGCR mRNA (e.g., XM_038471609.1; XM_038471611.1; and XM_038471610.1) and cat HMGCR mRNA (e.g., XM_003981075.6; and XM_019835641.3). In certain aspects, HMGCR may be identified with amino acid sequences, such as such as human HMGCR protein (e.g., NP_000850.1; NP_001124468.1; and NP_001351116.1), mouse HMGCR protein (e.g., NP_032281.2; NP_001347094.1; and NP_001347095.1), rat HMGCR protein (e.g., NP_037266.2), Rhesus monkey protein (e.g., XP_001104607.3; and XP_002804463.3), dog HMGCR protein (e.g., XP_038327537.1; XP_038327539.1; and XP_038327538.1), or cat HMGCR protein (e.g., XP_003981124.1 and XP_019691200.1). Examples of HMGCR gene, mRNA and proteins are not limited to the above list and may further include examples publicly available information from web database, for example, in GenBank, UniProt, Ensembl, Alliance and the like.

[0210] In certain aspects, HMGCR may include a fragment, variant, or mutant of the protein that may have the same or similar amino acid sequences (e.g., having about 80%, 85%, 90%, 95%, or 99% or greater of similarity or identity of amino acid sequences) with any one of the above listed HMGCR gene (mRNA) or protein sequences. In certain aspects, HMGCR may include a fragment, variant, or mutant of the protein having the same or in similar in vivo or in vitro enzymatic (e.g., reductase) activity, for example, having about 80%, 85%, 90%, 95%, or 99% or the native enzyme activity, to produce mevalonate from HMG-CoA.

[0211] The term “Compound” as used herein refers to a double stranded RNA (e.g., HMGCR dsRNA or dsRNAi agent) that is conjugated with a ligand or a delivery moiety, while a term “compound” denotation may refer to a substance, molecule or chemical entity that can be chemically defined and/or identifiable.

[0212] As defined herein, the term “inhibition”, “inhibit”, “inhibiting” and the like mean negatively affecting (e.g. decreasing) activity, expression or function relative to the activity, expression or function in the absence of an inhibitor. In certain aspects, inhibition can mean negatively affecting (e.g. decreasing) the concentration or levels of a biomolecule, such as a protein or mRNA, relative to the concentration or level of the biomolecule in the absence of an inhibitor. In certain aspects, inhibition includes, partially or totally, blocking stimulation, decreasing, preventing, or delaying activation; inactivating, desensitizing, or down-regulating signal transduction or enzymatic activity; or decreasing the amount of a biomolecule target (e.g., protein target or mRNA target). In certain aspects, inhibition refers to a reduction in the expression of a particular biomolecule target, such as a protein target (e.g., HMGCR protein) or an mRNA target (e.g., HMGCR mRNA). In certain aspects, inhibition refers to a reduction of amount of a target biomolecule (e.g., HMGCR protein or mRNA) resulting from a down-regulating protein expression (e.g. directly inhibiting translation or transcription). In certain aspects, inhibition refers to a reduction of activity of a target biomolecule (e.g., HMGCR protein or mRNA) from an indirect interaction (e.g., inhibiting or regulating other transcriptional or translational factors).

[0213] The term “inhibitor” also refers to a compound, composition, or substance capable of detectably negatively affecting (e.g. decreasing) activity, expression or function of a given protein or gene. For example, an inhibitor may decrease activity, expression or function by about 10%, 20%, 30%, 40%, 50%, 60%, 70%, 80%, 90% or greater in comparison to a control in the absence of the inhibitor. Inhibitors include, for example, synthetic or biological molecules, such as oligonucleotides. In some embodiments, the inhibitors include RNAi agent, e.g., siRNA agent, dsRNAi agent, or dsRNA agent.

[0214] As used herein, the “level or degree of inhibiting or decreasing expression” of a given gene refers to the at least partial suppression of the expression of a target gene (e.g., HMGCR), as manifested by a reduction of the amount of the target gene mRNA (e.g., HMGCR mRNA) or protein (e.g., HMGCR) encoded by the target gene, which may be isolated from or detected in a group of cells (“a first cell”) in which a target gene is transcribed and which has or have been treated such that the expression of a target gene is inhibited, as compared to group of cells substantially identical to the first cell but without treated (“control cells” or “a second cell”).

[0215] In some embodiments, the level or expression of the target gene (e.g., HMGCR) can be measured by evaluation of mRNA (e.g., via Northern blots or PCR). The effect of an RNAi agent on the target gene (e.g., HMGCR) expression can be determined by measuring the gene transcription rates (e.g., via Northern blots; or reverse transcriptase polymerase chain reaction or real-time polymerase chain reaction). In some embodiments, the degree of inhibition can be calculated as the following equation:

$$\frac{( mRNA in control cells ) - ( mRNA in treatedcells )}{( mRNA in control cells )} \cdot 100 \%$$

[0216] Alternatively, the degree of inhibition may be given in terms of a reduction of a parameter that is functionally linked to target gene (e.g., HMGCR) expression, e.g., the amount of protein encoded by a target gene (e.g., HMGCR), alteration in expression of the protein whose expression is dependent on the target gene (e.g., HMGCR), alteration in an activity of the enzyme (e.g., HMGCR) encoded by the target gene (e.g., HMGCR). In some embodiments, the level or expression of the protein (e.g., HMGCR) from the target gene can be evaluated by measuring the expressed protein amount (e.g., Western blots). In some embodiments, the level or expression of the protein from the target gene can be measured by the enzymatic assay (e.g., kinetic assay) of the protein.

[0217] As used herein, the term “down-regulate” or “down-regulating” refers to any statistically significant decrease in a biological activity and/or expression of the target protein (e.g., HMGCR), including full blocking of the activity (i.e., complete inhibition) and/or expression. For example, “down-regulation” can refer to a decrease of at least about 10%, 20%, 30%, 40%, 50%, 60%, 70%, 80%, 90% or 100% in target protein (e.g., HMGCR) level, activity and/or expression.

[0218] As used herein, the terms “salt” or “salts” refers to an acid addition or base addition salt of a compound of the present invention. “Salts” include in particular “pharmaceutical acceptable salts”. The term “pharmaceutically acceptable salts” refers to salts that retain the biological effectiveness and properties of the compounds of this invention and, which typically are not biologically or otherwise undesirable. In many cases, the compounds of the present invention are capable of forming acid and/or base salts by virtue of the presence of amino and/or carboxyl groups or groups similar thereto. When both a basic group and an acid group are present in the same molecule, the compounds of the present invention may also form internal salts, e.g., zwitterionic molecules. In certain aspects, pharmaceutically acceptable acid addition salts can be formed with inorganic acids and organic acids. Examples of the inorganic acids from which salts can be derived include, for example, hydrochloric acid, hydrobromic acid, sulfuric acid, nitric acid, phosphoric acid, and the like. Examples of the organic acids from which salts can be derived include, for example, acetic acid, propionic acid, glycolic acid, oxalic acid, maleic acid, malonic acid, succinic acid, fumaric acid, tartaric acid, citric acid, benzoic acid, mandelic acid, methanesulfonic acid, ethanesulfonic acid, toluenesulfonic acid, sulfosalicylic acid, and the like. In certain aspects, the pharmaceutically acceptable base addition salts can be formed with inorganic and organic bases. Examples of the inorganic bases from which salts can be derived include, for example, ammonium salts and metals from columns I to XII of the periodic table, such as sodium, potassium, ammonium, calcium, magnesium, iron, silver, zinc, and copper; particularly suitable salts include ammonium, potassium, sodium, calcium and magnesium salts. Examples of the organic bases from which salts can be derived include, for example, primary, secondary, and tertiary amines, substituted amines including naturally occurring substituted amines, cyclic amines, basic ion exchange resins, and the like, such as organic amines include isopropylamine, benzathine, cholinate, diethanolamine, diethylamine, lysine, meglumine, piperazine and tromethamine.

[0219] In certain aspects, the term “pharmaceutically acceptable salt” as used herein may include the salts forms in acetate, ascorbate, adipate, aspartate, benzoate, besylate, bromide/hydrobromide, bicarbonate/carbonate, bisulfate/sulfate, camphorsulfonate, caprate, chloride/hydrochloride, chlortheophyllonate, citrate, ethandisulfonate, fumarate, gluceptate, gluconate, glucuronate, glutamate, glutarate, glycolate, hippurate, hydroiodide/iodide, isethionate, lactate, lactobionate, laurylsulfate, malate, maleate, malonate, mandelate, mesylate, methylsulphate, mucate, naphthoate, napsylate, nicotinate, nitrate, octadecanoate, oleate, oxalate, palmitate, pamoate, phosphate/hydrogen phosphate/dihydrogen phosphate, polygalacturonate, propionate, sebacate, stearate, succinate, sulfosalicylate, sulfate, tartrate, tosylate trifenatate, trifluoroacetate or xinafoate.

[0220] As used herein, the term “pharmaceutically acceptable carrier” refers to a substance useful in the preparation or use of a pharmaceutical composition and includes, for example, suitable diluents, solvents, dispersion media, surfactants, antioxidants, preservatives, isotonic agents, buffering agents, emulsifiers, absorption delaying agents, salts, drug stabilizers, binders, excipients, disintegration agents, lubricants, wetting agents, sweetening agents, flavoring agents, dyes, and combinations thereof, as would be known to those skilled in the art (see, for example, Remington The Science and Practice of Pharmacy, 22nd Ed. Pharmaceutical Press, 2013, pp. 1049-1070).

[0221] As used herein, the term “treat,” “treating,” or “treatment” of any disease or disorder refers to alleviating or ameliorating the disease or disorder (i.e., slowing or arresting the development of the disease or at least one of the clinical symptoms thereof); or alleviating or ameliorating at least one physical parameter or biomarker associated with the disease or disorder, including those which may not be discernible to the patient. In some embodiments, treating does not include preventing.

[0222] As used herein, the term “prevent”, “preventing” or “prevention” of any disease or disorder refers to the prophylactic treatment of the disease or disorder; or delaying the onset or progression of the disease or disorder.

[0223] The term “therapy,” as used herein refers to an application of one or more specific procedures used for the amelioration of at least one indicator or a disease or condition. In certain aspects, the specific procedure is the administration of one or more pharmaceutical or therapeutic agents.

[0224] The term “associated” or “associated with” in the context of a substance or substance activity or function associated with a disease (e.g. a protein associated disease, or HMGCR associated disease) means that the disease is caused by (in whole or in part), or a symptom of the disease is caused by (in whole or in part) the substance or substance activity or function (e.g., HMGCR activity or function). Thus, as used herein, what is described as “being associated” with a disease, if a causative agent, could be a target for treatment of the disease.

[0225] The term “HMGCR-associated disorder or disease,” as used herein refers to a disorder or disease that is caused by, or associated with, HMGCR gene expression or HMGCR protein production. For example, HMGCR-associated disorder or disease (e.g. hyperlipidemia, hypercholesterolemia or ASCVD) may be treated with a HMGCR modulator (e.g., gene silencing agent or down regulator) or HMGCR inhibitor, in the instance where HMGCR activity or function (e.g., enzyme activity in cholesterol synthesis) controls key step in the cholesterol synthesis or metabolism.

[0226] As used herein, the term “hyperlipidemia” refers to any disorder, disease or condition characterized by abnormal elevation of levels of any or all lipids, such as cholesterol and triglycerides, and/or lipoproteins in the blood or a condition that can lead to abnormal elevation of levels of any or all lipids and/or lipoproteins in the blood. In one embodiment, the hyperlipidemia is hypertriglyceridemia. As used herein, the term “hypertriglyceridemia” refers to a condition in which triglyceride levels are elevated, often caused or exacerbated by uncontrolled hyperlipidemia mellitus, obesity, and sedentary habits, e.g., when triglycerides in blood are greater than 1000-2000 mg/dL. As used herein the term “hypercholesterolemia” refers to a form of hyperlipidemia (elevated levels of lipids in the blood) in which there are high levels of cholesterol in the serum of a subject, e.g., at least about 240 mg/dL of total cholesterol.

[0227] As used herein, the term “administering” means oral administration, administration as a suppository, topical contact, intravenous, intraperitoneal, intramuscular, intralesional, intrathecal, intranasal or subcutaneous administration, or the implantation of a slow-release device, e.g., a mini-osmotic pump, to a subject. Administration is by any route, including parenteral and transmucosal (e.g., buccal, sublingual, palatal, gingival, nasal, vaginal, rectal, or transdermal) compatible with the preparation. Parenteral administration includes, e.g., intravenous, intramuscular, intra-arteriole, intradermal, subcutaneous, intraperitoneal, intraventricular, and intracranial. Other modes of delivery include, but are not limited to, the use of liposomal formulations, intravenous infusion, transdermal patches, etc.

[0228] The term “combination,” embraces mixtures of first and second dsRNAi agents. The term “combination,” also embraces first and second dsRNAi agents, which are formulated separately. In some embodiments, the first dsRNAi agent and/or the second dsRNAi agent are administered together with one or more additional therapeutic agents. In certain embodiments, the first dsRNAi agent is administered at the same time, prior to, or after the administration of the second dsRNAi agent. In certain embodiments, the first dsRNAi agent and the second dsRNAi agent are administered together. In some embodiments, the first dsRNAi agent is formulated with one or more additional therapeutic agents, optionally in the same pharmaceutical composition as the first dsRNAi agent. In some embodiments, the second dsRNAi agent is formulated with one or more additional therapeutic agents, optionally in the same pharmaceutical composition as the second dsRNAi agent. In some embodiments, the first dsRNAi agent and the second dsRNAi agent are formulated with one or more additional therapeutic agents, optionally in the same pharmaceutical composition as the first dsRNAi agent and the second dsRNAi agent. In some embodiments, the first dsRNAi agent (e.g., an HMGCR dsRNAi agent described herein) and the second dsRNAi agent (e.g., inclisiran) are formulated as a fixed dose combination (“FDC”).

[0229] Co-administration includes administering one active agent (e.g., RNAi agent) within 0.5, 1, 2, 4, 6, 8, 10, 12, 16, 20, or 24 hours of a second active agent (e.g. anticancer or antitumor agents). Also contemplated herein, are embodiments, where co-administration includes administering one active agent (e.g., dsRNAi agent or a therapeutic agent) within 0.5, 1, 2, 4, 6, 8, 10, 12, 16, 20, or 24 hours of a second active agent. Co-administration includes administering two active agents simultaneously, approximately simultaneously (e.g., within about 1, 5, 10, 15, 20, or 30 minutes of each other), or sequentially in any order. In some embodiments, co-administration can be accomplished by co-formulation, i.e., preparing a single pharmaceutical composition including both active agents. In some embodiments, the active agents can be formulated separately.

[0230] In some embodiments, the first dsRNAi agent and the second dsRNAi agent are co-administered. Co-administration includes administering the first dsRNAi agent within 0.5, 1, 2, 4, 6, 8, 10, 12, 16, 20, or 24 hours of the second dsRNAi agent. Co-administration includes administering the first dsRNAi agent and the second dsRNAi agent simultaneously, approximately simultaneously (e.g., within about 1, 5, 10, 15, 20, or 30 minutes of each other), or sequentially in any order. In some embodiments, co-administration can be accomplished by co-formulation, i.e., preparing a single pharmaceutical composition including the first dsRNAi agent and the second dsRNAi agent. In some embodiments, the first dsRNAi agent and the second dsRNAi agent are formulated separately.

[0231] The terms “subject” and “patient” as used herein are used interchangeably. The term subject includes a human or non-human animal, preferably a vertebrate, and more preferably a mammal. In certain aspects, the subject is a human. In certain aspects, the subject is a human patient.

[0232] As used herein, a subject is “in need of” a treatment if such subject would benefit biologically, medically or in quality of life from such treatment.

[0233] The term “a therapeutically effective amount” of a compound (e.g., siRNA) as disclosed herein refers to an amount of the compound that will elicit the biological or medical response of a subject, for example, reduction or inhibition of an enzyme or a protein activity, or ameliorate symptoms, alleviate conditions, slow or delay disease progression, or prevent a disease, etc. In certain aspects, the term “a therapeutically effective amount” refers to the amount of the compound (e.g., siRNA) of the disclosure that, when administered to a subject, is effective to (1) at least partially alleviate, prevent and/or ameliorate a condition, or a disorder or a disease (i) mediated by the target gene (e.g., HMGCR), or (ii) associated with its activity, or (iii) characterized by activity (normal or abnormal) of the protein encoded by the target gene (e.g., HMGCR); or (2) reduce or inhibit the activity of the protein encoded by the target gene (e.g., HMGCR); or (3) reduce or inhibit the expression of the target gene (e.g., HMGCR). In certain aspects, the term “a therapeutically effective amount” refers to the amount of the compound that, when administered to a cell, or a tissue, or a non-cellular biological material, or a medium, is effective to at least partially reducing or inhibiting the activity of the protein encoded by the target gene (e.g., HMGCR); or at least partially reducing or inhibiting the expression of the protein (e.g., HMGCR) encoded by the target gene. The meaning of the term “a therapeutically effective amount” as illustrated in the above embodiment for the target gene expression also applies by the same means to any other relevant proteins/peptides/enzymes (e.g., HMGCR or other proteins relevant to cholesterol biosynthesis).

[0234] For any compound described herein, the therapeutically effective amount can be initially determined from cell culture assays. Target concentrations will be those concentrations of active compound(s) that are capable of achieving the methods described herein, as measured using the methods described herein or known in the art. Therapeutically effective amounts for use in humans can also be determined from animal models. For example, a dose for humans can be formulated to achieve a concentration that has been found to be effective in animals. The dosage in humans can be adjusted by monitoring compounds effectiveness and adjusting the dosage upwards or downwards, as described above. Adjusting the dose to achieve maximal efficacy in humans based on the methods established well within the capabilities of the ordinarily skilled artisan (e.g., physician or medical expert). An example of an “therapeutically effective amount” is an amount sufficient to contribute to the treatment, prevention, or reduction of a symptom or symptoms of a disease. For example, for the given parameter (e.g., biomarker), a therapeutically effective amount will show an increase or decrease of at least 5%, 10%, 15%, 20%, 25%, 40%, 50%, 60%, 75%, 80%, 90%, or at least 100%. Therapeutic efficacy can also be expressed as “-fold” increase or decrease. For example, a therapeutically effective amount can have at least a 1.2-fold, 1.5-fold, 2-fold, 5-fold, or more effect over a control.

[0235] The term “control” or “control experiment” is used in accordance with its plain ordinary meaning and refers to an experiment in which the subjects or reagents of the experiment are treated as in a parallel experiment except for omission of a procedure, reagent, or variable of the experiment. Typically, a control is used as a standard of comparison in evaluating experimental effects. In some embodiments, a control is the measurement of the expression of a protein or mRNA (e.g., HMGCR) in the absence of RNAi agents as described herein.

[0236] The term “muscle side effect,” “muscle adverse effect,” or “muscle-related side effect” as used herein refers to a symptom or negative side effect, such as pain (e.g., ranging from mild discomfort to serious pain), weakness, soreness, tiredness, damage (e.g., rhabdomyolysis), or spasms, caused in or near muscles or muscle tissues. In some embodiments, the muscle side effect may be a drug-induced myopathies, for example, caused by taking a medicine (e.g., statin).

[0237] Unless defined otherwise, the chemical structures and formulae set forth herein are constructed according to the standard rules of chemical valency known in the chemical arts.

[0238] The term “alkyl,” by itself or as part of another substituent, means, unless otherwise stated, a straight (i.e., unbranched) or branched carbon chain (or carbon), or combination thereof, which is fully saturated (i.e., molecule by only single bonds) and include mono-, di- and multivalent radicals. As used herein, the alkyl is an uncyclized chain. The alkyl may include a designated number of carbons (e.g., C₁-C₁₀ means one to ten carbons). Examples of alkyl include, but are not limited to, groups such as C₁₋₃₀ alkyl, C₁₋₂₅ alkyl, C₁₋₂₀ alkyl, C₁₋₁₅ alkyl, C₁₋₁₂ alkyl, C₁₋₁₀ alkyl, C₁₋₈ alkyl, C₁₋₆ alkyl, C₁₋₄ alkyl, or C₁₋₃ alkyl. For example, C₁₋₆ alkyl include, but are not limited to, methyl, ethyl, n-propyl, 1-methylethyl (iso-propyl), n-butyl, n-pentyl and 1,1-dimethylethyl (t-butyl), and their isomers.

[0239] A term “alkylene,” by itself or as part of another substituent, means, unless otherwise stated, a divalent radical derived from an alkyl, as exemplified, but not limited by, -CH₂CH₂CH₂CH₂—.

[0240] As used herein, the term “alkenyl,” by itself or as part of another substituent, means, unless otherwise stated, a straight (i.e., unbranched) or branched carbon chain (or carbon), or combination thereof, which is mono- or polyunsaturated (i.e., molecule including at least one double bond) and include mono-, di- and multivalent radicals. As used herein, the alkenyl is an uncyclized chain. Like the alkyl, the alkenyl may include a designated number of carbons (e.g., C₁-C₁₀ means one to ten carbons). Examples of alkenyl include, but are not limited to, groups such as C₁₋₃₀ alkenyl, C₁₋₂₅ alkenyl, C₁₋₂₀ alkenyl, C₁₋₁₅ alkenyl, C₁₋₁₂ alkenyl, C₁₋₁₀ alkenyl, C₁₋₈ alkenyl, C₁₋₆ alkenyl, C₁₋₄ alkenyl, or C₁₋₃ alkenyl. For example, C₂₋₆ alkenyl include, but are not limited to, ethenyl (vinyl), prop-1-enyl, but-1-enyl, pent-1-enyl, pent-4-enyl and penta-1,4-dienyl, and their isomers. A term “alkenylene,” by itself or as part of another substituent, means, unless otherwise stated, a divalent radical derived from an alkenyl, as exemplified, but not limited by, —CH═CHCH₂CH₂—.

[0241] As used herein, the term “alkynyl,” by itself or as part of another substituent, means, unless otherwise stated, a straight (i.e., unbranched) or branched carbon chain (or carbon), or combination thereof, which is mono- or polyunsaturated (i.e., molecule including at least one triple bond) and include mono-, di- and multivalent radicals. As used herein, the alkynyl is an uncyclized chain. Like the alkyl, the alkynyl may include a designated number of carbons (e.g., C₁-C₁₀ means one to ten carbons). Examples of alkynyl include, but are not limited to, groups such as C₁₋₃₀ alkynyl, C₁₋₂₅ alkynyl, C₁₋₂₀ alkynyl, C₁₋₁₅ alkynyl, C₁₋₁₂ alkynyl, C₁₋₁₀ alkynyl, C₁₋₈ alkynyl, C₁₋₆ alkynyl, C₁₋₄ alkynyl, or C₁₋₃ alkynyl. For example, C₂₋₆ alkynyl include, but are not limited to, alkynyl, and their isomers. A term “alkynyl,” by itself or as part of another substituent, means, unless otherwise stated, a divalent radical derived from an alkenyl, as exemplified, but not limited by, —CCH₂CH₂—.

[0242] As used herein, the term “alkoxy” refers to a radical of the formula —OR^{a} where R^{a} is an alkyl (e.g., C₁₋₃₀ alkyl, C₁₋₂₅ alkyl, C₁₋₂₀ alkyl, C₁₋₁₅ alkyl, C₁₋₁₂ alkyl, C₁₋₁₀ alkyl, C₁₋₈ alkyl, C₁₋₆ alkyl, C₁₋₄ alkyl, or C₁₋₃ alkyl) radical as generally defined above. For example, C₁₋₆ alkoxy include, but are not limited to, methoxy, ethoxy, propoxy, isopropoxy, butoxy, isobutoxy, pentoxy, and hexoxy.

[0243] As used herein, the term “alkoxyalkyl” refers to a radical of the formula —R^{a}—O—R^{b} where each R^{a} and R^{b} is independently an alkyl (e.g., C₁₋₃₀ alkyl, C₁₋₂₅ alkyl, C₁₋₂₀ alkyl, C₁₋₁₅ alkyl, C₁₋₁₂ alkyl, C₁₋₁₀ alkyl, C₁₋₈ alkyl, C₁₋₆ alkyl, C₁₋₄ alkyl, or C₁₋₃ alkyl) radical as defined above and oxygen atom may be bonded to any carbon atom in either alkyl radical. For example, C₁₋₆alkoxy C₁₋₆alkyl include, but are not limited to, methoxy-methyl, methoxy-ethyl, ethoxy-ethyl, 1-ethoxy-propyl and 2-methoxy-butyl.

[0244] As used herein, the term “alkylcarbonyl” refers to a radical of the formula —C(═O)—R^{a} where R^{a} is an alkyl (e.g., C₁₋₃₀ alkyl, C₁₋₂₅ alkyl, C₁₋₂₀ alkyl, C₁₋₁₅ alkyl, C₁₋₁₂ alkyl, C₁₋₁₀ alkyl, C₁₋₈ alkyl, C₁₋₆ alkyl, C₁₋₄ alkyl, or C₁₋₃ alkyl) radical as defined above.

[0245] As used herein, the term “alkyl-carbonyl alkyl” refers to a radical of the formula —R^{a}—C(═O)—R^{b} where each R^{a} and R^{b} is independently an alkyl (e.g., C₁₋₃₀ alkyl, C₁₋₂₅ alkyl, C₁₋₂₀ alkyl, C₁₋₁₅ alkyl, C₁₋₁₂ alkyl, C₁₋₁₀ alkyl, C₁₋₈ alkyl, C₁₋₆ alkyl, C₁₄ alkyl, or C₁₋₃ alkyl) radical as defined above. The carbon atom of the carbonyl group may be bonded to any carbon atom in either alkyl radical.

[0246] As used herein, the term “alkylaminocarbonyl” refers to a radical of the formula —C(═O)—NH—R^{a} where R^{a} is an alkyl (e.g., C₁₋₃₀ alkyl, C₁₋₂₅ alkyl, C₁₋₂₀ alkyl, C₁₋₁₅ alkyl, C₁₋₁₂ alkyl, C₁₋₁₀ alkyl, C₁₋₈ alkyl, C₁₋₆ alkyl, C₁₋₄ alkyl, or C₁₋₃ alkyl) as defined above.

[0247] As used herein, the term “alkoxycarbonyl” refers to a radical of the formula —C(═O)-O—R^{a} where R^{a} is an alkyl (e.g., C₁₋₃₀ alkyl, C₁₋₂₅ alkyl, C₁₋₂₀ alkyl, C₁₋₁₅ alkyl, C₁₋₁₂ alkyl, C₁₋₁₀ alkyl, C₁₋₈ alkyl, C₁₋₆ alkyl, C₁₋₄ alkyl, or C₁₋₃ alkyl) radical as defined above.

[0248] As used herein, the term “alkoxycarbonyl alkyl” refers to a radical of the formula -R^{a}—C(═O)—O—R^{b} where each R^{a} and R^{b} is independently an alkyl (e.g., C₁₋₃₀ alkyl, C₁₋₂₅ alkyl, C₁₋₂₀ alkyl, C₁₋₁₅ alkyl, C₁₋₁₂ alkyl, C₁₋₁₀ alkyl, C₁₋₈ alkyl, C₁₋₆ alkyl, C₁₋₄ alkyl, or C₁₋₃ alkyl) radical as defined above.

[0249] As used herein, the term “haloalkyl” refers to an alkyl (e.g., C₁₋₃₀ alkyl, C₁₋₂₅ alkyl, C₁₋₂₀ alkyl, C₁₋₁₅ alkyl, C₁₋₁₂ alkyl, C₁₋₁₀ alkyl, C₁₋₈ alkyl, C₁₋₆ alkyl, C₁₋₄ alkyl, or C₁₋₃ alkyl) radical, as defined above, substituted by one or more halo radicals, as defined above. Examples of halogen C₁₋₆alkyl include, but are not limited to, trifluoromethyl, difluoromethyl, fluoromethyl, trichloromethyl, 2,2,2-trifluoroethyl, 1,3-dibromopropan-2-yl, 3-bromo-2-fluoropropyl and 1,4,4-trifluorobutan-2-yl.

[0250] As used herein, the term “hydroxyalkyl” refers to an alkyl (e.g., C₁₋₃₀ alkyl, C₁₋₂₅ alkyl, C₁₋₂₀ alkyl, C₁₋₁₅ alkyl, C₁₋₁₂ alkyl, C₁₋₁₀ alkyl, C₁₋₈ alkyl, C₁₋₆ alkyl, C₁₋₄ alkyl, or C₁₋₃ alkyl) radical as defined above, wherein one of the hydrogen atoms of the alkyl radical is replaced by OH. Examples of hydroxyC₁₋₆ alkyl include, but are not limited to, hydroxy-methyl, 2-hydroxy-ethyl, 2-hydroxy-propyl, 3-hydroxy-propyl and 5-hydroxy-pentyl.

[0251] As used herein, the term “aminoalkyl” refers to an alkyl (e.g., C₁₋₃₀ alkyl, C₁₋₂₅ alkyl, C₁₋₂₀ alkyl, C₁₋₁₅ alkyl, C₁₋₁₂ alkyl, C₁₋₁₀ alkyl, C₁₋₈ alkyl, C₁₋₆ alkyl, C₁₋₄ alkyl, or C₁₋₃ alkyl) radical as defined above, wherein one of the hydrogen atoms of the C₁₋₆alkyl group is replaced by a primary amino group. Examples of amino C₁₋₆ alkyl include, but are not limited to, amino-methyl, 2-amino-ethyl, 2-amino-propyl, 3-amino-propyl, 3-amino-pentyl and 5-amino-pentyl.

[0252] As used herein, the term “alkylamino” refers to a radical of the formula —NH—R^{a} where R^{a} is an alkyl (e.g., C₁₋₃₀ alkyl, C₁₋₂₅ alkyl, C₁₋₂₀ alkyl, C₁₋₁₅ alkyl, C₁₋₁₂ alkyl, C₁₋₁₀ alkyl, C₁₋₈ alkyl, C₁₋₆ alkyl, C₁₋₄ alkyl, or C₁₋₃ alkyl) radical as defined above.

[0253] The term “heteroalkyl,” by itself or in combination with another term, means, unless otherwise stated, a stable straight or branched chain, or combination thereof, which is fully saturated (i.e., molecule by only single bonds) and include mono-, di- and multivalent radicals, including at least one carbon atom and at least one heteroatom (e.g., O, N, S, Si, or P), and wherein the nitrogen and sulfur atoms may optionally be oxidized, and the nitrogen heteroatom may optionally be quaternized. The heteroatom(s) (e.g., O, N, S, Si, or P) may be placed at any interior position of the heteroalkyl group or at the position at which the alkyl group is attached to the remainder of the molecule. Heteroalkyl is an uncyclized chain. The heteroalkyl may include a designated number of carbons and heteroatoms (e.g., “2 to 10 membered heteroalkyl” means two to 10 atoms including carbons and heteroatoms).

[0254] Similarly, the term “heteroalkylene,” by itself or as part of another substituent, means, unless otherwise stated, a divalent radical derived from heteroalkyl, as exemplified, but not limited by, —CH₂—CH₂—S—CH₂—CH₂— and —CH₂—S—CH₂—CH₂—NH—CH₂—. For heteroalkylene groups, heteroatoms can also occupy either or both of the chain termini (e.g., alkyleneoxy, alkylenedioxy, alkyleneamino, alkylenediamino, and the like).

[0255] As used herein, the term “heteroalkenyl,” by itself or as part of another substituent, means, unless otherwise stated, a straight (i.e., unbranched) or branched carbon chain (or carbon), or combination thereof, which is mono- or polyunsaturated (i.e., molecule including at least one double bond between carbon and carbon) and include mono-, di- and multivalent radicals. As used herein, the alkenyl is an uncyclized chain. Like the alkenyl, the heteroalkenyl may include a designated number of carbons and heteroatoms (e.g., “2 to 10 membered heteroalkenyl” means two to 10 atoms including carbons and heteroatoms).

[0256] As used herein, the term “heteroalkynyl,” by itself or as part of another substituent, means, unless otherwise stated, a straight (i.e., unbranched) or branched carbon chain (or carbon), or combination thereof, which is mono- or polyunsaturated (i.e., molecule including at least one triple bond between carbon and carbon) and include mono-, di- and multivalent radicals. As used herein, the alkynyl is an uncyclized chain. The heteroalkynyl may include a designated number of carbons and heteroatoms (e.g., “2 to 10 membered heteroalkynyl” means two to 10 atoms including carbons and heteroatoms).

[0257] For alkylene and heteroalkylene linking groups, no orientation of the linking group is implied by the direction in which the formula of the linking group is written. For example, the formula —C(O)₂R′— represents both —C(O)₂R′— and —R′C(O)₂—.

[0258] A “cycloalkylene” and a “heterocycloalkylene,” alone or as part of another substituent, means a divalent radical derived from a cycloalkyl and heterocycloalkyl, respectively. The terms “cycloalkyl” and “heterocycloalkyl,” by themselves or in combination with other terms, mean, unless otherwise stated, cyclic versions of “alkyl” and “heteroalkyl,” respectively. Cycloalkyl and heterocycloalkyl are not aromatic. Additionally, for heterocycloalkyl, a heteroatom can occupy the position at which the heterocycle is attached to the remainder of the molecule. Examples of cycloalkyl include, but are not limited to, cyclopropyl, cyclobutyl, cyclopentyl, cyclohexyl, 1-cyclohexenyl, 3-cyclohexenyl, cycloheptyl, and the like. Examples of heterocycloalkyl include, but are not limited to, 1-(1,2,5,6-tetrahydropyridyl), 1-piperidinyl, 2-piperidinyl, 3-piperidinyl, 4-morpholinyl, 3-morpholinyl, tetrahydrofuran-2-yl, tetrahydrofuran-3-yl, tetrahydrothien-2-yl, tetrahydrothien-3-yl, 1-piperazinyl, 2-piperazinyl, and the like. A “cycloalkylene” and a “heterocycloalkylene,” alone or as part of another substituent, means a divalent radical derived from a cycloalkyl and heterocycloalkyl, respectively.

[0259] The term “aryl” means, unless otherwise stated, a polyunsaturated, aromatic, hydrocarbon substituent, which can be a single ring or multiple rings (preferably from 1 to 3 rings) that are fused together (i.e., a fused ring aryl) or linked covalently. A fused ring aryl refers to multiple rings fused together wherein at least one of the fused rings is an aryl ring. The term “heteroaryl” refers to aryl groups (or rings) that contain at least one heteroatom such as N, O, or S, wherein the nitrogen and sulfur atoms are optionally oxidized, and the nitrogen atom(s) are optionally quaternized. Thus, the term “heteroaryl” includes fused ring heteroaryl groups (i.e., multiple rings fused together wherein at least one of the fused rings is a heteroaromatic ring). A 5,6-fused ring heteroarylene refers to two rings fused together, wherein one ring has 5 members and the other ring has 6 members, and wherein at least one ring is a heteroaryl ring. Likewise, a 6,6-fused ring heteroarylene refers to two rings fused together, wherein one ring has 6 members and the other ring has 6 members, and wherein at least one ring is a heteroaryl ring. And a 6,5-fused ring heteroarylene refers to two rings fused together, wherein one ring has 6 members and the other ring has 5 members, and wherein at least one ring is a heteroaryl ring. A heteroaryl group can be attached to the remainder of the molecule through a carbon or heteroatom. Non-limiting examples of aryl and heteroaryl groups include phenyl, naphthyl, pyrrolyl, pyrazolyl, pyridazinyl, triazinyl, pyrimidinyl, imidazolyl, pyrazinyl, purinyl, oxazolyl, isoxazolyl, thiazolyl, furyl, thienyl, pyridyl, pyrimidyl, benzothiazolyl, benzooxazoyl benzimidazolyl, benzofuran, isobenzofuranyl, indolyl, isoindolyl, benzothiophenyl, isoquinolyl, quinoxalinyl, quinolyl, 1-naphthyl, 2-naphthyl, 4-biphenyl, 1-pyrrolyl, 2-pyrrolyl, 3-pyrrolyl, 3-pyrazolyl, 2-imidazolyl, 4-imidazolyl, pyrazinyl, 2-oxazolyl, 4-oxazolyl, 2-phenyl-4-oxazolyl, 5-oxazolyl, 3-isoxazolyl, 4-isoxazolyl, 5-isoxazolyl, 2-thiazolyl, 4-thiazolyl, 5-thiazolyl, 2-furyl, 3-furyl, 2-thienyl, 3-thienyl, 2-pyridyl, 3-pyridyl, 4-pyridyl, 2-pyrimidyl, 4-pyrimidyl, 5-benzothiazolyl, purinyl, 2-benzimidazolyl, 5-indolyl, 1-isoquinolyl, 5-isoquinolyl, 2-quinoxalinyl, 5-quinoxalinyl, 3-quinolyl, and 6-quinolyl. Substituents for each of the above noted aryl and heteroaryl ring systems are selected from the group of acceptable substituents described below. An “arylene” and a “heteroarylene,” alone or as part of another substituent, mean a divalent radical derived from an aryl and heteroaryl, respectively.

[0260] The terms “halo” or “halogen,” by themselves or as part of another substituent, mean, unless otherwise stated, a fluorine, chlorine, bromine, or iodine atom. Additionally, terms such as “haloalkyl” are meant to include monohaloalkyl and polyhaloalkyl. For example, the term “halo(C₁-C₄)alkyl” includes, but is not limited to, fluoromethyl, difluoromethyl, trifluoromethyl, 2,2,2-trifluoroethyl, 4-chlorobutyl, 3-bromopropyl, and the like.

[0261] The symbol “ [symbol] ” denotes the point of attachment of a chemical moiety to the remainder of a molecule or chemical formula.

[0262] The term “oxo,” as used herein, means an oxygen that is double-bonded to a carbon atom.

[0263] Each of the above terms (e.g., “alkyl,” “heteroalkyl,” “cycloalkyl,” “heterocycloalkyl,” “aryl,” and “heteroaryl”) includes both substituted and unsubstituted forms of the indicated radical. Substituents for the alkyl and heteroalkyl radicals (including those groups often referred to as alkylene, alkenyl, heteroalkylene, heteroalkenyl, alkynyl, cycloalkyl, heterocycloalkyl, cycloalkenyl, and heterocycloalkenyl) can be one or more of a variety of groups selected from, but not limited to, —OR′, ═O, ═NR′, ═N—OR′, —NR′R″, —SR′, -halogen, —SiR′R″R′″, —OC(O)R′, —C(O)R′, —CO₂R′, —CONR′R″, —OC(O)NR′R″, —NR″C(O)R′, —NR′—C(O)NR″R′″, —NR″C(O)₂R′, —NR—C(NR′R″R′″)═NR″″, —NR—C(NR′R″)═NR′″, —S(O)R′, —S(O)₂R′, —S(O)₂NR′R″, —NRSO₂R′, —NR′NR″R′″, —ONR′R″, —NR′C(O)NR″NR′″R″″, —CN, —NO₂, —NR′SO₂R″, NR′C(O)R″, NR′C(O)—OR″, NR′OR″, in a number ranging from zero to (2m′+1), where m′ is the total number of carbon atoms in such radical. R, R′, R″, R′″, and R″″ each preferably independently refer to hydrogen, substituted or unsubstituted heteroalkyl, substituted or unsubstituted cycloalkyl, substituted or unsubstituted heterocycloalkyl, substituted or unsubstituted aryl (e.g., aryl substituted with 1-3 halogens), substituted or unsubstituted heteroaryl, substituted or unsubstituted alkyl, alkoxy, or thioalkoxy groups, or arylalkyl groups. When a compound described herein includes more than one R group, for example, each of the R groups is independently selected as are each R′, R″, R′″, and R″″ group when more than one of these groups is present. When R′ and R″ are attached to the same nitrogen atom, they can be combined with the nitrogen atom to form a 4-, 5-, 6-, or 7-membered ring. For example, —NR′R″ includes, but is not limited to, 1-pyrrolidinyl and 4-morpholinyl. From the above discussion of substituents, one of skill in the art will understand that the term “alkyl” is meant to include groups including carbon atoms bound to groups other than hydrogen groups, such as haloalkyl (e.g., —CF₃ and —CH₂CF₃) and acyl (e.g., —C(O)CH₃, —C(O)CF₃, —C(O)CH₂OCH₃, and the like).

[0264] Certain compounds provided herein possess asymmetric carbon atoms (optical or chiral centers) or double bonds; the enantiomers, racemates, diastereomers, tautomers, geometric isomers, stereoisomeric forms that may be defined, in terms of absolute stereochemistry, as (R)-or (S)- or, as (D)- or (L)- for amino acids, and individual isomers are encompassed within the scope of the present disclosure. The compounds of provided herein do not include those that are known in art to be too unstable to synthesize and/or isolate. Compounds provided herein include those in racemic and optically pure forms. Optically active (R)- and (S)-, or (D)- and (L)-isomers may be prepared using chiral synthons or chiral reagents, or resolved using conventional techniques. When the compounds described herein contain olefinic bonds (vinyl group) and unless specified otherwise, it is intended that the compounds include both (E) and (Z) geometric isomers.

[0265] As used herein, the term “isomers” refers to compounds having the same number and kind of atoms, and hence the same molecular weight, but differing in respect to the structural arrangement or configuration of the atoms.

### RNAi Agents

[0266] In an aspect, the disclosure provides an RNAi agent including a double stranded RNA (dsRNA). In an aspect, also provided is a dsRNA interference (dsRNAi) agent that includes a dsRNA consisting of (i) a sense strand and (ii) an antisense strand, and a ligand attached to at least one of the sense strand and the antisense strand.

[0267] A dsRNA is a complex of ribonucleic acid (RNA) molecules formed in a duplex structure. In certain aspects, the dsRNA may be a short interfering RNA (siRNA) that has 10 to 30, or particularly 15-25 nucleotides in each RNA molecule, respectively, “passenger strand” and “guide strand”, and can be incorporated into an RNA-induced silencing complex (RISC). The siRNA is dissociated or unwounded in the RISC, and the passenger strand is degraded while the guide strand remains in the RISC pathway. The guide strand can subsequently bind to a mRNA molecule that includes a complementary sequence to the guide strand and induce or initiate cleavage or degradation of the mRNA molecule. In certain aspects, the mRNA encodes a target gene (e.g., mRNA transcript of a target gene) such that expression of the target gene is suppressed or inhibited through a post-transcriptional gene-silencing (“RNA silencing”). A guide RNA molecule has a complementary sequence to a target mRNA sequence and has anti-parallel orientation to the target gene, so it is interchangeably referred to as an antisense strand. A passenger RNA molecule forming a duplex with the guide RNA and having a complementary sequence to the guide strand (antisense strand) has the same orientation with the target mRNA sequence, so it is interchangeably referred to as an antisense strand.

HMGCR siRNA (Double Stranded RNA)

[0268] In an aspect, the disclosure provides a dsRNA interference (dsRNAi) agent that is capable of interacting or recruiting a target mRNA sequence, e.g., HMGCR target mRNA sequence, in the RISC thereby cleaving the target mRNA. The dsRNAi agent can silence HMGCR gene, e.g., by inhibiting, downregulating, or suppressing the expression of HMGCR gene. Gene-silencing (e.g., inhibiting, downregulating, or suppressing of the gene) may be assessed by a decrease in an absolute or relative level of one or more variables that are associated with HMGCR expression compared with a control level. The control level may be any type obtained from, e.g., a pre-dose baseline level, or a level determined from a similar subject, cell, or untreated or treated subject with inactive agents (e.g., PBS buffer). In some embodiments, the level of silencing the HMGCR may be demonstrated by a reduction of the amount of a total HMGCR mRNA in a cell. In some embodiments, the level of silencing the HMGCR may be demonstrated by a reduction of the amount of a total HMGCR protein in a cell.

[0269] In an aspect, the dsRNAi agent as described herein can inhibit expression of the HMGCR gene (e.g., human HMGCR) by at least about 10%, about 15%, about 20%, about 25%, about 30%, about 40%, about 50%, about 55%, about 60%, about 65%, about 70%, about 75%, about 80%, about 85%, about 90%, or about 95% based on the expression level of the HMGCR gene in untreated cell or subject. In some embodiments, expression of the HMGCR gene (e.g., human HMGCR) is inhibited by at least about 10%, about 15%, about 20%, about 25%, about 30%, about 40%, about 50%, about 55%, about 60%, about 65%, about 70%, about 75%, about 80%, about 85%, about 90%, or about 95% based on the expression level of the HMGCR gene in untreated cell or subject. In some embodiments, expression of the HMGCR gene (e.g., human HMGCR) is inhibited by at least about 10% based on the expression level of the HMGCR gene in untreated cell or subject. In some embodiments, expression of the HMGCR gene (e.g., human HMGCR) is inhibited by at least about 20% based on the expression level of the HMGCR gene in untreated cell or subject. In some embodiments, expression of the HMGCR gene (e.g., human HMGCR) is inhibited by at least about 30% based on the expression level of the HMGCR gene in untreated cell or subject. In some embodiments, expression of the HMGCR gene (e.g., human HMGCR) is inhibited by at least about 40% based on the expression level of the HMGCR gene in untreated cell or subject. In some embodiments, expression of the HMGCR gene (e.g., human HMGCR) is inhibited by at least about 50% based on the expression level of the HMGCR gene in untreated cell or subject. In some embodiments, expression of the HMGCR gene (e.g., human HMGCR) is inhibited by at least about 60% based on the expression level of the HMGCR gene in untreated cell or subject. In some embodiments, expression of the HMGCR gene (e.g., human HMGCR) is inhibited by at least about 70% based on the expression level of the HMGCR gene in untreated cell or subject.

[0270] In an aspect, the dsRNAi agent as described herein can decrease expression of the HMGCR gene (e.g., human HMGCR) by at least about 10%, about 15%, about 20%, about 25%, about 30%, about 40%, about 50%, about 55%, about 60%, about 65%, about 70%, about 75%, about 80%, about 85%, about 90%, or about 95% based on the expression level of the HMGCR gene in untreated cell or subject. In some embodiments, expression of the HMGCR gene (e.g., human HMGCR) is decreased by at least about 10%, about 15%, about 20%, about 25%, about 30%, about 40%, about 50%, about 55%, about 60%, about 65%, about 70%, about 75%, about 80%, about 85%, about 90%, or about 95% based on the expression level of the HMGCR gene in untreated cell or subject. In some embodiments, expression of the HMGCR gene (e.g., human HMGCR) is decreased by at least about 10% based on the expression level of the HMGCR gene in untreated cell or subject. In some embodiments, expression of the HMGCR gene (e.g., human HMGCR) is decreased by at least about 20% based on the expression level of the HMGCR gene in untreated cell or subject. In some embodiments, expression of the HMGCR gene (e.g., human HMGCR) is decreased by at least about 30% based on the expression level of the HMGCR gene in untreated cell or subject. In some embodiments, expression of the HMGCR gene (e.g., human HMGCR) is decreased by at least about 40% based on the expression level of the HMGCR gene in untreated cell or subject. In some embodiments, expression of the HMGCR gene (e.g., human HMGCR) is decreased by at least about 50% based on the expression level of the HMGCR gene in untreated cell or subject. In some embodiments, expression of the HMGCR gene (e.g., human HMGCR) is decreased by at least about 60% based on the expression level of the HMGCR gene in untreated cell or subject. In some embodiments, expression of the HMGCR gene (e.g., human HMGCR) is decreased by at least about 70% based on the expression level of the HMGCR gene in untreated cell or subject.

[0271] In an aspect, the dsRNAi agent as described herein can suppress expression of the HMGCR gene (e.g., human HMGCR) by at least about 10%, about 15%, about 20%, about 25%, about 30%, about 40%, about 50%, about 55%, about 60%, about 65%, about 70%, about 75%, about 80%, about 85%, about 90%, or about 95% based on the expression level of the HMGCR gene in untreated cell or subject. In some embodiments, expression of the HMGCR gene (e.g., human HMGCR) is suppressed by at least about 10%, about 15%, about 20%, about 25%, about 30%, about 40%, about 50%, about 55%, about 60%, about 65%, about 70%, about 75%, about 80%, about 85%, about 90%, or about 95% based on the expression level of the HMGCR gene in untreated cell or subject. In some embodiments, expression of the HMGCR gene (e.g., human HMGCR) is suppressed by at least about 10% based on the expression level of the HMGCR gene in untreated cell or subject. In some embodiments, expression of the HMGCR gene (e.g., human HMGCR) is suppressed by at least about 20% based on the expression level of the HMGCR gene in untreated cell or subject. In some embodiments, expression of the HMGCR gene (e.g., human HMGCR) is suppressed by at least about 30% based on the expression level of the HMGCR gene in untreated cell or subject. In some embodiments, expression of the HMGCR gene (e.g., human HMGCR) is suppressed by at least about 40% based on the expression level of the HMGCR gene in untreated cell or subject. In some embodiments, expression of the HMGCR gene (e.g., human HMGCR) is suppressed by at least about 50% based on the expression level of the HMGCR gene in untreated cell or subject. In some embodiments, expression of the HMGCR gene (e.g., human HMGCR) is suppressed by at least about 60% based on the expression level of the HMGCR gene in untreated cell or subject. In some embodiments, expression of the HMGCR gene (e.g., human HMGCR) is suppressed by at least about 70% based on the expression level of the HMGCR gene in untreated cell or subject.

[0272] In some embodiments, inhibition of the expression of the HMGCR gene may be manifested by a reduction of the amount of mRNA expressed in a first cell or a first group of cells obtained from a subject that has been treated, e.g., by contacting the cell or by administering the dsRNAi agent as described herein, as compared to a second cell or a second group of cells obtained from a subject that has not been treated but is identical to the first cell or the first group of cells. For example, the level of gene-silencing (e.g., inhibiting, downregulating, or suppressing of the gene) of the HMGCR (e.g., human HMGCR) may be presented as a percentage of remaining mRNA in the treated cells (first cell or group of cells) compared to the mRNA amount in the control (untreated) cells, as shown in the following equation:

$$\frac{( mRNA in control cells ) - ( mRNA in treated cells )}{( mRNA in control cells )} \cdot 100 \% .$$

[0273] In some embodiments, the level of gene-silencing (e.g., inhibiting, downregulating, or suppressing of the gene) of the HMGCR (e.g., human HMGCR) may be assessed by measuring a parameter or biomarker, e.g., human HMGCR protein level, in a biological sample (e.g., e.g., a blood, serum or liver tissue obtained from a subject), which may be treated or untreated. Conventional analytical methods as known in the art such as electrophoresis (e.g., SDS or capillary electrophoresis), chromatography (e.g., high performance liquid chromatography (HPLC)), spectroscopy, western blotting, enzyme-linked immunosorbent assays (ELISAs), immunofluorescent assays, electrochemiluminescence assays, and the like can be used without limitation, but examples are not limited thereto. In some embodiments, reduced level of gene-silencing (e.g., inhibiting, downregulating, or suppressing of the gene) of the HMGCR (e.g., human HMGCR) may be observed or assessed by in a liver (tissue) biopsy of the treated subject.

[0274] In certain aspects, the dsRNAi agent is a free acid. In certain aspects, the dsRNAi agent is in a salt form (e.g., a pharmaceutically acceptable salt form. It will be understood that references to dsRNAi agent are meant to also include the pharmaceutically acceptable salts of the dsRNAi agent. If the dsRNAi agent has, for example, at least one basic center, they can form acid addition salts. Corresponding acid addition salts can also be formed having, if desired, an additionally present basic center. Active substances having an acid group, e.g., COOH, can form salts with bases. The dsRNAi agent or pharmaceutically acceptable salts thereof may also be used in form of a hydrate or include other solvents used for crystallization. In some embodiments, the RNAi agent is a sodium salt. In some embodiments, the dsRNAi agent is in a salt form (e.g., a pharmaceutically acceptable salt form), where the salt is sodium (Na⁺), ammonium (NH₄⁺), calcium (Ca²⁺), iron (Fe²⁺ or Fe³⁺), magnesium (Mg²⁺), potassium (K⁺), pyridinium (C₅H₅NH⁺), quaternary ammonium (NR₄⁺, R being an alkyl group or an aryl group as described herein), or copper (Cu²⁺).

[0275] In an aspect, the disclosure provides a dsRNA having sequences (e.g., antisense strand sequence) that can recognize a specific region of a HMGCR mRNA (e.g., human HMGCR mRNA) and lead cleavage of the HMGCR mRNA and silencing of the gene. The dsRNA includes a sense strand and an antisense strand and each strand may range from 12 to 30 nucleotides in length. In some embodiments, each strand may have 15 to 30 nucleotides in length. In some embodiments, each strand may have 15 to 25 nucleotides in length. In some embodiments, the antisense strand may have 15 to 25 nucleotides in length. In some embodiments, the sense strand may have 15 to 25 nucleotides in length. In some embodiments, the antisense strand may have 15 to 23 nucleotides in length. In some embodiments, the sense strand may have 15 to 23 nucleotides in length. In some embodiments, the antisense strand may have 18 to 25 nucleotides in length. In some embodiments, the sense strand may have 18 to 25 nucleotides in length.

[0276] In some embodiments, the sense strand may have 19 to 23 nucleotides in length. In some embodiments, the sense strand may have 21 to 23 nucleotides in length. In some embodiments, the sense strand may have 19 nucleotides in length. In some embodiments, the sense strand may have 20 nucleotides in length. In some embodiments, the sense strand may have 21 nucleotides in length. In some embodiments, the sense strand may have 22 nucleotides in length. In some embodiments, the sense strand may have 23 nucleotides in length.

[0277] In some embodiments, the antisense strand may have 19 to 25 nucleotides in length. In some embodiments, the antisense strand may have 19 to 23 nucleotides in length. In some embodiments, the antisense strand may have 21 to 23 nucleotides in length. In some embodiments, the antisense strand may have 23 to 25 nucleotides in length. In some embodiments, the antisense strand may have 19 nucleotides in length. In some embodiments, the antisense strand may have 20 nucleotides in length. In some embodiments, the antisense strand may have 21 nucleotides in length. In some embodiments, the antisense strand may have 22 nucleotides in length. In some embodiments, the antisense strand may have 23 nucleotides in length. In some embodiments, the antisense strand may have 24 nucleotides in length. In some embodiments, the antisense strand may have 25 nucleotides in length.

[0278] In some embodiments, the sense strand is 21 to 23 nucleotides in length and the antisense strand is 23 to 25 nucleotides in length. In some embodiments, the sense strand is 21 nucleotides in length and the antisense strand is 23 nucleotides in length. In some embodiments, the sense strand is 22 nucleotides in length and the antisense strand is 24 nucleotides in length. In some embodiments, the sense strand is 23 nucleotides in length and the antisense strand is 25 nucleotides in length.

[0279] In an aspect, a dsRNA as described herein forms a double-stranded (or “duplex”) region made between a sense strand and an antisense strand and having 10 to 25 nucleotide pairs in length. The double stranded or duplex region are loaded into the RISC complex and subsequent specific degradation of the sense strand occurs during the RISC pathway. In some embodiments, the double stranded region has 10 nucleotide base pairs in length. In some embodiments, the double stranded region has 11 nucleotide base pairs in length. In some embodiments, the double stranded region has 12 nucleotide base pairs in length. In some embodiments, the double stranded region has 13 nucleotide base pairs in length. In some embodiments, the double stranded region has 14 nucleotide base pairs in length. In some embodiments, the double stranded region has 15 nucleotide base pairs in length. In some embodiments, the double stranded region has 16 nucleotide base pairs in length. In some embodiments, the double stranded region has 17 nucleotide base pairs in length. In some embodiments, the double stranded region has 18 nucleotide base pairs in length. In some embodiments, the double stranded region has 19 nucleotide base pairs in length. In some embodiments, the double stranded region has 20 nucleotide base pairs in length. In some embodiments, the double stranded region has 21 nucleotide base pairs in length. In some embodiments, the double stranded region has 22 nucleotide base pairs in length. In some embodiments, the double stranded region has 23 nucleotide base pairs in length.

[0280] In an aspect, a dsRNA as described herein may include at least one single-stranded nucleotide overhang, for example, for increasing in vivo effectiveness of the dsRNA and having substantially improved inhibition of the target genes. In certain aspects, the dsRNA may contain one or more extra nucleotides constituting overhang regions that locate other than the double stranded region at the 3′-end, 5′-end, or both ends of either stand or both strands (sense and antisense strands). In some embodiments, the overhang region may exist at the 3′-end, 5′-end, or both ends of the sense strand. In some embodiments, the overhang region may exist at the 3′-end, 5′-end, or both ends of the antisense strand. In some embodiments, the antisense strand may have a greater length than a length in the sense strand. In some embodiments, the antisense strand may have a shorter length than a length in the sense strand.

[0281] In some embodiments, the dsRNA may contain one or more extra nucleotides constituting overhang regions at the 3′-end, 5′-end, or both ends of the antisense strand. In some embodiments, the overhang region in the antisense strand may consist of 1-6 nucleotides in length, for example, 1 nucleotide, 2 nucleotides, 3 nucleotides, 4 nucleotides, 5 nucleotides, or 6 nucleotides in length. In some embodiments, the dsRNA may contain one or more extra nucleotides constituting overhang regions at the 3′-end, 5′-end, or both ends of the sense strand. In some embodiments, the overhang region may consist of 1-6 nucleotides in length, for example, 1 nucleotide, 2 nucleotides, 3 nucleotides, 4 nucleotides, 5 nucleotides, or 6 nucleotides in length.

[0282] In some embodiments, the antisense strand may include one-nucleotide overhang at the 5′ end. In some embodiments, the antisense strand may include one-nucleotide overhang at the 3′ end. In some embodiments, the antisense strand may include two-nucleotides overhang. In some embodiments, the antisense contains two-nucleotides overhang at the 5′ end. In some embodiments, the antisense contains two-nucleotides overhang at the 3′ end. In some embodiments, the antisense contains one-nucleotide overhang at the 5′ end and one-nucleotide overhang at the 3′ end. In some embodiments, the antisense strand may include three-nucleotide overhang. In some embodiments, the antisense contains three-nucleotides overhang at the 5′ end. In some embodiments, the antisense contains three-nucleotides overhang at the 3′ end. In some embodiments, the antisense contains two-nucleotides overhang at the 5′ end and one-nucleotide overhang at the 3′ end. In some embodiments, the antisense contains two nucleotides overhang at the 3′ end and one-nucleotide overhang at the 5′ end.

[0283] In certain aspects, a dsRNA as described herein may include at least one blunt end, e.g., for increasing in vivo stability with resistance to degradation in physiological surroundings. In some embodiments, the dsRNA may have a blunt end at the 3′-end, 5′-end, or both ends of the duplex. In some embodiments, the dsRNA includes one overhang (e.g., at 3′ end of antisense strand) and one blunt end (e.g., at 5′ end of antisense strand). In some embodiments, the dsRNA includes a blunt end at the 5′-end of the sense strand (and at 3′ end of the antisense strand) and contain overhang nucleotide(s) at the other end. In some embodiments, the dsRNA may have a blunt end at the 3′-end of the sense strand (and at 5′ end of the antisense strand) and contain overhang nucleotide(s) at the other end.

[0284] The sequences of the single strands (i.e., sense strand and antisense strand) of the dsRNA can be selected by selecting a target region and a length in the HMGCR mRNA. In certain aspects, a dsRNA as described herein may target a nucleotide region selected from regions of (i) 50-250 and (ii) 2400-2600 of a human HMGCR mRNA sequence that has at least about 85% (e.g., about 85%, about 86%, about 87%, about 88%, about 89%, about 90%, about 91%, about 92%, about 93%, about 94%, about 95%, about 96%, about 97%, about 98%, about 99% or 100%) identity to SEQ ID NO: 811 (human HMGCR isoform, transcript variant 1, mRNA (GenBank: NM_000859.3)). In some embodiments, the target region is selected from regions of (i) 100-200 and (ii) 2500-2600 of a human HMGCR mRNA sequence that has at least about 85% (e.g., about 85%, about 86%, about 87%, about 88%, about 89%, about 90%, about 91%, about 92%, about 93%, about 94%, about 95%, about 96%, about 97%, about 98%, about 99% or 100%) identity to SEQ ID NO: 811 (human HMGCR isoform, transcript variant 1, mRNA (GenBank: NM_000859.3)).

[0285] In certain aspects, an antisense strand of the dsRNA as described herein targets a nucleotide region selected from regions of (i) 50-250 and (ii) 2400-2600 of a human HMGCR mRNA sequence that has at least about 85% (e.g., about 85%, about 86%, about 87%, about 88%, about 89%, about 90%, about 91%, about 92%, about 93%, about 94%, about 95%, about 96%, about 97%, about 98%, about 99% or 100%) identity to SEQ ID NO: 811 (human HMGCR isoform, transcript variant 1, mRNA (GenBank: NM_000859.3)). In some embodiments, the antisense strand of the dsRNA as described herein targets a nucleotide region selected from regions of (i) 100-200 and (ii) 2500-2600 of a human HMGCR mRNA sequence that has at least about 85% (e.g., about 85%, about 86%, about 87%, about 88%, about 89%, about 90%, about 91%, about 92%, about 93%, about 94%, about 95%, about 96%, about 97%, about 98%, about 99% or 100%) identity to SEQ ID NO: 811 (human HMGCR isoform, transcript variant 1, mRNA (GenBank: NM_000859.3)).

[0286] In some embodiments, the antisense strand targets a region of 50-250th nucleotides in a human HMGCR mRNA sequence that has at least about 85% (e.g., about 85%, about 86%, about 87%, about 88%, about 89%, about 90%, about 91%, about 92%, about 93%, about 94%, about 95%, about 96%, about 97%, about 98%, about 99% or 100%) identity to SEQ ID NO: 811 (human HMGCR isoform, transcript variant 1, mRNA (GenBank: NM_000859.3)). In some embodiments, the antisense strand targets a region of 100-200th nucleotides in a human HMGCR mRNA sequence that has at least about 85% (e.g., about 85%, about 86%, about 87%, about 88%, about 89%, about 90%, about 91%, about 92%, about 93%, about 94%, about 95%, about 96%, about 97%, about 98%, about 99% or 100%) identity to SEQ ID NO: 811 (human HMGCR isoform, transcript variant 1, mRNA (GenBank: NM_000859.3)). In some embodiments, the antisense strand targets a region of 100-150th nucleotides in a human HMGCR mRNA sequence that has at least about 85% (e.g., about 85%, about 86%, about 87%, about 88%, about 89%, about 90%, about 91%, about 92%, about 93%, about 94%, about 95%, about 96%, about 97%, about 98%, about 99% or 100%) identity to SEQ ID NO: 811 (human HMGCR isoform, transcript variant 1, mRNA (GenBank: NM_000859.3)).

[0287] In some embodiments, the antisense strand targets a region of 2400-2600th nucleotides in a human HMGCR mRNA sequence that has at least about 85% (e.g., about 85%, about 86%, about 87%, about 88%, about 89%, about 90%, about 91%, about 92%, about 93%, about 94%, about 95%, about 96%, about 97%, about 98%, about 99% or 100%) identity to SEQ ID NO: 811 (human HMGCR isoform, transcript variant 1, mRNA (GenBank: NM_000859.3)). In some embodiments, the antisense strand targets a region of 2500-2600th nucleotides in a human HMGCR mRNA sequence that has at least about 85% (e.g., about 85%, about 86%, about 87%, about 88%, about 89%, about 90%, about 91%, about 92%, about 93%, about 94%, about 95%, about 96%, about 97%, about 98%, about 99% or 100%) identity to SEQ ID NO: 811 (human HMGCR isoform, transcript variant 1, mRNA (GenBank: NM_000859.3)). In some embodiments, the antisense strand targets a region of 2550-2600th nucleotides in a human HMGCR mRNA sequence that has at least about 85% (e.g., about 85%, about 86%, about 87%, about 88%, about 89%, about 90%, about 91%, about 92%, about 93%, about 94%, about 95%, about 96%, about 97%, about 98%, about 99% or 100%) identity to SEQ ID NO: 811 (human HMGCR isoform, transcript variant 1, mRNA (GenBank: NM_000859.3)).

[0288] In certain aspects, the target HMGCR mRNA sequence may range from 12 to 30 nucleotides, from 15 to 30 nucleotides, from 18 to 30 nucleotides, from 18 to 25 nucleotides, from 18 to 23 nucleotides. In some embodiments, the target HMGCR mRNA sequence may have 15 nucleotides in length. In some embodiments, the target HMGCR mRNA sequence may have 16 nucleotides in length. In some embodiments, the target HMGCR mRNA sequence may have 17 nucleotides in length. In some embodiments, the target HMGCR mRNA sequence may have 18 nucleotides in length. In some embodiments, the target HMGCR mRNA sequence may have 19 nucleotides in length. In some embodiments, the target HMGCR mRNA sequence may have 20 nucleotides in length. In some embodiments, the target HMGCR mRNA sequence may have 21 nucleotides in length. In some embodiments, the target HMGCR mRNA sequence may have 22 nucleotides in length. In some embodiments, the target HMGCR mRNA sequence may have 23 nucleotides in length.

[0289] In certain aspects, example dsRNA sequences including sense strands and antisense strands targeting the above indicated HMGCR mRNA (SEQ ID NO: 811, or GenBank: NM_000859.3) are in Table 1.

TABLE 1

| | | | SEQ | | SEQ |
|---|---|---|---|---|---|
| SIRNA | | | ID | | ID |
| No | position | Sense Strand | NO: | Antisense Strand | NO: |
| 1 | 122 | ACAAUGUUGUCAAGACUUUUU | 1 | AAAAAGUCUUGACAACAUUGUAG | 406 |
| 2 | 125 | AUGUUGUCAAGACUUUUUCGA | 2 | UCGAAAAAGUCUUGACAACAUUG | 407 |
| 3 | 126 | UGUUGUCAAGACUUUUUCGAA | 3 | UUCGAAAAAGUCUUGACAACAUU | 408 |
| 4 | 127 | GUUGUCAAGACUUUUUCGAAU | 4 | AUUCGAAAAAGUCUUGACAACAU | 409 |
| 5 | 130 | GUCAAGACUUUUUCGAAUGCA | 5 | UGCAUUCGAAAAAGUCUUGACAA | 410 |
| 6 | 131 | UCAAGACUUUUUCGAAUGCAU | 6 | AUGCAUUCGAAAAAGUCUUGACA | 411 |
| 7 | 133 | AAGACUUUUUCGAAUGCAUGA | 7 | UCAUGCAUUCGAAAAAGUCUUGA | 412 |
| 8 | 164 | GCCUCCCAUCCCUGGGAAGUA | 8 | UACUUCCCAGGGAUGGGAGGCCA | 413 |
| 9 | 167 | UCCCAUCCCUGGGAAGUCAUA | 9 | UAUGACUUCCCAGGGAUGGGAGG | 414 |
| 10 | 199 | GACACUGACCAUCUGCAUGAU | 10 | AUCAUGCAGAUGGUCAGUGUCAC | 415 |
| 11 | 222 | CCAUGAACAUGUUUACUGGUA | 11 | UACCAGUAAACAUGUUCAUGGAC | 416 |
| 12 | 228 | ACAUGUUUACUGGUAACAAUA | 12 | UAUUGUUACCAGUAAACAUGUUC | 417 |
| 13 | 229 | CAUGUUUACUGGUAACAAUAA | 13 | UUAUUGUUACCAGUAAACAUGUU | 418 |
| 14 | 230 | AUGUUUACUGGUAACAAUAAA | 14 | UUUAUUGUUACCAGUAAACAUGU | 419 |
| 15 | 244 | CAAUAAGAUCUGUGGUUGGAA | 15 | UUCCAACCACAGAUCUUAUUGUU | 420 |
| 16 | 246 | AUAAGAUCUGUGGUUGGAAUU | 16 | AAUUCCAACCACAGAUCUUAUUG | 421 |
| 17 | 247 | UAAGAUCUGUGGUUGGAAUUA | 17 | UAAUUCCAACCACAGAUCUUAUU | 422 |
| 18 | 275 | CCAAAGUUUGAAGAGGAUGUU | 18 | AACAUCCUCUUCAAACUUUGGAC | 423 |
| 19 | 277 | AAAGUUUGAAGAGGAUGUUUU | 19 | AAAACAUCCUCUUCAAACUUUGG | 424 |
| 20 | 295 | UUUGAGCAGUGACAUUAUAAU | 20 | AUUAUAAUGUCACUGCUCAAAAC | 425 |
| 21 | 302 | AGUGACAUUAUAAUUCUGACA | 21 | UGUCAGAAUUAUAAUGUCACUGC | 426 |
| 22 | 305 | GACAUUAUAAUUCUGACAAUA | 22 | UAUUGUCAGAAUUAUAAUGUCAC | 427 |
| 23 | 308 | AUUAUAAUUCUGACAAUAACA | 23 | UGUUAUUGUCAGAAUUAUAAUGU | 428 |
| 24 | 313 | AAUUCUGACAAUAACACGAUA | 24 | UAUCGUGUUAUUGUCAGAAUUAU | 429 |
| 25 | 313 | UUCUGACAAUAACACGAUGCA | 25 | UGCAUCGUGUUAUUGUCAGAAUU | 430 |
| 26 | 316 | UCUGACAAUAACACGAUGCAU | 26 | AUGCAUCGUGUUAUUGUCAGAAU | 431 |
| 27 | 317 | CUGACAAUAACACGAUGCAUA | 27 | UAUGCAUCGUGUUAUUGUCAGAA | 432 |
| 28 | 318 | UGACAAUAACACGAUGCAUAA | 28 | UUAUGCAUCGUGUUAUUGUCAGA | 433 |
| 29 | 340 | CAUCCUGUAUAUUUACUUCCA | 29 | UGGAAGUAAAUAUACAGGAUGGC | 434 |
| 30 | 346 | GUAUAUUUACUUCCAGUUCCA | 30 | UGGAACUGGAAGUAAAUAUACAG | 435 |
| 31 | 357 | UCCAGUUCCAGAAUUUACGUA | 31 | UACGUAAAUUCUGGAACUGGAAG | 436 |
| 32 | 360 | AGUUCCAGAAUUUACGUCAAA | 32 | UUUGACGUAAAUUCUGGAACUGG | 437 |
| 33 | 362 | UUCCAGAAUUUACGUCAACUU | 33 | AAGUUGACGUAAAUUCUGGAACU | 438 |
| 34 | 364 | CCAGAAUUUACGUCAACUUGA | 34 | UCAAGUUGACGUAAAUUCUGGAA | 439 |
| 35 | 365 | CAGAAUUUACGUCAACUUGGA | 35 | UCCAAGUUGACGUAAAUUCUGGA | 440 |
| 36 | 366 | AGAAUUUACGUCAACUUGGAU | 36 | AUCCAAGUUGACGUAAAUUCUGG | 441 |
| 37 | 370 | UUUACGUCAACUUGGAUCAAA | 37 | UUUGAUCCAAGUUGACGUAAAUU | 442 |
| 38 | 371 | UUACGUCAACUUGGAUCAAAA | 38 | UUUUGAUCCAAGUUGACGUAAAU | 443 |
| 39 | 434 | UUUGUAUUCAGUACAGUUGUA | 39 | UACAACUGUACUGAAUACAAAAC | 444 |
| 40 | 439 | AUUCAGUACAGUUGUCAUUCA | 40 | UGAAUGACAACUGUACUGAAUAC | 445 |
| 41 | 445 | UACAGUUGUCAUUCACUUCUU | 41 | AAGAAGUGAAUGACAACUGUACU | 446 |
| 42 | 450 | UUGUCAUUCACUUCUUAGACA | 42 | UGUCUAAGAAGUGAAUGACAACU | 447 |
| 43 | 451 | UGUCAUUCACUUCUUAGACAA | 43 | UUGUCUAAGAAGUGAAUGACAAC | 448 |
| 44 | 456 | UUCACUUCUUAGACAAAGAAU | 44 | AUUCUUUGUCUAAGAAGUGAAUG | 449 |
| 45 | 461 | UUCUUAGACAAAGAAUUGACA | 45 | UGUCAAUUCUUUGUCUAAGAAGU | 450 |
| 46 | 466 | AGACAAAGAAUUGACAGGCUU | 46 | AAGCCUGUCAAUUCUUUGUCUAA | 451 |
| 47 | 469 | CAAAGAAUUGACAGGCUUGAA | 47 | UUCAAGCCUGUCAAUUCUUUGUC | 452 |
| 48 | 543 | UAGCAAAGUUUGCCCUCAGUU | 48 | AACUGAGGGCAAACUUUGCUAAU | 453 |
| 49 | 561 | GUUCCAACUCACAGGAUGAAA | 49 | UUUCAUCCUGUGAGUUGGAACUG | 454 |
| 50 | 587 | GAAAAUAUUGCUCGUGGAAUA | 50 | UAUUCCACGAGCAAUAUUUUCCC | 455 |
| 51 | 588 | AAAAUAUUGCUCGUGGAAUGA | 51 | UCAUUCCACGAGCAAUAUUUUCC | 456 |
| 52 | 589 | AAAUAUUGCUCGUGGAAUGGA | 52 | UCCAUUCCACGAGCAAUAUUUUC | 457 |
| 53 | 590 | AAUAUUGCUCGUGGAAUGGCA | 53 | UGCCAUUCCACGAGCAAUAUUUU | 458 |
| 54 | 593 | AUUGCUCGUGGAAUGGCAAUU | 54 | AAUUGCCAUUCCACGAGCAAUAU | 459 |
| 55 | 595 | UGCUCGUGGAAUGGCAAUUUU | 55 | AAAAUUGCCAUUCCACGAGCAAU | 460 |
| 56 | 596 | GCUCGUGGAAUGGCAAUUUUA | 56 | UAAAAUUGCCAUUCCACGAGCAA | 461 |
| 57 | 600 | GUGGAAUGGCAAUUUUAGGUA | 57 | UACCUAAAAUUGCCAUUCCACGA | 462 |
| 58 | 620 | CCUACGUUUACCCUCGAUGCU | 58 | AGCAUCGAGGGUAAACGUAGGAC | 463 |
| 59 | 621 | CUACGUUUACCCUCGAUGCUA | 59 | UAGCAUCGAGGGUAAACGUAGGA | 464 |
| 60 | 639 | CUCUUGUUGAAUGUCUUGUGA | 60 | UCACAAGACAUUCAACAAGAGCA | 465 |
| 61 | 641 | CUUGUUGAAUGUCUUGUGAUU | 61 | AAUCACAAGACAUUCAACAAGAG | 466 |
| 62 | 644 | GUUGAAUGUCUUGUGAUUGGA | 62 | UCCAAUCACAAGACAUUCAACAA | 467 |
| 63 | 683 | GUACGUCAGCUUGAAAUUAUA | 63 | UAUAAUUUCAAGCUGACGUACCC | 468 |
| 64 | 684 | UACGUCAGCUUGAAAUUAUGU | 64 | ACAUAAUUUCAAGCUGACGUACC | 469 |
| 65 | 688 | UCAGCUUGAAAUUAUGUGCUA | 65 | UAGCACAUAAUUUCAAGCUGACG | 470 |
| 66 | 693 | UUGAAAUUAUGUGCUGCUUUA | 66 | UAAAGCAGCACAUAAUUUCAAGC | 471 |
| 67 | 697 | AAUUAUGUGCUGCUUUGGCUA | 67 | UAGCCAAAGCAGCACAUAAUUUC | 472 |
| 68 | 710 | UUUGGCUGCAUGUCAGUUCUU | 68 | AAGAACUGACAUGCAGCCAAAGC | 473 |
| 69 | 729 | UUGCCAACUACUUCGUGUUCA | 69 | UGAACACGAAGUAGUUGGCAAGA | 474 |
| 70 | 730 | UGCCAACUACUUCGUGUUCAU | 70 | AUGAACACGAAGUAGUUGGCAAG | 475 |
| 71 | 734 | AACUACUUCGUGUUCAUGACU | 71 | AGUCAUGAACACGAAGUAGUUGG | 476 |
| 72 | 736 | CUACUUCGUGUUCAUGACUUU | 72 | AAAGUCAUGAACACGAAGUAGUU | 477 |
| 73 | 738 | ACUUCGUGUUCAUGACUUUCU | 73 | AGAAAGUCAUGAACACGAAGUAG | 478 |
| 74 | 739 | CUUCGUGUUCAUGACUUUCUU | 74 | AAGAAAGUCAUGAACACGAAGUA | 479 |
| 75 | 743 | GUGUUCAUGACUUUCUUCCCA | 75 | UGGGAAGAAAGUCAUGAACACGA | 480 |
| 76 | 761 | CCAGCUUGUGUGUCCUUGGUA | 76 | UACCAAGGACACACAAGCUGGGA | 481 |
| 77 | 766 | UUGUGUGUCCUUGGUAUUAGA | 77 | UCUAAUACCAAGGACACACAAGC | 482 |
| 78 | 779 | GUAUUAGAGCUUUCUCGGGAA | 78 | UUCCCGAGAAAGCUCUAAUACCA | 483 |
| 79 | 800 | AGCCGCGAGGGUCGUCCAAUU | 79 | AAUUGGACGACCCUCGCGGCUUU | 484 |
| 80 | 801 | GCCGCGAGGGUCGUCCAAUUU | 80 | AAAUUGGACGACCCUCGCGGCUU | 485 |
| 81 | 836 | UUUGCCCGAGUUUUAGAAGAA | 81 | UUCUUCUAAAACUCGGGCAAAAU | 486 |
| 82 | 839 | GCCCGAGUUUUAGAAGAAGAA | 82 | UUCUUCUUCUAAAACUCGGGCAA | 487 |
| 83 | 876 | CUGUAACUCAGAGGGUCAAGA | 83 | UCUUGACCCUCUGAGUUACAGGA | 488 |
| 84 | 879 | UAACUCAGAGGGUCAAGAUGA | 84 | UCAUCUUGACCCUCUGAGUUACA | 489 |
| 85 | 880 | AACUCAGAGGGUCAAGAUGAU | 85 | AUCAUCUUGACCCUCUGAGUUAC | 490 |
| 86 | 882 | CUCAGAGGGUCAAGAUGAUUA | 86 | UAAUCAUCUUGACCCUCUGAGUU | 491 |
| 87 | 883 | UCAGAGGGUCAAGAUGAUUAU | 87 | AUAAUCAUCUUGACCCUCUGAGU | 492 |
| 88 | 890 | GUCAAGAUGAUUAUGUCUCUA | 88 | UAGAGACAUAAUCAUCUUGACCC | 493 |
| 89 | 902 | AUGUCUCUAGGCUUGGUUCUU | 89 | AAGAACCAAGCCUAGAGACAUAA | 494 |
| 90 | 904 | GUCUCUAGGCUUGGUUCUUGU | 90 | ACAAGAACCAAGCCUAGAGACAU | 495 |
| 91 | 909 | UAGGCUUGGUUCUUGUUCAUA | 91 | UAUGAACAAGAACCAAGCCUAGA | 496 |
| 92 | 919 | UCUUGUUCAUGCUCACAGUCA | 92 | UGACUGUGAGCAUGAACAAGAAC | 497 |
| 93 | 927 | AUGCUCACAGUCGCUGGAUAA | 93 | UUAUCCAGCGACUGUGAGCAUGA | 498 |
| 94 | 928 | UGCUCACAGUCGCUGGAUAGA | 94 | UCUAUCCAGCGACUGUGAGCAUG | 499 |
| 95 | 932 | CACAGUCGCUGGAUAGCUGAU | 95 | AUCAGCUAUCCAGCGACUGUGAG | 500 |
| 96 | 935 | AGUCGCUGGAUAGCUGAUCCU | 96 | AGGAUCAGCUAUCCAGCGACUGU | 501 |
| 97 | 938 | CGCUGGAUAGCUGAUCCUUCU | 97 | AGAAGGAUCAGCUAUCCAGCGAC | 502 |
| 98 | 954 | CUUCUCCUCAAAACAGUACAA | 98 | UUGUACUGUUUUGAGGAGAAGGA | 503 |
| 99 | 957 | CUCCUCAAAACAGUACAGCAA | 99 | UUGCUGUACUGUUUUGAGGAGAA | 504 |
| 100 | 966 | ACAGUACAGCAGAUACUUCUA | 100 | UAGAAGUAUCUGCUGUACUGUUU | 505 |
| 101 | 967 | CAGUACAGCAGAUACUUCUAA | 101 | UUAGAAGUAUCUGCUGUACUGUU | 506 |
| 102 | 968 | AGUACAGCAGAUACUUCUAAA | 102 | UUUAGAAGUAUCUGCUGUACUGU | 507 |
| 103 | 971 | ACAGCAGAUACUUCUAAGGUU | 103 | AACCUUAGAAGUAUCUGCUGUAC | 508 |
| 104 | 972 | CAGCAGAUACUUCUAAGGUUU | 104 | AAACCUUAGAAGUAUCUGCUGUA | 509 |
| 105 | 1063 | UAAAAUGAUCAGCAUGGAUAU | 105 | AUAUCCAUGCUGAUCAUUUUAGA | 510 |
| 106 | 1066 | AAUGAUCAGCAUGGAUAUUGA | 106 | UCAAUAUCCAUGCUGAUCAUUUU | 511 |
| 107 | 1070 | AUCAGCAUGGAUAUUGAACAA | 107 | UUGUUCAAUAUCCAUGCUGAUCA | 512 |
| 108 | 1076 | AUGGAUAUUGAACAAGUUAUU | 108 | AAUAACUUGUUCAAUAUCCAUGC | 513 |
| 109 | 1077 | UGGAUAUUGAACAAGUUAUUA | 109 | UAAUAACUUGUUCAAUAUCCAUG | 514 |
| 110 | 1082 | AUUGAACAAGUUAUUACCCUA | 110 | UAGGGUAAUAACUUGUUCAAUAU | 515 |
| 111 | 1083 | UUGAACAAGUUAUUACCCUAA | 111 | UUAGGGUAAUAACUUGUUCAAUA | 516 |
| 112 | 1085 | GAACAAGUUAUUACCCUAAGU | 112 | ACUUAGGGUAAUAACUUGUUCAA | 517 |
| 113 | 1086 | AACAAGUUAUUACCCUAAGUU | 113 | AACUUAGGGUAAUAACUUGUUCA | 518 |
| 114 | 1087 | ACAAGUUAUUACCCUAAGUUU | 114 | AAACUUAGGGUAAUAACUUGUUC | 519 |
| 115 | 1088 | CAAGUUAUUACCCUAAGUUUA | 115 | UAAACUUAGGGUAAUAACUUGUU | 520 |
| 116 | 1090 | AGUUAUUACCCUAAGUUUAGA | 116 | UCUAAACUUAGGGUAAUAACUUG | 521 |
| 117 | 1112 | CUCCUUCUGGCUGUCAAGUAA | 117 | UUACUUGACAGCCAGAAGGAGAG | 522 |
| 118 | 1117 | UCUGGCUGUCAAGUACAUCUU | 118 | AAGAUGUACUUGACAGCCAGAAG | 523 |
| 119 | 1124 | GUCAAGUACAUCUUCUUUGAA | 119 | UUCAAAGAAGAUGUACUUGACAG | 524 |
| 120 | 1126 | CAAGUACAUCUUCUUUGAACA | 120 | UGUUCAAAGAAGAUGUACUUGAC | 525 |
| 121 | 1127 | AAGUACAUCUUCUUUGAACAA | 121 | UUGUUCAAAGAAGAUGUACUUGA | 526 |
| 122 | 1149 | CAGAGACAGAAUCUACACUCU | 122 | AGAGUGUAGAUUCUGUCUCUGUU | 527 |
| 123 | 1172 | UUAAAAAACCCUAUCACAUCU | 123 | AGAUGUGAUAGGGUUUUUUAAUG | 528 |
| 124 | 1181 | CCUAUCACAUCUCCUGUAGUA | 124 | UACUACAGGAGAUGUGAUAGGGU | 529 |
| 125 | 1183 | UAUCACAUCUCCUGUAGUGAA | 125 | UUCACUACAGGAGAUGUGAUAGG | 530 |
| 126 | 1224 | AUUGUUGUAGACGUGAACCUA | 126 | UAGGUUCACGUCUACAACAAUUG | 531 |
| 127 | 1283 | GAAGAGACAGGGAUAAACCGA | 127 | UCGGUUUAUCCCUGUCUCUUCCU | 532 |
| 128 | 1284 | AAGAGACAGGGAUAAACCGAA | 128 | UUCGGUUUAUCCCUGUCUCUUCC | 533 |
| 129 | 1285 | AGAGACAGGGAUAAACCGAGA | 129 | UCUCGGUUUAUCCCUGUCUCUUC | 534 |
| 130 | 1286 | GAGACAGGGAUAAACCGAGAA | 130 | UUCUCGGUUUAUCCCUGUCUCUU | 535 |
| 131 | 1287 | AGACAGGGAUAAACCGAGAAA | 131 | UUUCUCGGUUUAUCCCUGUCUCU | 536 |
| 132 | 1288 | GACAGGGAUAAACCGAGAAAA | 132 | UUUUCUCGGUUUAUCCCUGUCUC | 537 |
| 133 | 1289 | ACAGGGAUAAACCGAGAAAGA | 133 | UCUUUCUCGGUUUAUCCCUGUCU | 538 |
| 134 | 1290 | CAGGGAUAAACCGAGAAAGAA | 134 | UUCUUUCUCGGUUUAUCCCUGUC | 539 |
| 135 | 1291 | AGGGAUAAACCGAGAAAGAAA | 135 | UUUCUUUCUCGGUUUAUCCCUGU | 540 |
| 136 | 1297 | AAACCGAGAAAGAAAAGUUGA | 136 | UCAACUUUUCUUUCUCGGUUUAU | 541 |
| 137 | 1313 | GUUGAGGUUAUAAAACCCUUA | 137 | UAAGGGUUUUAUAACCUCAACUU | 542 |
| 138 | 1318 | GGUUAUAAAACCCUUAGUGGA | 138 | UCCACUAAGGGUUUUAUAACCUC | 543 |
| 139 | 1326 | AACCCUUAGUGGCUGAAACAA | 139 | UUGUUUCAGCCACUAAGGGUUUU | 544 |
| 140 | 1327 | ACCCUUAGUGGCUGAAACAGA | 140 | UCUGUUUCAGCCACUAAGGGUUU | 545 |
| 141 | 1328 | CCCUUAGUGGCUGAAACAGAU | 141 | AUCUGUUUCAGCCACUAAGGGUU | 546 |
| 142 | 1329 | CCUUAGUGGCUGAAACAGAUA | 142 | UAUCUGUUUCAGCCACUAAGGGU | 547 |
| 143 | 1357 | CAGAGCUACAUUUGUGGUUGA | 143 | UCAACCACAAAUGUAGCUCUGUU | 548 |
| 144 | 1360 | AGCUACAUUUGUGGUUGGUAA | 144 | UUACCAACCACAAAUGUAGCUCU | 549 |
| 145 | 1380 | ACUCCUCCUUACUCGAUACUU | 145 | AAGUAUCGAGUAAGGAGGAGUUA | 550 |
| 146 | 1381 | CUCCUCCUUACUCGAUACUUA | 146 | UAAGUAUCGAGUAAGGAGGAGUU | 551 |
| 147 | 1410 | UGGUGACACAGGAACCUGAAA | 147 | UUUCAGGUUCCUGUGUCACCAGU | 552 |
| 148 | 1494 | AAGGUGCAAAAUUCCUUAGUA | 148 | UACUAAGGAAUUUUGCACCUUUC | 553 |
| 149 | 1505 | UUCCUUAGUGAUGCUGAGAUA | 149 | UAUCUCAGCAUCACUAAGGAAUU | 554 |
| 150 | 1510 | UAGUGAUGCUGAGAUCAUCCA | 150 | UGGAUGAUCUCAGCAUCACUAAG | 555 |
| 151 | 1514 | GAUGCUGAGAUCAUCCAGUUA | 151 | UAACUGGAUGAUCUCAGCAUCAC | 556 |
| 152 | 1516 | UGCUGAGAUCAUCCAGUUAGU | 152 | ACUAACUGGAUGAUCUCAGCAUC | 557 |
| 153 | 1519 | UGAGAUCAUCCAGUUAGUCAA | 153 | UUGACUAACUGGAUGAUCUCAGC | 558 |
| 154 | 1520 | GAGAUCAUCCAGUUAGUCAAU | 154 | AUUGACUAACUGGAUGAUCUCAG | 559 |
| 155 | 1521 | AGAUCAUCCAGUUAGUCAAUA | 155 | UAUUGACUAACUGGAUGAUCUCA | 560 |
| 156 | 1523 | AUCAUCCAGUUAGUCAAUGCU | 156 | AGCAUUGACUAACUGGAUGAUCU | 561 |
| 157 | 1525 | CAUCCAGUUAGUCAAUGCUAA | 157 | UUAGCAUUGACUAACUGGAUGAU | 562 |
| 158 | 1527 | UCCAGUUAGUCAAUGCUAAGA | 158 | UCUUAGCAUUGACUAACUGGAUG | 563 |
| 159 | 1528 | CCAGUUAGUCAAUGCUAAGCA | 159 | UGCUUAGCAUUGACUAACUGGAU | 564 |
| 160 | 1529 | CAGUUAGUCAAUGCUAAGCAU | 160 | AUGCUUAGCAUUGACUAACUGGA | 565 |
| 161 | 1530 | AGUUAGUCAAUGCUAAGCAUA | 161 | UAUGCUUAGCAUUGACUAACUGG | 566 |
| 162 | 1531 | GUUAGUCAAUGCUAAGCAUAU | 162 | AUAUGCUUAGCAUUGACUAACUG | 567 |
| 163 | 1532 | UUAGUCAAUGCUAAGCAUAUA | 163 | UAUAUGCUUAGCAUUGACUAACU | 568 |
| 164 | 1535 | GUCAAUGCUAAGCAUAUCCCA | 164 | UGGGAUAUGCUUAGCAUUGACUA | 569 |
| 165 | 1540 | UGCUAAGCAUAUCCCAGCCUA | 165 | UAGGCUGGGAUAUGCUUAGCAUU | 570 |
| 166 | 1543 | UAAGCAUAUCCCAGCCUACAA | 166 | UUGUAGGCUGGGAUAUGCUUAGC | 571 |
| 167 | 1546 | GCAUAUCCCAGCCUACAAGUU | 167 | AACUUGUAGGCUGGGAUAUGCUU | 572 |
| 168 | 1547 | CAUAUCCCAGCCUACAAGUUA | 168 | UAACUUGUAGGCUGGGAUAUGCU | 573 |
| 169 | 1548 | AUAUCCCAGCCUACAAGUUGA | 169 | UCAACUUGUAGGCUGGGAUAUGC | 574 |
| 170 | 1551 | UCCCAGCCUACAAGUUGGAAA | 170 | UUUCCAACUUGUAGGCUGGGAUA | 575 |
| 171 | 1555 | AGCCUACAAGUUGGAAACUCU | 171 | AGAGUUUCCAACUUGUAGGCUGG | 576 |
| 172 | 1558 | CUACAAGUUGGAAACUCUGAU | 172 | AUCAGAGUUUCCAACUUGUAGGC | 577 |
| 173 | 1561 | CAAGUUGGAAACUCUGAUGGA | 173 | UCCAUCAGAGUUUCCAACUUGUA | 578 |
| 174 | 1562 | AAGUUGGAAACUCUGAUGGAA | 174 | UUCCAUCAGAGUUUCCAACUUGU | 579 |
| 175 | 1567 | GGAAACUCUGAUGGAAACUCA | 175 | UGAGUUUCCAUCAGAGUUUCCAA | 580 |
| 176 | 1580 | GAAACUCAUGAGCGUGGUGUA | 176 | UACACCACGCUCAUGAGUUUCCA | 581 |
| 177 | 1582 | AACUCAUGAGCGUGGUGUAUA | 177 | UAUACACCACGCUCAUGAGUUUC | 582 |
| 178 | 1583 | ACUCAUGAGCGUGGUGUAUCU | 178 | AGAUACACCACGCUCAUGAGUUU | 583 |
| 179 | 1584 | CUCAUGAGCGUGGUGUAUCUA | 179 | UAGAUACACCACGCUCAUGAGUU | 584 |
| 180 | 1585 | UCAUGAGCGUGGUGUAUCUAU | 180 | AUAGAUACACCACGCUCAUGAGU | 585 |
| 181 | 1586 | CAUGAGCGUGGUGUAUCUAUU | 181 | AAUAGAUACACCACGCUCAUGAG | 586 |
| 182 | 1587 | AUGAGCGUGGUGUAUCUAUUA | 182 | UAAUAGAUACACCACGCUCAUGA | 587 |
| 183 | 1588 | UGAGCGUGGUGUAUCUAUUCA | 183 | UGAAUAGAUACACCACGCUCAUG | 588 |
| 184 | 1589 | GAGCGUGGUGUAUCUAUUCGA | 184 | UCGAAUAGAUACACCACGCUCAU | 589 |
| 185 | 1656 | ACCUACCUUACAGGGAUUAUA | 185 | UAUAAUCCCUGUAAGGUAGGUAC | 590 |
| 186 | 1657 | CCUACCUUACAGGGAUUAUAA | 186 | UUAUAAUCCCUGUAAGGUAGGUA | 591 |
| 187 | 1658 | CUACCUUACAGGGAUUAUAAU | 187 | AUUAUAAUCCCUGUAAGGUAGGU | 592 |
| 188 | 1664 | UACAGGGAUUAUAAUUACUCA | 188 | UGAGUAAUUAUAAUCCCUGUAAG | 593 |
| 189 | 1702 | UUGUGAGAAUGUUAUUGGAUA | 189 | UAUCCAAUAACAUUCUCACAACA | 594 |
| 190 | 1702 | UUGUGAGAAUGUUAUUGGAUA | 190 | UAUCCAAUAACAUUCUCACAACA | 595 |
| 191 | 1702 | UUGUGAGAAUGUUAUUGGAUA | 191 | UAUCCAAUAACAUUCUCACAACA | 596 |
| 192 | 1862 | AGCAGCCGAGUCCUUGCAGAU | 192 | AUCUGCAAGGACUCGGCUGCUGG | 597 |
| 193 | 1875 | UUGCAGAUGGGAUGACUCGUA | 193 | UACGAGUCAUCCCAUCUGCAAGG | 598 |
| 194 | 1876 | UGCAGAUGGGAUGACUCGUGA | 194 | UCACGAGUCAUCCCAUCUGCAAG | 599 |
| 195 | 1878 | CAGAUGGGAUGACUCGUGGCA | 195 | UGCCACGAGUCAUCCCAUCUGCA | 600 |
| 196 | 1879 | AGAUGGGAUGACUCGUGGCCA | 196 | UGGCCACGAGUCAUCCCAUCUGC | 601 |
| 197 | 1889 | ACUCGUGGCCCAGUUGUGCGU | 197 | ACGCACAACUGGGCCACGAGUCA | 602 |
| 198 | 1898 | CCAGUUGUGCGUCUUCCACGU | 198 | ACGUGGAAGACGCACAACUGGGC | 603 |
| 199 | 1901 | GUUGUGCGUCUUCCACGUGCU | 199 | AGCACGUGGAAGACGCACAACUG | 604 |
| 200 | 1935 | AAGUGAAAGCCUGGCUCGAAA | 200 | UUUCGAGCCAGGCUUUCACUUCU | 605 |
| 201 | 1936 | AGUGAAAGCCUGGCUCGAAAA | 201 | UUUUCGAGCCAGGCUUUCACUUC | 606 |
| 202 | 1943 | GCCUGGCUCGAAACAUCUGAA | 202 | UUCAGAUGUUUCGAGCCAGGCUU | 607 |
| 203 | 1945 | CUGGCUCGAAACAUCUGAAGA | 203 | UCUUCAGAUGUUUCGAGCCAGGC | 608 |
| 204 | 1952 | GAAACAUCUGAAGGGUUCGCA | 204 | UGCGAACCCUUCAGAUGUUUCGA | 609 |
| 205 | 1953 | AAACAUCUGAAGGGUUCGCAA | 205 | UUGCGAACCCUUCAGAUGUUUCG | 610 |
| 206 | 1958 | UCUGAAGGGUUCGCAGUGAUA | 206 | UAUCACUGCGAACCCUUCAGAUG | 611 |
| 207 | 1959 | CUGAAGGGUUCGCAGUGAUAA | 207 | UUAUCACUGCGAACCCUUCAGAU | 612 |
| 208 | 1960 | UGAAGGGUUCGCAGUGAUAAA | 208 | UUUAUCACUGCGAACCCUUCAGA | 613 |
| 209 | 1961 | GAAGGGUUCGCAGUGAUAAAA | 209 | UUUUAUCACUGCGAACCCUUCAG | 614 |
| 210 | 1963 | AGGGUUCGCAGUGAUAAAGGA | 210 | UCCUUUAUCACUGCGAACCCUUC | 615 |
| 211 | 1983 | AGGCAUUUGACAGCACUAGCA | 211 | UGCUAGUGCUGUCAAAUGCCUCC | 616 |
| 212 | 1985 | GCAUUUGACAGCACUAGCAGA | 212 | UCUGCUAGUGCUGUCAAAUGCCU | 617 |
| 213 | 1988 | UUUGACAGCACUAGCAGAUUU | 213 | AAAUCUGCUAGUGCUGUCAAAUG | 618 |
| 214 | 1989 | UUGACAGCACUAGCAGAUUUA | 214 | UAAAUCUGCUAGUGCUGUCAAAU | 619 |
| 215 | 1991 | GACAGCACUAGCAGAUUUGCA | 215 | UGCAAAUCUGCUAGUGCUGUCAA | 620 |
| 216 | 1995 | GCACUAGCAGAUUUGCACGUA | 216 | UACGUGCAAAUCUGCUAGUGCUG | 621 |
| 217 | 1996 | CACUAGCAGAUUUGCACGUCU | 217 | AGACGUGCAAAUCUGCUAGUGCU | 622 |
| 218 | 1998 | CUAGCAGAUUUGCACGUCUAA | 218 | UUAGACGUGCAAAUCUGCUAGUG | 623 |
| 219 | 1999 | UAGCAGAUUUGCACGUCUACA | 219 | UGUAGACGUGCAAAUCUGCUAGU | 624 |
| 220 | 2000 | AGCAGAUUUGCACGUCUACAA | 220 | UUGUAGACGUGCAAAUCUGCUAG | 625 |
| 221 | 2004 | GAUUUGCACGUCUACAGAAAA | 221 | UUUUCUGUAGACGUGCAAAUCUG | 626 |
| 222 | 2006 | UUUGCACGUCUACAGAAACUU | 222 | AAGUUUCUGUAGACGUGCAAAUC | 627 |
| 223 | 2007 | UUGCACGUCUACAGAAACUUA | 223 | UAAGUUUCUGUAGACGUGCAAAU | 628 |
| 224 | 2037 | UAGCUGGACGCAACCUUUAUA | 224 | UAUAAAGGUUGCGUCCAGCUAUA | 629 |
| 225 | 2040 | CUGGACGCAACCUUUAUAUCA | 225 | UGAUAUAAAGGUUGCGUCCAGCU | 630 |
| 226 | 2042 | GGACGCAACCUUUAUAUCCGU | 226 | ACGGAUAUAAAGGUUGCGUCCAG | 631 |
| 227 | 2043 | GACGCAACCUUUAUAUCCGUU | 227 | AACGGAUAUAAAGGUUGCGUCCA | 632 |
| 228 | 2044 | ACGCAACCUUUAUAUCCGUUU | 228 | AAACGGAUAUAAAGGUUGCGUCC | 633 |
| 229 | 2045 | CGCAACCUUUAUAUCCGUUUA | 229 | UAAACGGAUAUAAAGGUUGCGUC | 634 |
| 230 | 2047 | CAACCUUUAUAUCCGUUUCCA | 230 | UGGAAACGGAUAUAAAGGUUGCG | 635 |
| 231 | 2100 | UGAUUUCAAAGGGUACAGAGA | 231 | UCUCUGUACCCUUUGAAAUCAUG | 636 |
| 232 | 2169 | CCGUUAGUGGUAACUAUUGUA | 232 | UACAAUAGUUACCACUAACGGCU | 637 |
| 233 | 2170 | CGUUAGUGGUAACUAUUGUAA | 233 | UUACAAUAGUUACCACUAACGGC | 638 |
| 234 | 2172 | UUAGUGGUAACUAUUGUACUA | 234 | UAGUACAAUAGUUACCACUAACG | 639 |
| 235 | 2175 | GUGGUAACUAUUGUACUGACA | 235 | UGUCAGUACAAUAGUUACCACUA | 640 |
| 236 | 2176 | UGGUAACUAUUGUACUGACAA | 236 | UUGUCAGUACAAUAGUUACCACU | 641 |
| 237 | 2179 | UAACUAUUGUACUGACAAGAA | 237 | UUCUUGUCAGUACAAUAGUUACC | 642 |
| 238 | 2183 | UAUUGUACUGACAAGAAACCU | 238 | AGGUUUCUUGUCAGUACAAUAGU | 643 |
| 239 | 2193 | ACAAGAAACCUGCUGCUAUAA | 239 | UUAUAGCAGCAGGUUUCUUGUCA | 644 |
| 240 | 2240 | GUUGUUUGUGAAGCUGUCAUU | 240 | AAUGACAGCUUCACAAACAACAG | 645 |
| 241 | 2264 | GCCAAGGUUGUCAGAGAAGUA | 241 | UACUUCUCUGACAACCUUGGCUG | 646 |
| 242 | 2266 | CAAGGUUGUCAGAGAAGUAUU | 242 | AAUACUUCUCUGACAACCUUGGC | 647 |
| 243 | 2268 | AGGUUGUCAGAGAAGUAUUAA | 243 | UUAAUACUUCUCUGACAACCUUG | 648 |
| 244 | 2269 | GGUUGUCAGAGAAGUAUUAAA | 244 | UUUAAUACUUCUCUGACAACCUU | 649 |
| 245 | 2271 | UUGUCAGAGAAGUAUUAAAGA | 245 | UCUUUAAUACUUCUCUGACAACC | 650 |
| 246 | 2274 | UCAGAGAAGUAUUAAAGACUA | 246 | UAGUCUUUAAUACUUCUCUGACA | 651 |
| 247 | 2276 | AGAGAAGUAUUAAAGACUACA | 247 | UGUAGUCUUUAAUACUUCUCUGA | 652 |
| 248 | 2277 | GAGAAGUAUUAAAGACUACCA | 248 | UGGUAGUCUUUAAUACUUCUCUG | 653 |
| 249 | 2278 | AGAAGUAUUAAAGACUACCAA | 249 | UUGGUAGUCUUUAAUACUUCUCU | 654 |
| 250 | 2300 | GAGGCUAUGAUUGAGGUCAAA | 250 | UUUGACCUCAAUCAUAGCCUCUG | 655 |
| 251 | 2301 | AGGCUAUGAUUGAGGUCAACA | 251 | UGUUGACCUCAAUCAUAGCCUCU | 656 |
| 252 | 2302 | GGCUAUGAUUGAGGUCAACAU | 252 | AUGUUGACCUCAAUCAUAGCCUC | 657 |
| 253 | 2303 | GCUAUGAUUGAGGUCAACAUU | 253 | AAUGUUGACCUCAAUCAUAGCCU | 658 |
| 254 | 2305 | UAUGAUUGAGGUCAACAUUAA | 254 | UUAAUGUUGACCUCAAUCAUAGC | 659 |
| 255 | 2306 | AUGAUUGAGGUCAACAUUAAA | 255 | UUUAAUGUUGACCUCAAUCAUAG | 660 |
| 256 | 2310 | UUGAGGUCAACAUUAACAAGA | 256 | UCUUGUUAAUGUUGACCUCAAUC | 661 |
| 257 | 2311 | UGAGGUCAACAUUAACAAGAA | 257 | UUCUUGUUAAUGUUGACCUCAAU | 662 |
| 258 | 2317 | CAACAUUAACAAGAAUUUAGU | 258 | ACUAAAUUCUUGUUAAUGUUGAC | 663 |
| 259 | 2320 | CAUUAACAAGAAUUUAGUGGA | 259 | UCCACUAAAUUCUUGUUAAUGUU | 664 |
| 260 | 2323 | UAACAAGAAUUUAGUGGGCUA | 260 | UAGCCCACUAAAUUCUUGUUAAU | 665 |
| 261 | 2328 | AGAAUUUAGUGGGCUCUGCCA | 261 | UGGCAGAGCCCACUAAAUUCUUG | 666 |
| 262 | 2344 | UGCCAUGGCUGGGAGCAUAGA | 262 | UCUAUGCUCCCAGCCAUGGCAGA | 667 |
| 263 | 2345 | GCCAUGGCUGGGAGCAUAGGA | 263 | UCCUAUGCUCCCAGCCAUGGCAG | 668 |
| 264 | 2353 | UGGGAGCAUAGGAGGCUACAA | 264 | UUGUAGCCUCCUAUGCUCCCAGC | 669 |
| 265 | 2357 | AGCAUAGGAGGCUACAACGCA | 265 | UGCGUUGUAGCCUCCUAUGCUCC | 670 |
| 266 | 2358 | GCAUAGGAGGCUACAACGCCA | 266 | UGGCGUUGUAGCCUCCUAUGCUC | 671 |
| 267 | 2362 | AGGAGGCUACAACGCCCAUGA | 267 | UCAUGGGCGUUGUAGCCUCCUAU | 672 |
| 268 | 2368 | CUACAACGCCCAUGCAGCAAA | 268 | UUUGCUGCAUGGGCGUUGUAGCC | 673 |
| 269 | 2370 | ACAACGCCCAUGCAGCAAACA | 269 | UGUUUGCUGCAUGGGCGUUGUAG | 674 |
| 270 | 2376 | CCCAUGCAGCAAACAUUGUCA | 270 | UGACAAUGUUUGCUGCAUGGGCG | 675 |
| 271 | 2377 | CCAUGCAGCAAACAUUGUCAA | 271 | UUGACAAUGUUUGCUGCAUGGGC | 676 |
| 272 | 2399 | GCCAUCUACAUUGCCUGUGGA | 272 | UCCACAGGCAAUGUAGAUGGCGG | 677 |
| 273 | 2419 | ACAGGAUGCAGCACAGAAUGU | 273 | ACAUUCUGUGCUGCAUCCUGUCC | 678 |
| 274 | 2420 | CAGGAUGCAGCACAGAAUGUU | 274 | AACAUUCUGUGCUGCAUCCUGUC | 679 |
| 275 | 2424 | AUGCAGCACAGAAUGUUGGUA | 275 | UACCAACAUUCUGUGCUGCAUCC | 680 |
| 276 | 2426 | GCAGCACAGAAUGUUGGUAGU | 276 | ACUACCAACAUUCUGUGCUGCAU | 681 |
| 277 | 2429 | GCACAGAAUGUUGGUAGUUCA | 277 | UGAACUACCAACAUUCUGUGCUG | 682 |
| 278 | 2479 | UCCCACAAAUGAAGAUUUAUA | 278 | UAUAAAUCUUCAUUUGUGGGACC | 683 |
| 279 | 2482 | CACAAAUGAAGAUUUAUAUAU | 279 | AUAUAUAAAUCUUCAUUUGUGGG | 684 |
| 280 | 2484 | CAAAUGAAGAUUUAUAUAUCA | 280 | UGAUAUAUAAAUCUUCAUUUGUG | 685 |
| 281 | 2502 | UCAGCUGCACCAUGCCAUCUA | 281 | UAGAUGGCAUGGUGCAGCUGAUA | 686 |
| 282 | 2514 | UGCCAUCUAUAGAGAUAGGAA | 282 | UUCCUAUCUCUAUAGAUGGCAUG | 687 |
| 283 | 2575 | UUUGCAGAUGCUAGGUGUUCA | 283 | UGAACACCUAGCAUCUGCAAACA | 688 |
| 284 | 2576 | UUGCAGAUGCUAGGUGUUCAA | 284 | UUGAACACCUAGCAUCUGCAAAC | 689 |
| 285 | 2579 | CAGAUGCUAGGUGUUCAAGGA | 285 | UCCUUGAACACCUAGCAUCUGCA | 690 |
| 286 | 2587 | AGGUGUUCAAGGAGCAUGCAA | 286 | UUGCAUGCUCCUUGAACACCUAG | 691 |
| 287 | 2588 | GGUGUUCAAGGAGCAUGCAAA | 287 | UUUGCAUGCUCCUUGAACACCUA | 692 |
| 288 | 2592 | UUCAAGGAGCAUGCAAAGAUA | 288 | UAUCUUUGCAUGCUCCUUGAACA | 693 |
| 289 | 2593 | UCAAGGAGCAUGCAAAGAUAA | 289 | UUAUCUUUGCAUGCUCCUUGAAC | 694 |
| 290 | 2594 | CAAGGAGCAUGCAAAGAUAAU | 290 | AUUAUCUUUGCAUGCUCCUUGAA | 695 |
| 291 | 2606 | AAAGAUAAUCCUGGGGAAAAU | 291 | AUUUUCCCCAGGAUUAUCUUUGC | 696 |
| 292 | 2620 | GGAAAAUGCCCGGCAGCUUGA | 292 | UCAAGCUGCCGGGCAUUUUCCCC | 697 |
| 293 | 2627 | GCCCGGCAGCUUGCCCGAAUU | 293 | AAUUCGGGCAAGCUGCCGGGCAU | 698 |
| 294 | 2633 | CAGCUUGCCCGAAUUGUGUGU | 294 | ACACACAAUUCGGGCAAGCUGCC | 699 |
| 295 | 2658 | CCGUAAUGGCUGGGGAAUUGU | 295 | ACAAUUCCCCAGCCAUUACGGUC | 700 |
| 296 | 2674 | AUUGUCACUUAUGGCAGCAUU | 296 | AAUGCUGCCAUAAGUGACAAUUC | 701 |
| 297 | 2677 | GUCACUUAUGGCAGCAUUGGA | 297 | UCCAAUGCUGCCAUAAGUGACAA | 702 |
| 298 | 2721 | ACAUGAUUCACAACAGGUCGA | 298 | UCGACCUGUUGUGAAUCAUGUGA | 703 |
| 299 | 2722 | CAUGAUUCACAACAGGUCGAA | 299 | UUCGACCUGUUGUGAAUCAUGUG | 704 |
| 300 | 2723 | AUGAUUCACAACAGGUCGAAA | 300 | UUUCGACCUGUUGUGAAUCAUGU | 705 |
| 301 | 2724 | UGAUUCACAACAGGUCGAAGA | 301 | UCUUCGACCUGUUGUGAAUCAUG | 706 |
| 302 | 2725 | GAUUCACAACAGGUCGAAGAU | 302 | AUCUUCGACCUGUUGUGAAUCAU | 707 |
| 303 | 2727 | UUCACAACAGGUCGAAGAUCA | 303 | UGAUCUUCGACCUGUUGUGAAUC | 708 |
| 304 | 2728 | UCACAACAGGUCGAAGAUCAA | 304 | UUGAUCUUCGACCUGUUGUGAAU | 709 |
| 305 | 2729 | CACAACAGGUCGAAGAUCAAU | 305 | AUUGAUCUUCGACCUGUUGUGAA | 710 |
| 306 | 2731 | CAACAGGUCGAAGAUCAAUUU | 306 | AAAUUGAUCUUCGACCUGUUGUG | 711 |
| 307 | 2732 | AACAGGUCGAAGAUCAAUUUA | 307 | UAAAUUGAUCUUCGACCUGUUGU | 712 |
| 308 | 2734 | CAGGUCGAAGAUCAAUUUACA | 308 | UGUAAAUUGAUCUUCGACCUGUU | 713 |
| 309 | 2735 | AGGUCGAAGAUCAAUUUACAA | 309 | UUGUAAAUUGAUCUUCGACCUGU | 714 |
| 310 | 2736 | GGUCGAAGAUCAAUUUACAAA | 310 | UUUGUAAAUUGAUCUUCGACCUG | 715 |
| 311 | 2737 | GUCGAAGAUCAAUUUACAAGA | 311 | UCUUGUAAAUUGAUCUUCGACCU | 716 |
| 312 | 2738 | UCGAAGAUCAAUUUACAAGAA | 312 | UUCUUGUAAAUUGAUCUUCGACC | 717 |
| 313 | 2740 | GAAGAUCAAUUUACAAGACCU | 313 | AGGUCUUGUAAAUUGAUCUUCGA | 718 |
| 314 | 2741 | AAGAUCAAUUUACAAGACCUA | 314 | UAGGUCUUGUAAAUUGAUCUUCG | 719 |
| 315 | 2742 | AGAUCAAUUUACAAGACCUCA | 315 | UGAGGUCUUGUAAAUUGAUCUUC | 720 |
| 316 | 2743 | GAUCAAUUUACAAGACCUCCA | 316 | UGGAGGUCUUGUAAAUUGAUCUU | 721 |
| 317 | 2744 | AUCAAUUUACAAGACCUCCAA | 317 | UUGGAGGUCUUGUAAAUUGAUCU | 722 |
| 318 | 2833 | UAAAGGACUAACAUAAAAUCU | 318 | AGAUUUUAUGUUAGUCCUUUAGA | 723 |
| 319 | 2834 | AAAGGACUAACAUAAAAUCUA | 319 | UAGAUUUUAUGUUAGUCCUUUAG | 724 |
| 320 | 2937 | UCAGAGAGGUCUCAGGUUCUU | 320 | AAGAACCUGAGACCUCUCUGAAA | 725 |
| 321 | 2941 | AGAGGUCUCAGGUUCUUUCCA | 321 | UGGAAAGAACCUGAGACCUCUCU | 726 |
| 322 | 2945 | GUCUCAGGUUCUUUCCAUGCA | 322 | UGCAUGGAAAGAACCUGAGACCU | 727 |
| 323 | 2947 | CUCAGGUUCUUUCCAUGCAGA | 323 | UCUGCAUGGAAAGAACCUGAGAC | 728 |
| 324 | 2981 | AACACAGUUUAGUGCUUUACA | 324 | UGUAAAGCACUAAACUGUGUUCA | 729 |
| 325 | 2994 | GCUUUACAUGCUGUGCUCUUU | 325 | AAAGAGCACAGCAUGUAAAGCAC | 730 |
| 326 | 3058 | UGGUAAUCUACAGCUCACCUA | 326 | UAGGUGAGCUGUAGAUUACCAUC | 731 |
| 327 | 3068 | CAGCUCACCUCUGAAGGCAAA | 327 | UUUGCCUUCAGAGGUGAGCUGUA | 732 |
| 328 | 3071 | CUCACCUCUGAAGGCAAAUAU | 328 | AUAUUUGCCUUCAGAGGUGAGCU | 733 |
| 329 | 3102 | AAAAGUUUUGAUGAAAUUCUU | 329 | AAGAAUUUCAUCAAAACUUUUUU | 734 |
| 330 | 3105 | AGUUUUGAUGAAAUUCUUGAA | 330 | UUCAAGAAUUUCAUCAAAACUUU | 735 |
| 331 | 3108 | UUUGAUGAAAUUCUUGAAGUU | 331 | AACUUCAAGAAUUUCAUCAAAAC | 736 |
| 332 | 3110 | UGAUGAAAUUCUUGAAGUUCA | 332 | UGAACUUCAAGAAUUUCAUCAAA | 737 |
| 333 | 3111 | GAUGAAAUUCUUGAAGUUCAU | 333 | AUGAACUUCAAGAAUUUCAUCAA | 738 |
| 334 | 3117 | AUUCUUGAAGUUCAUGGUGAU | 334 | AUCACCAUGAACUUCAAGAAUUU | 739 |
| 335 | 3126 | GUUCAUGGUGAUCAGUGCAAU | 335 | AUUGCACUGAUCACCAUGAACUU | 740 |
| 336 | 3129 | CAUGGUGAUCAGUGCAAUUGA | 336 | UCAAUUGCACUGAUCACCAUGAA | 741 |
| 337 | 3130 | AUGGUGAUCAGUGCAAUUGAA | 337 | UUCAAUUGCACUGAUCACCAUGA | 742 |
| 338 | 3207 | GAAACUCCUGAUUUUGUAGUU | 338 | AACUACAAAAUCAGGAGUUUCAU | 743 |
| 339 | 3208 | AAACUCCUGAUUUUGUAGUUA | 339 | UAACUACAAAAUCAGGAGUUUCA | 744 |
| 340 | 3209 | AACUCCUGAUUUUGUAGUUAA | 340 | UUAACUACAAAAUCAGGAGUUUC | 745 |
| 341 | 3210 | ACUCCUGAUUUUGUAGUUAAU | 341 | AUUAACUACAAAAUCAGGAGUUU | 746 |
| 342 | 3212 | UCCUGAUUUUGUAGUUAAUUU | 342 | AAAUUAACUACAAAAUCAGGAGU | 747 |
| 343 | 3213 | CCUGAUUUUGUAGUUAAUUUA | 343 | UAAAUUAACUACAAAAUCAGGAG | 748 |
| 344 | 3229 | AUUUAUUAAGUCUGGGAUGUA | 344 | UACAUCCCAGACUUAAUAAAUUA | 749 |
| 345 | 3230 | UUUAUUAAGUCUGGGAUGUAA | 345 | UUACAUCCCAGACUUAAUAAAUU | 750 |
| 346 | 3241 | UGGGAUGUAGAACUUCAAGAA | 346 | UUCUUGAAGUUCUACAUCCCAGA | 751 |
| 347 | 3243 | GGAUGUAGAACUUCAAGAAGU | 347 | ACUUCUUGAAGUUCUACAUCCCA | 752 |
| 348 | 3244 | GAUGUAGAACUUCAAGAAGUA | 348 | UACUUCUUGAAGUUCUACAUCCC | 753 |
| 349 | 3252 | ACUUCAAGAAGUAAGAGCUAA | 349 | UUAGCUCUUACUUCUUGAAGUUC | 754 |
| 350 | 3254 | UUCAAGAAGUAAGAGCUAAGU | 350 | ACUUAGCUCUUACUUCUUGAAGU | 755 |
| 351 | 3256 | CAAGAAGUAAGAGCUAAGUUA | 351 | UAACUUAGCUCUUACUUCUUGAA | 756 |
| 352 | 3332 | GGGGGUAAUCAGCAUUAUUCU | 352 | AGAAUAAUGCUGAUUACCCCCCA | 757 |
| 353 | 3333 | GGGGUAAUCAGCAUUAUUCUU | 353 | AAGAAUAAUGCUGAUUACCCCCC | 758 |
| 354 | 3400 | AAACUACAGAAUAAUGUGUUA | 354 | UAACACAUUAUUCUGUAGUUUGG | 759 |
| 355 | 3401 | AACUACAGAAUAAUGUGUUAA | 355 | UUAACACAUUAUUCUGUAGUUUG | 760 |
| 356 | 3402 | ACUACAGAAUAAUGUGUUAAA | 356 | UUUAACACAUUAUUCUGUAGUUU | 761 |
| 357 | 3460 | AUUUAUCUCCGCAGGCUAUUU | 357 | AAAUAGCCUGCGGAGAUAAAUAC | 762 |
| 358 | 3465 | UCUCCGCAGGCUAUUUGUUCA | 358 | UGAACAAAUAGCCUGCGGAGAUA | 763 |
| 359 | 3466 | CUCCGCAGGCUAUUUGUUCAA | 359 | UUGAACAAAUAGCCUGCGGAGAU | 764 |
| 360 | 3482 | UUCAGAGAGGCCUUUUGUUUA | 360 | UAAACAAAAGGCCUCUCUGAACA | 765 |
| 361 | 3483 | UCAGAGAGGCCUUUUGUUUAA | 361 | UUAAACAAAAGGCCUCUCUGAAC | 766 |
| 362 | 3484 | CAGAGAGGCCUUUUGUUUAAA | 362 | UUUAAACAAAAGGCCUCUCUGAA | 767 |
| 363 | 3485 | AGAGAGGCCUUUUGUUUAAAU | 363 | AUUUAAACAAAAGGCCUCUCUGA | 768 |
| 364 | 3487 | AGAGGCCUUUUGUUUAAAUAU | 364 | AUAUUUAAACAAAAGGCCUCUCU | 769 |
| 365 | 3532 | CUGGAUUGGCUAUAACAUGUA | 365 | UACAUGUUAUAGCCAAUCCAGAC | 770 |
| 366 | 3533 | UGGAUUGGCUAUAACAUGUCU | 366 | AGACAUGUUAUAGCCAAUCCAGA | 771 |
| 367 | 3537 | UUGGCUAUAACAUGUCUUUCA | 367 | UGAAAGACAUGUUAUAGCCAAUC | 772 |
| 368 | 3550 | GUCUUUCAGCAUUAGGCUUUU | 368 | AAAAGCCUAAUGCUGAAAGACAU | 773 |
| 369 | 3597 | ACUAAAGAUAUCAGAGCUCUU | 369 | AAGAGCUCUGAUAUCUUUAGUAA | 774 |
| 370 | 3598 | CUAAAGAUAUCAGAGCUCUUA | 370 | UAAGAGCUCUGAUAUCUUUAGUA | 775 |
| 371 | 3651 | AAGCAAGACUGGGACCUUAGA | 371 | UCUAAGGUCCCAGUCUUGCUUGU | 776 |
| 372 | 3652 | AGCAAGACUGGGACCUUAGAA | 372 | UUCUAAGGUCCCAGUCUUGCUUG | 777 |
| 373 | 3654 | CAAGACUGGGACCUUAGAAAU | 373 | AUUUCUAAGGUCCCAGUCUUGCU | 778 |
| 374 | 3655 | AAGACUGGGACCUUAGAAAUA | 374 | UAUUUCUAAGGUCCCAGUCUUGC | 779 |
| 375 | 3656 | AGACUGGGACCUUAGAAAUCA | 375 | UGAUUUCUAAGGUCCCAGUCUUG | 780 |
| 376 | 3714 | UCUAAGCCAACUUUAAUUGCU | 376 | AGCAAUUAAAGUUGGCUUAGAGA | 781 |
| 377 | 3770 | UUUUUUGUAAACUGUAUCAAA | 377 | UUUGAUACAGUUUACAAAAAAAA | 782 |
| 378 | 3773 | UUUGUAAACUGUAUCAAAUCU | 378 | AGAUUUGAUACAGUUUACAAAAA | 783 |
| 379 | 3784 | UAUCAAAUCUGUAUAUGUUGU | 379 | ACAACAUAUACAGAUUUGAUACA | 784 |
| 380 | 3786 | UCAAAUCUGUAUAUGUUGUAA | 380 | UUACAACAUAUACAGAUUUGAUA | 785 |
| 381 | 3788 | AAAUCUGUAUAUGUUGUAAUA | 381 | UAUUACAACAUAUACAGAUUUGA | 786 |
| 382 | 3789 | AAUCUGUAUAUGUUGUAAUAA | 382 | UUAUUACAACAUAUACAGAUUUG | 787 |
| 383 | 3790 | AUCUGUAUAUGUUGUAAUAAA | 383 | UUUAUUACAACAUAUACAGAUUU | 788 |
| 384 | 3814 | UAUGCUAGUUUAUUGGAAGUA | 384 | UACUUCCAAUAAACUAGCAUAAG | 789 |
| 385 | 3816 | UGCUAGUUUAUUGGAAGUGUU | 385 | AACACUUCCAAUAAACUAGCAUA | 790 |
| 386 | 3825 | AUUGGAAGUGUUCAAGAAAUA | 386 | UAUUUCUUGAACACUUCCAAUAA | 791 |
| 387 | 3826 | UUGGAAGUGUUCAAGAAAUAA | 387 | UUAUUUCUUGAACACUUCCAAUA | 792 |
| 388 | 3827 | UGGAAGUGUUCAAGAAAUAAA | 388 | UUUAUUUCUUGAACACUUCCAAU | 793 |
| 389 | 3850 | UCAACUUGUGUACUGAUAAAA | 389 | UUUUAUCAGUACACAAGUUGAUU | 794 |
| 390 | 4097 | GUCAGCAGAGUUAUUGAAUCU | 390 | AGAUUCAAUAACUCUGCUGACCC | 795 |
| 391 | 4099 | CAGCAGAGUUAUUGAAUCUUA | 391 | UAAGAUUCAAUAACUCUGCUGAC | 796 |
| 392 | 4100 | AGCAGAGUUAUUGAAUCUUAA | 392 | UUAAGAUUCAAUAACUCUGCUGA | 797 |
| 393 | 4102 | CAGAGUUAUUGAAUCUUAAUU | 393 | AAUUAAGAUUCAAUAACUCUGCU | 798 |
| 394 | 4103 | AGAGUUAUUGAAUCUUAAUUU | 394 | AAAUUAAGAUUCAAUAACUCUGC | 799 |
| 395 | 4120 | AUUUUUUUUAAUGUACAAGUU | 395 | AACUUGUACAUUAAAAAAAAUUA | 800 |
| 396 | 4154 | AAAGAACUCCUUAUUUUGUAU | 396 | AUACAAAAUAAGGAGUUCUUUAU | 801 |
| 397 | 4459 | UAAUGUUUUGUACAAUUACUA | 397 | UAGUAAUUGUACAAAACAUUAAU | 802 |
| 398 | 4480 | AAUUGUAUACAUUUUGUUAUA | 398 | UAUAACAAAAUGUAUACAAUUUA | 803 |
| 399 | 4482 | UUGUAUACAUUUUGUUAUAGA | 399 | UCUAUAACAAAAUGUAUACAAUU | 804 |
| 400 | 4483 | UGUAUACAUUUUGUUAUAGAA | 400 | UUCUAUAACAAAAUGUAUACAAU | 805 |
| 401 | 4484 | GUAUACAUUUUGUUAUAGAAU | 401 | AUUCUAUAACAAAAUGUAUACAA | 806 |
| 402 | 4485 | UAUACAUUUUGUUAUAGAAUA | 402 | UAUUCUAUAACAAAAUGUAUACA | 807 |
| 403 | 4486 | AUACAUUUUGUUAUAGAAUAA | 403 | UUAUUCUAUAACAAAAUGUAUAC | 808 |
| 404 | 4488 | ACAUUUUGUUAUAGAAUACUU | 404 | AAGUAUUCUAUAACAAAAUGUAU | 809 |
| 405 | 4496 | UUAUAGAAUACUUUUUUCUAA | 405 | UUAGAAAAAAGUAUUCUAUAACA | 810 |
| 702 | 110 | GAUUCUGUAGCUACAAUGUUA | 1434 | UAACAUUGUAGCUACAGAAUCCU | 1441 |
| 703 | 111 | AUUCUGUAGCUACAAUGUUGU | 1435 | ACAACAUUGUAGCUACAGAAUCC | 1442 |
| 704 | 115 | UGUAGCUACAAUGUUGUCAAA | 1436 | UUUGACAACAUUGUAGCUACAGA | 1443 |
| 705 | 2843 | ACAUAAAAUCUGUGAAUUAAA | 1437 | UUUAAUUCACAGAUUUUAUGUUA | 1444 |
| 706 | 2835 | AAGGACUAACAUAAAAUCUGU | 1438 | ACAGAUUUUAUGUUAGUCCUUUA | 1445 |
| 707 | 3277 | UAAGUUCAUGUUUGUAAAUUA | 1439 | UAAUUUACAAACAUGAACUUAGA | 1446 |
| 708 | 3418 | UUAAACAUGCUAAAUAGUUCU | 1440 | AGAACUAUUUAGCAUGUUUAACA | 1447 |

[0290] Homo sapiens HMGCR, transcript variant 1, mRNA: GenBank: NM_000859.3 (SEQ ID NO: 811)

| | |
|---|---|
| 1 | ccttccgctc cgcgactgcg ttaactggag ccaggctgag cgtcggcgcc ggggttcggt |
| 61 | ggcctctagt gagatctgga ggatccaagg attctgtagc tacaatgttg tcaagacttt |
| 121 | ttcgaatgca tggcctcttt gtggcctccc atccctggga agtcatagtg gggacagtga |
| 181 | cactgaccat ctgcatgatg tccatgaaca tgtttactgg taacaataag atctgtggtt |
| 241 | ggaattatga atgtccaaag tttgaagagg atgttttgag cagtgacatt ataattctga |
| 301 | caataacacg atgcatagcc atcctgtata tttacttcca gttccagaat ttacgtcaac |
| 361 | ttggatcaaa atatattttg ggtattgctg gccttttcac aattttctca agttttgtat |
| 421 | tcagtacagt tgtcattcac ttcttagaca aagaattgac aggcttgaat gaagctttgc |
| 481 | cctttttcct acttttgatt gacctttoca gagcaagcac attagcaaag tttgccctca |
| 541 | gttccaactc acaggatgaa gtaagggaaa atattgctcg tggaatggca attttaggtc |
| 601 | ctacgtttac cctcgatgct cttgttgaat gtcttgtgat tggagttggt accatgtcag |
| 661 | gggtacgtca gcttgaaatt atgtgctgct ttggctgcat gtcagttctt gccaactact |
| 721 | tcgtgttcat gactttcttc ccagcttgtg tgtccttggt attagagctt tctcgggaaa |
| 781 | gccgcgaggg togtccaatt tggcagctca gccattttgc ccgagtttta gaagaagaag |
| 841 | aaaataagcc gaatcctgta actcagaggg tcaagatgat tatgtctcta ggcttggttc |
| 901 | ttgttcatgc tcacagtcgc tggatagctg atccttctcc tcaaaacagt acagcagata |
| 961 | cttctaaggt ttcattagga ctggatgaaa atgtgtccaa gagaattgaa ccaagtgttt |
| 1021 | ccctctggca gttttatctc tctaaaatga tcagcatgga tattgaacaa gttattaccc |
| 1081 | taagtttagc tctccttctg gctgtcaagt acatcttctt tgaacaaaca gagacagaat |
| 1141 | ctacactctc attaaaaaac cctatcacat ctcctgtagt gacacaaaag aaagtcccag |
| 1201 | acaattgttg tagacgtgaa cctatgctgg tcagaaataa ccagaaatgt gattcagtag |
| 1261 | aggaagagac agggataaac cgagaaagaa aagttgaggt tataaaacce ttagtggctg |
| 1321 | aaacagatac cccaaacaga gctacatttg tggttggtaa ctcctcctta ctcgatactt |
| 1381 | catcagtact ggtgacacag gaacctgaaa ttgaacttcc cagggaacct cggcctaatg |
| 1441 | aagaatgtct acagatactt gggaatgcag agaaaggtgc aaaattcctt agtgatgctg |
| 1501 | agatcatcca gttagtcaat gctaagcata toccagccta caagttggaa actctgatgg |
| 1561 | aaactcatga gcgtggtgta tctattcgcc gacagttact ttccaagaag ctttcagaac |
| 1621 | cttcttctct ccagtaccta ccttacaggg attataatta ctccttggtg atgggagctt |
| 1681 | gttgtgagaa tgttattgga tatatgccca tccctgttgg agtggcagga cccctttgct |
| 1741 | tagatgaaaa agaatttcag gttccaatgg caacaacaga aggttgtctt gtggccagca |
| 1801 | ccaatagagg ctgcagagca ataggtcttg gtggaggtgc cagcagccga gtccttgcag |
| 1861 | atgggatgac tegtggccca gttgtgcgtc ttccacgtgc ttgtgactct gcagaagtga |
| 1921 | aagcctggct cgaaacatct gaagggttcg cagtgataaa ggaggcattt gacagcacta |
| 1981 | gcagatttgc acgtctacag aaacttcata caagtatage tggacgcaac ctttatatcc |
| 2041 | gtttccagtc caggtcaggg gatgccatgg ggatgaacat gatttcaaag ggtacagaga |
| 2101 | aagcactttc aaaacttcac gagtatttcc ctgaaatgca gattctagcc gttagtggta |
| 2161 | actattgtac tgacaagaaa cctgctgcta taaattggat agagggaaga ggaaaatctg |
| 2221 | ttgtttgtga agctgtcatt ccagccaagg ttgtcagaga agtattaaag actaccacag |
| 2281 | aggctatgat tgaggtcaac attaacaaga atttagtggg ctctgccatg gctgggagca |
| 2341 | taggaggcta caacgcccat gcagcaaaca ttgtcaccgc catctacatt gcctgtggac |
| 2401 | aggatgcagc acagaatgtt ggtagttcaa actgtattac tttaatggaa gcaagtggtc |
| 2461 | ccacaaatga agatttatat atcagctgca ccatgccatc tatagagata ggaacggtgg |
| 2521 | gtggtgggac caacctacta cctcagcaag cctgtttgca gatgctaggt gttcaaggag |
| 2581 | catgcaaaga taatcctggg gaaaatgccc ggcagcttgc ccgaattgtg tgtgggaccg |
| 2641 | taatggctgg ggaattgtca cttatggcag cattggcage aggacatctt gtcaaaagtc |
| 2701 | acatgattca caacaggtcg aagatcaatt tacaagacct ccaaggagct tgcaccaaga |
| 2761 | agacagcctg aatagcccga cagttctgaa ctggaacatg ggcattgggt tctaaaggac |
| 2821 | taacataaaa tctgtgaatt aaaaaagctc aatgcattgt cttgtggagg atgaatagat |
| 2881 | gtgatcactg agacagccac ttggtttttg gctctttcag agaggtctca ggttctttcc |
| 2941 | atgcagactc ctcagatctg aacacagttt agtgctttac atgctgtgct ctttgaagag |
| 3001 | atttcaacaa gaatattgta tgttaaagca tcagagatgg taatctacag ctcacctctg |
| 3061 | aaggcaaata taagctggga aaaaagtttt gatgaaattc ttgaagttca tggtgatcag |
| 3121 | tgcaattgac cttctccctc actcctgcca gttgaaaatg gatttttaaa ttatactgta |
| 3181 | gctgatgaaa ctcctgattt tgtagttaat ttattaagtc tgggatgtag aacttcaaga |
| 3241 | agtaagagct aagttctaag ttcatgtttg taaattaata cttcatttgg tgctggtcta |
| 3301 | ttttgatttt ggggggtaat cagcattatt cttcagaagg ggacctgttt tottcaaggg |
| 3361 | aagaaacact cttattccca aactacagaa taatgtgtta aacatgctaa atagttctat |
| 3421 | caggaaaaca aatcactgta tttatctccg caggctattt gttcagagag gccttttgtt |
| 3481 | taaatataaa tgtttaaata taaatgtttg tctggattgg ctataacatg tctttcagca |
| 3541 | ttaggctttt aagaaacaca gggttttgta ttctttacta aagatatcag agctcttaat |
| 3601 | gttgcttaga tgagggtgac tgtcaagtac aagcaagact gggaccttag aaatcattgt |
| 3661 | agaaacacag ttttgaaaga aaaataccat gtctctaagc caactttaat tgcttaaaag |
| 3721 | acatttttat ttagttgaaa aatctagttt tttttgtaaa ctgtatcaaa tctgtatatg |
| 3781 | ttgtaataaa acttatgcta gtttattgga agtgttcaag aaataaaaat caacttgtgt |
| 3841 | actgataaaa tactctagcc tgggccagag aagataatgt tctttaatgt tgtccaggaa |
| 3901 | accctggctt gcttgccgag cctaatgaaa gggaaagtca gctttcagag ccagtgaagg |
| 3961 | agccacgtga atggccctag aactgtgcct agttcctgtg gccaggaggt tggtgactga |
| 4021 | aacattcaca cagggctctt tgatggaccc acgaacgctc ttagctttct cagggggtca |
| 4081 | gcagagttat tgaatcttaa ttttttttaa tgtacaagtt ttgtataaat aataaagaac |
| 4141 | tccttatttt gtattacatc taatgcttca agtgttgctc ttggaaagct gatgatgtct |
| 4201 | cttgtagaag atggactctg aaaaacattc caggaaacca tggcagcatg gagagcctct |
| 4261 | tagtgattgt gtctgcattg ttattgtgga agatttacct tttctgttgt acgtaaagct |
| 4321 | taaattgctt ttgttgtgac tttttagcca gtgacttttt ctgagetttt catggaagtg |
| 4381 | gcagtgaaaa atatgttgag tgttcatttt agtgactgta attaatatct tgctggatta |
| 4441 | atgttttgta caattactaa attgtataca ttttgttata gaatactttt ttctagtttc |
| 4501 | agtaaataat gaaaaggaag ttaataccaa |

[0291] In Table 1, each code (letter, e.g., A, G, C, and U) represents a single ribonucleotide in the dsRNA. In some embodiments, the sequence list may be inclusive of any possible, additional modifications in a nucleobase, a ribose sugar ring, and/or a phosphate group (i.e., internucleoside linkage). In some embodiments, the last nucleotide from the 5′ end (or the first nucleotide from 3′ end) in each strand (sense strand and antisense strand) may have not include a phosphate group as being hydrolyzed or processed, e.g., during the synthesis of the oligonucleotides, but may contain 3′-terminal —OH group. In some embodiments, a phosphate group in the last nucleotide from the 5′ end (or the first nucleotide from 3′ end) in the sense strand may be added as a functional group for conjugation with a ligand.

[0292] In some embodiments, the dsRNA includes a sense strand having 10 contiguous nucleotides differing by no more than 3 nucleotides from the nucleotide sequence selected from SEQ ID NOs: 1 to 405 and 1434 to 1440. In some embodiments, the dsRNA includes an antisense strand having 10 contiguous nucleotides differing by no more than 3 nucleotides from the nucleotide sequence of SEQ ID NOs: 406 to 810 and 1441 to 1447. In some embodiments, the dsRNA includes a sense strand having 11 contiguous nucleotides differing by no more than 3 nucleotides from the nucleotide sequence selected from SEQ ID NOs: 1 to 405 and 1434 to 1440. In some embodiments, the dsRNA includes an antisense strand having 11 contiguous nucleotides differing by no more than 3 nucleotides from the nucleotide sequence selected from SEQ ID NOs: 406 to 810 and 1441 to 1447. In some embodiments, the dsRNA includes a sense strand having 12 contiguous nucleotides differing by no more than 3 nucleotides from the nucleotide sequence selected from SEQ ID NOs: 1 to 405 and 1434 to 1440. In some embodiments, the dsRNA includes an antisense strand having 12 contiguous nucleotides differing by no more than 3 nucleotides from the nucleotide sequence selected from SEQ ID NOs: 406 to 810 and 1441 to 1447. In some embodiments, the dsRNA includes a sense strand having 13 contiguous nucleotides differing by no more than 3 nucleotides from the nucleotide sequence selected from SEQ ID NOs: 1 to 405 and 1434 to 1440. In some embodiments, the dsRNA includes an antisense strand having 13 contiguous nucleotides differing by no more than 3 nucleotides from the nucleotide sequence selected from SEQ ID NOs: 406 to 810 and 1441 to 1447. In some embodiments, the dsRNA includes a sense strand having 14 contiguous nucleotides differing by no more than 3 nucleotides from the nucleotide sequence selected from SEQ ID NOs: 1 to 405 and 1434 to 1440. In some embodiments, the dsRNA includes an antisense strand having 14 contiguous nucleotides differing by no more than 3 nucleotides from the nucleotide sequence selected from SEQ ID NOs: 406 to 810 and 1441 to 1447. In some embodiments, the dsRNA includes a sense strand having 15 contiguous nucleotides differing by no more than 3 nucleotides from the nucleotide sequence selected from SEQ ID NOs: 1 to 405 and 1434 to 1440. In some embodiments, the dsRNA includes an antisense strand having 15 contiguous nucleotides differing by no more than 3 nucleotides from the nucleotide sequence selected from SEQ ID NOs: 406 to 810 and 1441 to 1447. In some embodiments, the dsRNA includes a sense strand having 16 contiguous nucleotides differing by no more than 3 nucleotides from the nucleotide sequence selected from SEQ ID NOs: 1 to 405 and 1434 to 1440. In some embodiments, the dsRNA includes an antisense strand having 16 contiguous nucleotides differing by no more than 3 nucleotides from the nucleotide sequence selected from SEQ ID NOs: 406 to 810 and 1441 to 1447. In some embodiments, the dsRNA includes a sense strand having 17 contiguous nucleotides differing by no more than 3 nucleotides from the nucleotide sequence selected from SEQ ID NOs: 1 to 405 and 1434 to 1440. In some embodiments, the dsRNA includes an antisense strand having 17 contiguous nucleotides differing by no more than 3 nucleotides from the nucleotide sequence selected from SEQ ID NOs: 406 to 810 and 1441 to 1447. In some embodiments, the dsRNA includes a sense strand having 18 contiguous nucleotides differing by no more than 3 nucleotides from the nucleotide sequence selected from SEQ ID NOs: 1 to 405 and 1434 to 1440. In some embodiments, the dsRNA includes an antisense strand having 18 contiguous nucleotides differing by no more than 3 nucleotides from the nucleotide sequence selected from SEQ ID NOs: 406 to 810 and 1441 to 1447. In some embodiments, the dsRNA includes a sense strand having 19 contiguous nucleotides differing by no more than 3 nucleotides from the nucleotide sequence selected from SEQ ID NOs: 1 to 405 and 1434 to 1440. In some embodiments, the dsRNA includes an antisense strand having 19 contiguous nucleotides differing by no more than 3 nucleotides from the nucleotide sequence selected from SEQ ID NOs: 406 to 810 and 1441 to 1447. In some embodiments, the dsRNA includes a sense strand having 20 contiguous nucleotides differing by no more than 3 nucleotides from the nucleotide sequence selected from SEQ ID NOs: 1 to 405 and 1434 to 1440. In some embodiments, the dsRNA includes an antisense strand having 20 contiguous nucleotides differing by no more than 3 nucleotides from the nucleotide sequence selected from SEQ ID NOs: 406 to 810 and 1441 to 1447. In some embodiments, the dsRNA includes a sense strand having 21 contiguous nucleotides differing by no more than 3 nucleotides from the nucleotide sequence selected from SEQ ID NOs: 1 to 405 and 1434 to 1440. In some embodiments, the dsRNA includes an antisense strand having 21 contiguous nucleotides differing by no more than 3 nucleotides from the nucleotide sequence selected from SEQ ID NOs: 406 to 810 and 1441 to 1447.

[0293] In some embodiments, the dsRNA includes a sense strand having 10 contiguous nucleotides differing by no more than 2 nucleotides from the nucleotide sequence selected from SEQ ID NOs: 1 to 405 and 1434 to 1440. In some embodiments, the dsRNA includes an antisense strand having 10 contiguous nucleotides differing by no more than 2 nucleotides from the nucleotide sequence selected from SEQ ID NOs: 406 to 810 and 1441 to 1447. In some embodiments, the dsRNA includes a sense strand having 11 contiguous nucleotides differing by no more than 2 nucleotides from the nucleotide sequence selected from SEQ ID NOs: 1 to 405 and 1434 to 1440. In some embodiments, the dsRNA includes an antisense strand having 11 contiguous nucleotides differing by no more than 2 nucleotides from the nucleotide sequence selected from SEQ ID NOs: 406 to 810 and 1441 to 1447. In some embodiments, the dsRNA includes a sense strand having 12 contiguous nucleotides differing by no more than 2 nucleotides from the nucleotide sequence selected from SEQ ID NOs: 1 to 405 and 1434 to 1440. In some embodiments, the dsRNA includes an antisense strand having 12 contiguous nucleotides differing by no more than 2 nucleotides from the nucleotide sequence selected from SEQ ID NOs: 406 to 810 and 1441 to 1447. In some embodiments, the dsRNA includes a sense strand having 13 contiguous nucleotides differing by no more than 2 nucleotides from the nucleotide sequence selected from SEQ ID NOs: 1 to 405 and 1434 to 1440. In some embodiments, the dsRNA includes an antisense strand having 13 contiguous nucleotides differing by no more than 2 nucleotides from the nucleotide sequence selected from SEQ ID NOs: 406 to 810 and 1441 to 1447. In some embodiments, the dsRNA includes a sense strand having 14 contiguous nucleotides differing by no more than 2 nucleotides from the nucleotide sequence selected from SEQ ID NOs: 1 to 405 and 1434 to 1440. In some embodiments, the dsRNA includes an antisense strand having 14 contiguous nucleotides differing by no more than 2 nucleotides from the nucleotide sequence selected from SEQ ID NOs: 406 to 810 and 1441 to 1447. In some embodiments, the dsRNA includes a sense strand having 15 contiguous nucleotides differing by no more than 2 nucleotides from the nucleotide sequence selected from SEQ ID NOs: 1 to 405 and 1434 to 1440. In some embodiments, the dsRNA includes an antisense strand having 15 contiguous nucleotides differing by no more than 2 nucleotides from the nucleotide sequence selected from SEQ ID NOs: 406 to 810 and 1441 to 1447. In some embodiments, the dsRNA includes a sense strand having 16 contiguous nucleotides differing by no more than 2 nucleotides from the nucleotide sequence selected from SEQ ID NOs: 1 to 405 and 1434 to 1440. In some embodiments, the dsRNA includes an antisense strand having 16 contiguous nucleotides differing by no more than 2 nucleotides from the nucleotide sequence selected from SEQ ID NOs: 406 to 810 and 1441 to 1447. In some embodiments, the dsRNA includes a sense strand having 17 contiguous nucleotides differing by no more than 2 nucleotides from the nucleotide sequence selected from SEQ ID NOs: 1 to 405 and 1434 to 1440. In some embodiments, the dsRNA includes an antisense strand having 17 contiguous nucleotides differing by no more than 2 nucleotides from the nucleotide sequence selected from SEQ ID NOs: 406 to 810 and 1441 to 1447. In some embodiments, the dsRNA includes a sense strand having 18 contiguous nucleotides differing by no more than 2 nucleotides from the nucleotide sequence selected from SEQ ID NOs: 1 to 405 and 1434 to 1440. In some embodiments, the dsRNA includes an antisense strand having 18 contiguous nucleotides differing by no more than 2 nucleotides from the nucleotide sequence selected from SEQ ID NOs: 406 to 810 and 1441 to 1447. In some embodiments, the dsRNA includes a sense strand having 19 contiguous nucleotides differing by no more than 2 nucleotides from the nucleotide sequence selected from SEQ ID NOs: 1 to 405 and 1434 to 1440. In some embodiments, the dsRNA includes an antisense strand having 19 contiguous nucleotides differing by no more than 2 nucleotides from the nucleotide sequence selected from SEQ ID NOs: 406 to 810 and 1441 to 1447. In some embodiments, the dsRNA includes a sense strand having 20 contiguous nucleotides differing by no more than 2 nucleotides from the nucleotide sequence selected from SEQ ID NOs: 1 to 405 and 1434 to 1440. In some embodiments, the dsRNA includes an antisense strand having 20 contiguous nucleotides differing by no more than 2 nucleotides from the nucleotide sequence selected from SEQ ID NOs: 406 to 810 and 1441 to 1447. In some embodiments, the dsRNA includes a sense strand having 21 contiguous nucleotides differing by no more than 2 nucleotides from the nucleotide sequence selected from SEQ ID NOs: 1 to 405 and 1434 to 1440. In some embodiments, the dsRNA includes an antisense strand having 21 contiguous nucleotides differing by no more than 2 nucleotides from the nucleotide sequence selected from SEQ ID NOs: 406 to 810 and 1441 to 1447.

[0294] In some embodiments, the dsRNA includes a sense strand having 10 contiguous nucleotides differing by no more than 1 nucleotide from the nucleotide sequence selected from SEQ ID NOs: 1 to 405 and 1434 to 1440. In some embodiments, the dsRNA includes an antisense strand having 10 contiguous nucleotides differing by no more than 1 nucleotide from the nucleotide sequence selected from SEQ ID NOs: 406 to 810 and 1441 to 1447. In some embodiments, the dsRNA includes a sense strand having 11 contiguous nucleotides differing by no more than 1 nucleotide from the nucleotide sequence selected from SEQ ID NOs: 1 to 405 and 1434 to 1440. In some embodiments, the dsRNA includes an antisense strand having 11 contiguous nucleotides differing by no more than 1 nucleotide from the nucleotide sequence selected from SEQ ID NOs: 406 to 810 and 1441 to 1447. In some embodiments, the dsRNA includes a sense strand having 12 contiguous nucleotides differing by no more than 1 nucleotide from the nucleotide sequence selected from SEQ ID NOs: 1 to 405 and 1434 to 1440. In some embodiments, the dsRNA includes an antisense strand having 12 contiguous nucleotides differing by no more than 1 nucleotide from the nucleotide sequence selected from SEQ ID NOs: 406 to 810 and 1441 to 1447. In some embodiments, the dsRNA includes a sense strand having 13 contiguous nucleotides differing by no more than 1 nucleotide from the nucleotide sequence selected from SEQ ID NOs: 1 to 405 and 1434 to 1440. In some embodiments, the dsRNA includes an antisense strand having 13 contiguous nucleotides differing by no more than 1 nucleotide from the nucleotide sequence selected from SEQ ID NOs: 406 to 810 and 1441 to 1447. In some embodiments, the dsRNA includes a sense strand having 14 contiguous nucleotides differing by no more than 1 nucleotide from the nucleotide sequence selected from SEQ ID NOs: 1 to 405 and 1434 to 1440. In some embodiments, the dsRNA includes an antisense strand having 14 contiguous nucleotides differing by no more than 1 nucleotide from the nucleotide sequence selected from SEQ ID NOs: 406 to 810 and 1441 to 1447. In some embodiments, the dsRNA includes a sense strand having 15 contiguous nucleotides differing by no more than 1 nucleotide from the nucleotide sequence selected from SEQ ID NOs: 1 to 405 and 1434 to 1440. In some embodiments, the dsRNA includes an antisense strand having 15 contiguous nucleotides differing by no more than 1 nucleotide from the nucleotide sequence selected from SEQ ID NOs: 406 to 810 and 1441 to 1447. In some embodiments, the dsRNA includes a sense strand having 16 contiguous nucleotides differing by no more than 1 nucleotide from the nucleotide sequence selected from SEQ ID NOs: 1 to 405 and 1434 to 1440. In some embodiments, the dsRNA includes an antisense strand having 16 contiguous nucleotides differing by no more than 1 nucleotide from the nucleotide sequence selected from SEQ ID NOs: 406 to 810 and 1441 to 1447. In some embodiments, the dsRNA includes a sense strand having 17 contiguous nucleotides differing by no more than 1 nucleotide from the nucleotide sequence selected from SEQ ID NOs: 1 to 405 and 1434 to 1440. In some embodiments, the dsRNA includes an antisense strand having 17 contiguous nucleotides differing by no more than 1 nucleotide from the nucleotide sequence selected from SEQ ID NOs: 406 to 810 and 1441 to 1447. In some embodiments, the dsRNA includes a sense strand having 18 contiguous nucleotides differing by no more than 1 nucleotide from the nucleotide sequence selected from SEQ ID NOs: 1 to 405 and 1434 to 1440. In some embodiments, the dsRNA includes an antisense strand having 18 contiguous nucleotides differing by no more than 1 nucleotide from the nucleotide sequence selected from SEQ ID NOs: 406 to 810 and 1441 to 1447. In some embodiments, the dsRNA includes a sense strand having 19 contiguous nucleotides differing by no more than 1 nucleotide from the nucleotide sequence selected from SEQ ID NOs: 1 to 405 and 1434 to 1440. In some embodiments, the dsRNA includes an antisense strand having 19 contiguous nucleotides differing by no more than 1 nucleotide from the nucleotide sequence selected from SEQ ID NOs: 406 to 810 and 1441 to 1447. In some embodiments, the dsRNA includes a sense strand having 20 contiguous nucleotides differing by no more than 1 nucleotide from the nucleotide sequence selected from SEQ ID NOs: 1 to 405 and 1434 to 1440. In some embodiments, the dsRNA includes an antisense strand having 20 contiguous nucleotides differing by no more than 1 nucleotide from the nucleotide sequence selected from SEQ ID NOs: 406 to 810 and 1441 to 1447. In some embodiments, the dsRNA includes a sense strand having 21 contiguous nucleotides differing by no more than 1 nucleotide from the nucleotide sequence selected from SEQ ID NOs: 1 to 405 and 1434 to 1440. In some embodiments, the dsRNA includes an antisense strand having 21 contiguous nucleotides differing by no more than 1 nucleotide from the nucleotide sequence selected from SEQ ID NOs: 406 to 810 and 1441 to 1447. In some embodiments, the dsRNA includes an antisense strand having 22 contiguous nucleotides differing by no more than 1 nucleotide from the nucleotide sequence selected from SEQ ID NOs: 406 to 810 and 1441 to 1447. In some embodiments, the dsRNA includes an antisense strand having 23 contiguous nucleotides differing by no more than 1 nucleotide from the nucleotide sequence selected from SEQ ID NOs: 406 to 810 and 1441 to 1447.

[0295] In some embodiments, the dsRNA includes (i) a sense strand having 15 contiguous nucleotides differing by no more than one, two or three nucleotides from the nucleotide sequence selected from SEQ ID NOs: 1 to 405 and 1434 to 1440 and (ii) an antisense strand forming a duplex with the sense strand of (i) and having 15 contiguous nucleotides differing by no more than one, two or three nucleotides from the nucleotide sequence selected from SEQ ID NOs: 406 to 810 and 1441 to 1447. In some embodiments, the dsRNA includes (i) a sense strand having 16 contiguous nucleotides differing by no more than one, two or three from the nucleotide sequence selected from SEQ ID NOs: 1 to 405 and 1434 to 1440 and (ii) an antisense strand forming a duplex with the sense strand of (i) and having 16 contiguous nucleotides differing by no more than one, two or three nucleotides from the nucleotide sequence selected from SEQ ID NOs: 406 to 810 and 1441 to 1447. In some embodiments, the dsRNA includes (i) a sense strand having 17 contiguous nucleotides differing by no more than one, two or three nucleotides from the nucleotide sequence selected from SEQ ID NOs: 1 to 405 and 1434 to 1440 and (ii) an antisense strand forming a duplex with the sense strand of (i) and having 17 contiguous nucleotides differing by no more than one, two or three nucleotides from the nucleotide sequence selected from SEQ ID NOs: 406 to 810 and 1441 to 1447. In some embodiments, the dsRNA includes (i) a sense strand having 18 contiguous nucleotides differing by no more than one, two or three nucleotides from the nucleotide sequence selected from SEQ ID NOs: 1 to 405 and 1434 to 1440 and (ii) an antisense strand forming a duplex with the sense strand of (i) and having 18 contiguous nucleotides differing by no more than one, two or three nucleotides from the nucleotide sequence selected from SEQ ID NOs: 406 to 810 and 1441 to 1447. In some embodiments, the dsRNA includes (i) a sense strand having 19 contiguous nucleotides differing by no more than one, two or three nucleotides from the nucleotide sequence selected from SEQ ID NOs: 1 to 405 and 1434 to 1440 and (ii) an antisense strand forming a duplex with the sense strand of (i) and having 19 contiguous nucleotides differing by no more than one, two or three nucleotides from the nucleotide sequence selected from SEQ ID NOs: 406 to 810 and 1441 to 1447. In some embodiments, the dsRNA includes (i) a sense strand having 20 contiguous nucleotides differing by no more than one, two or three nucleotides from the nucleotide sequence selected from SEQ ID NOs: 1 to 405 and 1434 to 1440 and (ii) an antisense strand forming a duplex with the sense strand of (i) and having 20 contiguous nucleotides differing by no more than one, two or three nucleotides from the nucleotide sequence selected from SEQ ID NOs: 406 to 810 and 1441 to 1447. In some embodiments, the dsRNA includes (i) a sense strand having 21 contiguous nucleotides differing by no more than one, two or three nucleotides from the nucleotide sequence selected from SEQ ID NOs: 1 to 405 and 1434 to 1440 and (ii) an antisense strand forming a duplex with the sense strand of (i) and having 21 contiguous nucleotides differing by no more than one, two or three nucleotides from the nucleotide sequence selected from SEQ ID NOs: 406 to 810 and 1441 to 1447.

[0296] In certain aspects, when a sense strand or an antisense strand of a dsRNA in above paragraphs is differing by a certain number of nucleotides (e.g., one, two or three nucleotides) from a specific sequence (e.g., SEQ ID NOs: 1 to 810 and 1434 to 1447), it is meant by that the sense strand or the antisense strand of the dsRNA includes one, two or three nucleotides having different nucleobases compared to the nucleobases of the nucleotides at the corresponding positions of the specific sequence (e.g., SEQ ID NOs: 1 to 810 and 1434 to 1447).

### Modification Pattern

[0297] In an aspect, the disclosure provides a set of modification patterns determined or arranged by modified nucleotides in dsRNAs described herein. Aside from or in addition to the nucleobase sequences, various arrangements of modified nucleotides and the modification patterns thereof can be introduced, for example, to increase stability in a biological or physiological surrounding, to facilitate or promote cleavage by the RNA-induced silencing complex, and/or to mitigate or reduce off-targeting risk (e.g., to HMGCR off-targeting risk).

[0298] In an aspect, the disclosure provides a dsRNA that is partially (e.g., greater than about 1%, 5%, 10%, 15%, 20%, 25%, 30%, 35%, 40%, or 45% of the total nucleotides), substantially (e.g., greater than about 50%, 55%, 60%, 65%, 70%, 75%, 80%, 85%, 90%, or 95% of the total nucleotides), or entirely made of modified nucleotides, which can provide improved resistance to chemical and/or nuclease digestion and increased in vivo stability thereby imposing a longer in vivo half-life. Further, increasing the in vivo half-life of the dsRNA results in enhanced bioavailability and enhanced effectiveness in inhibiting expression or activity of a target gene (e.g., human HMGCR). For example, the stability of dsRNA in blood or serum may be determined, e.g., by its susceptibility to degradation by the cellular enzymes, which may be dependent on the characteristics (e.g., sequences, modification, modification pattern, or other chemical moieties) of each strand (i.e., sense strand or antisense strand) of the dsRNA. Thus, in certain aspect, the efficiency of dsRNA as a therapeutic agent may be improved by increasing the in vivo stability (e.g., in blood or serum) of the dsRNA while maintaining the ability of the dsRNA to mediate RNA interference in vivo.

### Modified Nucleotides

[0299] The modified nucleotides as used herein contain one or more modifications, for example, the modified nucleotides contain at least one chemical modification or replacement in an internucleoside linkage (“linkage”), a nucleobase, and/or a sugar moiety of the nucleotide. Non-limiting examples include a 2′-modification on a ribose sugar ring (e.g., 2′-deoxy, 2′-O-alkyl, 2′-halo, 2′-O-alkoxyalkyl, 2′-O-amino alkyl, etc.), 3′-modification (e.g., substitution) in backbone phosphate group, or 4′-modification on a ribose sugar ring (e.g., 4′-thio RNA). Also, other non-limiting examples of modifications may include one or more modifications selected from a deoxy modification, a 2′-O-alkyl modification, a 2′-halo modification, a 2′-5′-linkage modification, a conformationally restricting modification, an abasic modification, a 2′amino-modification, a 2′-O-allyl modification, 2′-C-alkyl modification, a 2′-O-alkoxyalkyl modification, a morpholino modification, a modification containing a phosphoramidate group, a modification containing a non-natural nucleobase, a modification in a tetrahydropyran, a modification in a threose (TNA), a modification containing a 1,5-anhydrohexitol, a modification containing a cyclohexyl, a modification containing a cyclohexenyl a modification containing a phosphorothioate group, a modification containing a methylphosphonate group, a modification containing an alkylphosphate, a modification containing a phosphonate, a modification containing an alkylphosphonate, a modification to form a thermally destabilizing nucleotide, a modification containing glycol (GNA), and a 2-O-(N-methylacetamide) modification. For example, a modified nucleotide may include a single modification, or two or more modifications at the positions at which the chemical modification groups do not hinder or intervene each other.

[0300] In some embodiments, each of the modified nucleotides is independently selected from LNA, GNA, TNA, 2′-O-alkoxyalkyl modified nucleotide, 2′-O-alkyl modified nucleotide, 2-O-allyl modified nucleotide, 2′C-allyl modified nucleotide, 2′-halo modified nucleotide, and 2˜deoxy modified nucleotide (DNA). The term alkyl, alkoxyl, allyl, amino, and halo can be interpreted as described above. In some embodiments, the modified nucleotides include at least one LNAs. In some embodiments, the modified nucleotides include at least one GNAs. In some embodiments, the modified nucleotides include at least one TNAs. In some embodiments, the modified nucleotides include at least one 2′-O-alkoxyalkyl modified nucleotides. In some embodiments, the modified nucleotides include at least one 2′-O-alkyl modified nucleotides. In some embodiments, the modified nucleotides include at least one 2-O-allyl modified nucleotides. In some embodiments, the modified nucleotides include at least one 2′-C-allyl modified nucleotides. In some embodiments, the modified nucleotides include at least one 2′-halo (e.g., —F) modified nucleotides. In some embodiments, the modified nucleotides include at least one 2′-deoxy modified nucleotides (DNA).

[0301] In some embodiments, each of the modified nucleotides contain independently selected from LNA modification, GNA modification, TNA modification, 2′-O-alkoxyalkyl modification, 2′-O-alkyl modification, 2′-O-allyl modification, 2′-C-allyl modification, 2′-halo modification, and 2′-deoxy modification (DNA). The term alkyl, alkoxyl, allyl, amino, and halo can be interpreted as described above. In some embodiments, the modified nucleotides include at least one LNAs. In some embodiments, the modified nucleotides include at least one GNAs. In some embodiments, the modified nucleotides include at least one TNAs. In some embodiments, the modified nucleotides include at least one 2′-O-alkoxyalkyl modifications. In some embodiments, the modified nucleotides include at least one 2′-O-alkyl modifications. In some embodiments, the modified nucleotides include at least one 2′-O-allyl modifications. In some embodiments, the modified nucleotides include at least one 2′-C-allyl modifications. In some embodiments, the modified nucleotides include at least one 2′-halo (e.g., —F) modifications. In some embodiments, the modified nucleotides include at least one 2′-deoxy modifications (DNA).

[0302] In some embodiments, the modified nucleotide may be a bicyclic (or bridged) nucleic acid (“BNA”) having a covalent linkage between the 2′ and 4′ carbons on a ribose sugar. In some embodiments, the modified nucleotide is a locked RNA (“LNA”) having covalent linkage of a bicyclic sugar modification is a 4′-CH₂-O-2′ linkage (methylene oxy), also known as LNA having a structure of e.g.,

[chemical structure]

or a pharmaceutically acceptable salt thereof.

[0303] In some embodiments, a ribose ring may be replaced with a glycol motif linked to phosphate and the GNA nucleotide has a structure of

[chemical structure]

or a pharmaceutically acceptable salt thereof.

[0304] In some embodiments, a ribose pentofuranosyl ring may be replaced with a threofuranosyl ring linked to the phosphate and a threofuranosyl nucleotide (TNA) may include a moiety of

[chemical structure]

or a pharmaceutically acceptable salt thereof. In some embodiments, the TNA may have a structure of

[chemical structure]

or a pharmaceutically acceptable salt thereof. In some embodiments, the phosphodiester linkage in the TNA may be modified, e.g., with phosphorothioate group and modified TNA may include a structure of

[chemical structure]

or a pharmaceutically acceptable salt thereof. The TNA may further include one or more substituents at 1′, 3′ and/or 4′ positions and such modified TNA may be encompassed by the definition of TNA herein.

[0305] In some embodiments, a ribose ring may not include a base and an abasic nucleotide has a structure of

[chemical structure]

or a pharmaceutically acceptable salt thereof.

[0306] In certain aspects, the modified nucleotide may include a heterocyclic group (e.g., 5 to 6 membered heterocycloalkyl ring) in place of a ribose ring. In some embodiments, the ribose ring may be replaced with a morpholinyl ring, e.g., to form an morpholino oligonucleotide. In some embodiments, the ribose ring may be replaced with an arabinose ring.

[0307] In certain aspects, the modified nucleotides contain one or more modification groups at 2′ position on the ribose ring by replacing 2′-OH. In some embodiments, the modification group may be hydrogen (i.e. deoxy), halogen (e.g., —F), substituted or unsubstituted alkyl (e.g., C₁-C₁₂ alkyl), or substituted or unsubstituted heteroalkyl (e.g., —O—(C₁-C₁₂ alkyl), —N—(C₁-C₁₂ alkyl), —C(O)NH—(C₁-C₁₂ alkyl), —NHC(O)—(C₁-C₁₂ alkyl), or —C(O)—(C₁-C₁₂ alkyl)). In some embodiments, the modification group may be hydrogen, —F, —O-alkyl (e.g., C₁-C₄ alkyl), or —O— alkoxyalkyl (e.g., —O—(C₁-C₄ alkylene)-(C₁-C₄ alkoxyl)). Any of the alkyl, heteroalkyl, alkylene in the disclosure are optionally substituted with one or more of hydroxyl (—OH), C₁-C₃ alkyl (e.g., methyl, or ethyl), amine (e.g., monoamine or diamine), alkoxyl (e.g., —O—CH₃ (OMe) or —O—CH₂CH₃ (OEt)), halogen (e.g., —F) or the like.

[0308] In certain aspects, the modified nucleotides may include one or more of 2′-deoxy modification, 2′-O-alkyl modification, 2′-O-substituted alkyl modification, 2′-O-alkoxyalkyl modification, and 2′-O-aminoalkyl modification. In some embodiments, the modified nucleotides may include one or more of 2′-deoxy modification, 2′-O-alkyl modification, 2′-O—substituted alkyl modification, 2′-O-alkoxyalkyl modification, and 2′-O-aminoalkyl modification. In some embodiments, the modified nucleotides include at least one GNAs. In some embodiments, the modified nucleotides include at least one 2′-O-alkoxyalkyl modifications. In some embodiments, the modified nucleotides include at least one 2′-O-alkyl modifications. In some embodiments, the modified nucleotides include at least one 2′-O-allyl modifications. In some embodiments, the modified nucleotides include at least one 2′-C-allyl modifications. In some embodiments, the modified nucleotides include at least one 2′-halo (e.g., —F) modifications. In some embodiments, the modified nucleotides include at least one 2′-deoxy modifications (DNA). In some embodiments, the modified nucleotides do not include 2′-deoxy modifications (DNA).

[0309] In certain aspects, the modified nucleotides may include one or more of 2′-deoxy nucleotide (DNA), 2′-O-methyl (2′-OMe) modification, 2′-flouro (2′-F) modification, 2′-O—methoxyethyl (2′-O-MOE or “2′-MOE”) modification, 2′-O-aminopropyl (2′-O-AP) modification, 2′-O-dimethylaminoethyl (2′-O-DMAOE) modification, 2′-O—dimethylaminopropyl (2′-O-DMAP) modification, 2′-O-dimethylaminoethyloxyethyl (2′-O—DMAEOE) modification, and 2′-O-N-methylacetamido (2′-O-NMA) modification. In some embodiments, the modified nucleotides may include at least one 2′-deoxy modification (DNA). In some embodiments, the modified nucleotides may include at least one 2′-O-methyl (2′-OMe) modification. In some embodiments, the modified nucleotides may include at least one 2′-flouro (2′-F) modification. In some embodiments, the modified nucleotides may include at least one 2′-0-methoxyethyl (2′-O-MOE or “2′-MOE”) modification. In some embodiments, the modified nucleotides may include at least one 2′-O-aminopropyl (2′-O-AP) modification. In some embodiments, the modified nucleotides may include at least one 2′-O-dimethylaminoethyl (2′-O—DMAOE) modification. In some embodiments, the modified nucleotides may include at least one 2′-O-dimethylaminopropyl (2′-O-DMAP) modification. In some embodiments, the modified nucleotides may include at least one 2′-O-dimethylaminoethyloxyethyl (2′-O-DMAEOE) modification. In some embodiments, the modified nucleotides may include at least one 2′-O-N-methylacetamido (2′-O-NMA) modification.

[0310] In some embodiments, each modified nucleotide containing a modification on a 2′ sugar ring may optionally contain a phosphorothioate group at 5′ or 3′ linkage. In some embodiments, each modified nucleotide containing a modification on a 2′ sugar ring may optionally contain a modification such as an abasic modification or methylated nucleobase modification at nucleobase.

[0311] In certain aspects, the dsRNA is partially (e.g., greater than about 1%, 5%, 10%, 15%, 20%, 25%, 30%, 35%, 40%, or 45% of the total nucleotides), substantially (e.g., greater than about 50%, 55%, 60%, 65%, 70%, 75%, 80%, 85%, 90%, or 95% of the total nucleotides), or entirely made of modified nucleotides containing the modification on 2′ sugar ring. In some embodiments, the dsRNA is partially (e.g., greater than about 1%, 5%, 10%, 15%, 20%, 25%, 30%, 35%, 40%, or 45% of the total nucleotides) made of modified nucleotides containing the modification on 2′ sugar ring. In some embodiments, the dsRNA is substantially (e.g., greater than about 50%, 55%, 60%, 65%, 70%, 75%, 80%, 85%, 90%, or 95% of the total nucleotides) made of modified nucleotides containing the modification on 2′ sugar ring. In some embodiments, the dsRNA includes greater than about 80% of modified nucleotides containing the modification on 2′ sugar ring based on the total nucleotides. In some embodiments, the dsRNA includes greater than about 85% of modified nucleotides containing the modification on 2′ sugar ring based on the total nucleotides. In some embodiments, the dsRNA includes greater than about 90% of modified nucleotides containing the modification on 2′ sugar ring based on the total nucleotides. In some embodiments, the dsRNA includes greater than about 95% of modified nucleotides containing the modification on 2′ sugar ring based on the total nucleotides. In some embodiments, the dsRNA is entirely made of modified nucleotides containing the modification on 2′ sugar ring.

[0312] In certain aspects, the modified nucleotide may include a modification in a phosphate group or, in other words, an internucleoside linkage modification (e.g., phosphorothioate, phosphorodithioate, methylphosphonate, methylene phosphonate, or vinylphosphonate (VP) linkage). In some embodiments, the linkage modification may include phosphorothioate (PS) having a structure of

[chemical structure]

which may be an Rp isomer or an Sp isomer. In some embodiments, the linkage modification may include phosphorothioate (PS) having a structure of

[chemical structure]

which may be a stereopure Rp isomer. In some embodiments, the linkage modification may include phosphorothioate (PS) having a structure of

[chemical structure]

which may be a stereopure Sp isomer.

[0313] For example, the modified nucleotide including 3′-PS modification can be represented as

[chemical structure]

wherein R represents H, OH or a substituent (e.g., —F, —CH₃, —OMe, or MOE). In some embodiments, the 3′-PS group may be a stereopure Sp isomer. In some embodiments, the 3′-PS group may be a stereopure Rp isomer.

[0314] In certain aspects, the dsRNAi agent may be entirely made of modified nucleotides having one or more internucleoside linkage modification and/or modifications in the sugar moieties of the nucleotides. Example dsRNA (siRNA) with modified nucleotides, including sense strands and antisense strands targeting the above indicated HMGCR mRNA, are shown in Table 2.

TABLE 2

| | position | | SEQ | | SEQ |
|---|---|---|---|---|---|
| siRNA | in | | ID | | ID |
| No. | mRNA | Sense Strand | NO: | Antisense strand | NO: |
| 406 | 125 | A004p001U004p001G004pU004 | 812 | U004p001C007p001G004pA004p | 1053 |
| | | pU004pG004pU007pC004pA007 | | A004pA007pA004pA004pG004pU | |
| | | pA007pG007pA004pC004pU004 | | 004pC004pU004pU004pG007pA0 | |
| | | pU004pU004pU004pU004pC004 | | 04pC007pA004pA004pC004pA00 | |
| | | pG004pA004 | | 4pU004p001U004p001G004 | |
| 407 | 126 | U004p001G004p001U004pU004 | 813 | U004p001U007p001C004pG004p | 1054 |
| | | pG004pU004pC007pA004pA007 | | A004pA007pA004pA004pA004pG | |
| | | pG007pA007pC004pU004pU004 | | 004pU004pC004pU004pU007pG0 | |
| | | pU004pU004pU004pC004pG004 | | 04pA007pC004pA004pA004pC00 | |
| | | pA004pA004 | | 4pA004p001U004p001U004 | |
| 408 | 127 | G004p001U004p001U004pG004 | 814 | A004p001U007p001U004pC004p | 1055 |
| | | pU004pC004pA007pA004pG007 | | G004pA007pA004pA004pA004pA | |
| | | pA007pC007pU004pU004pU004 | | 004pG004pU004pC004pU007pU0 | |
| | | pU004pU004pC004pG004pA004 | | 04pG007pA004pC004pA004pA00 | |
| | | pA004pU004 | | 4pC004p001A004p001U004 | |
| 409 | 130 | G004p001U004p001C004pA004 | 815 | U004p001G007p001C004pA004p | 1056 |
| | | pA004pG004pA007pC004pU007 | | U004pU007pC004pG004pA004pA | |
| | | pU007pU007pU004pU004pC004 | | 004pA004pA004pA004pG007pU0 | |
| | | pG004pA004pA004pU004pG004 | | 04pC007pU004pU004pG004pA00 | |
| | | pC004pA004 | | 4pC004p001A004p001A004 | |
| 410 | 131 | U004p001C004p001A004pA004 | 816 | A004p001U007p001G004pC004p | 1057 |
| | | pG004pA004pC007pU004pU007 | | A004pU007pU004pC004pG004pA | |
| | | pU007pU007pU004pC004pG004 | | 004pA004pA004pA004pA007pG0 | |
| | | pA004pA004pU004pG004pC004 | | 04pU007pC004pU004pU004pG00 | |
| | | pA004pU004 | | 4pA004p001C004p001A004 | |
| 411 | 133 | A004p001A004p001G004pA004 | 817 | U004p001C007p001A004pU004p | 1058 |
| | | pC004pU004pU007pU004pU007 | | G004pC007pA004pU004pU004pC | |
| | | pU007pC007pG004pA004pA004 | | 004pG004pA004pA004pA007pA0 | |
| | | pU004pG004pC004pA004pU004 | | 04pA007pG004pU004pC004pU00 | |
| | | pG004pA004 | | 4pU004p001G004p001A004 | |
| 412 | 164 | G004p001C004p001C004pU004 | 818 | U004p001A007p001C004pU004p | 1059 |
| | | pC004pC004pC007pA004pU007 | | U004pC007pC004pC004pA004pG | |
| | | pC007pC007pC004pU004pG004 | | 004pG004pG004pA004pU007pG0 | |
| | | pG004pG004pA004pA004pG004 | | 04pG007pG004pA004pG004pG00 | |
| | | pU004pA004 | | 4pC004p001C004p001A004 | |
| 413 | 244 | C004p001A004p001A004pU004 | 819 | U004p001U007p001C004pC004p | 1060 |
| | | pA004pA004pG007pA004pU007 | | A004pA007pC004pC004pA004pC | |
| | | pC007pU007pG004pU004pG004 | | 004pA004pG004pA004pU007pC0 | |
| | | pG004pU004pU004pG004pG004 | | 04pU007pU004pA004pU004pU00 | |
| | | pA004pA004 | | 4pG004p001U004p001U004 | |
| 414 | 277 | A004p001A004p001A004pG004 | 820 | A004p001A007p001A004pA004p | 1061 |
| | | pU004pU004pU007pG004pA007 | | C004pA007pU004pC004pC004pU | |
| | | pA007pG007pA004pG004pG004 | | 004pC004pU004pU004pC007pA0 | |
| | | pA004pU004pG004pU004pU004 | | 04pA007pA004pC004pU004pU00 | |
| | | pU004pU004 | | 4pU004p001G004p001G004 | |
| 415 | 295 | U004p001U004p001U004pG004 | 821 | A004p001U007p001U004pA004p | 1062 |
| | | pA004pG004pC007pA004pG007 | | U004pA007pA004pU004pG004pU | |
| | | pU007pG007pA004pC004pA004 | | 004pC004pA004pC004pU007pG0 | |
| | | pU004pU004pA004pU004pA004 | | 04pC007pU004pC004pA004pA00 | |
| | | pA004pU004 | | 4pA004p001A004p001C004 | |
| 416 | 313 | A004p001A004p001U004pU004 | 822 | U004p001A007p001U004pC004p | 1063 |
| | | pC004pU004pG007pA004pC007 | | G004pU007pG004pU004pU004pA | |
| | | pA007pA007pU004pA004pA004 | | 004pU004pU004pG004pU007pC0 | |
| | | pC004pA004pC004pG004pA004 | | 04pA007pG004pA004pA004pU00 | |
| | | pU004pA004 | | 4pU004p001A004p001U004 | |
| 417 | 315 | U004p001U004p001C004pU004 | 823 | U004p001G007p001C004pA004p | 1064 |
| | | pG004pA004pC007pA004pA007 | | U004pC007pG004pU004pG004pU | |
| | | pU007pA007pA004pC004pA004 | | 004pU004pA004pU004pU007pG0 | |
| | | pC004pG004pA004pU004pG004 | | 04pU007pC004pA004pG004pA00 | |
| | | pC004pA004 | | 4pA004p001U004p001U004 | |
| 418 | 316 | U004p001C004p001U004pG004 | 824 | A004p001U007p001G004pC004p | 1065 |
| | | pA004pC004pA007pA004pU007 | | A004pU007pC004pG004pU004pG | |
| | | pA007pA007pC004pA004pC004 | | 004pU004pU004pA004pU007pU0 | |
| | | pG004pA004pU004pG004pC004 | | 04pG007pU004pC004pA004pG00 | |
| | | pA004pU004 | | 4pA004p001A004p001U004 | |
| 419 | 318 | U004p001G004p001A004pC004 | 825 | U004p001U007p001A004pU004p | 1066 |
| | | pA004pA004pU007pA004pA007 | | G004pC007pA004pU004pC004pG | |
| | | pC007pA007pC004pG004pA004 | | 004pU004pG004pU004pU007pA0 | |
| | | pU004pG004pC004pA004pU004 | | 04pU007pU004pG004pU004pC00 | |
| | | pA004pA004 | | 4pA004p001G004p001A004 | |
| 420 | 357 | U004p001C004p001C004pA004 | 826 | U004p001A007p001C004pG004p | 1067 |
| | | pG004pU004pU007pC004pC007 | | U004pA007pA004pA004pU004pU | |
| | | pA007pG007pA004pA004pU004 | | 004pC004pU004pG004pG007pA0 | |
| | | pU004pU004pA004pC004pG004 | | 04pA007pC004pU004pG004pG00 | |
| | | pU004pA004 | | 4pA004p001A004p001G004 | |
| 421 | 360 | A004p001G004p001U004pU004 | 827 | U004p001U007p001U004pG004p | 1068 |
| | | pC004pC004pA007pG004pA007 | | A004pC007pG004pU004pA004pA | |
| | | pA007pU007pU004pU004pA004 | | 004pA004pU004pU004pC007pU0 | |
| | | pc004pG004pU004pC004pA004 | | 04pG007pG004pA004pA004pC00 | |
| | | pA004pA004 | | 4pU004p001G004p001G004 | |
| 422 | 362 | U004p001U004p001C004pC004 | 828 | A004p001A007p001G004pU004p | 1069 |
| | | pA004pG004pA007pA004pU007 | | U004pG007pA004pC004pG004pU | |
| | | pU007pU007pA004pC004pG004 | | 004pA004pA004pA004pU007pU0 | |
| | | pU004pC004pA004pA004pC004 | | 04pC007pU004pG004pG004pA00 | |
| | | pU004pU004 | | 4pA004p001C004p001U004 | |
| 423 | 364 | C004p001C004p001A004pG004 | 829 | U004p001C007p001A004pA004p | 1070 |
| | | pA004pA004pU007pU004pU007 | | G004pU007pU004pG004pA004pC | |
| | | pA007pC007pG004pU004pC004 | | 004pG004pU004pA004pA007pA0 | |
| | | pA004pA004pC004pU004pU004 | | 04pU007pU004pC004pU004pG00 | |
| | | pG004pA004 | | 4pG004p001A004p001A004 | |
| 424 | 366 | A004p001G004p001A004pA004 | 830 | A004p001U007p001C004pC004p | 1071 |
| | | pU004pU004pU007pA004pC007 | | A004pA007pG004pU004pU004pG | |
| | | pG007pU007pC004pA004pA004 | | 004pA004pC004pG004pU007pA0 | |
| | | pC004pU004pU004pG004pG004 | | 04pA007pA004pU004pU004pC00 | |
| | | pA004pU004 | | 4pU004p001G004p001G004 | |
| 425 | 370 | U004p001U004p001U004pA004 | 831 | U004p001U007p001U004pG004p | 1072 |
| | | pC004pG004pU007pC004pA007 | | A004pU007pC004pC004pA004pA | |
| | | pA007pC007pU004pU004pG004 | | 004pG004pU004pU004pG007pA0 | |
| | | pG004pA004pU004pC004pA004 | | 04pC007pG004pU004pA004pA00 | |
| | | pA004pA004 | | 4pA004p001U004p001U004 | |
| 426 | 371 | U004p001U004p001A004pC004 | 832 | U004p001U007p001U004pU004p | 1073 |
| | | pG004pU004pC007pA004pA007 | | G004pA007pU004pC004pC004pA | |
| | | pC007pU007pU004pG004pG004 | | 004pA004pG004pU004pU007pG0 | |
| | | pA004pU004pC004pA004pA004 | | 04pA007pC004pG004pU004pA00 | |
| | | pA004pA004 | | 4pA004p001A004p001U004 | |
| 427 | 434 | U004p001U004p001U004pG004 | 833 | U004p001A007p001C004pA004p | 1074 |
| | | pU004pA004pU007pU004pC007 | | A004pC007pU004pG004pU004pA | |
| | | pA007pG007pU004pA004pC004 | | 004pC004pU004pG004pA007pA0 | |
| | | pA004pG004pU004pU004pG004 | | 04pU007pA004pC004pA004pA00 | |
| | | pU004pA004 | | 4pA004p001A004p001C004 | |
| 428 | 439 | A004p001U004p001U004pC004 | 834 | U004p001G007p001A004pA004p | 1075 |
| | | pA004pG004pU007pA004pC007 | | U004pG007pA004pC004pA004pA | |
| | | pA007pG007pU004pU004pG004 | | 004pC004pU004pG004pU007pA0 | |
| | | pU004pC004pA004pU004pU004 | | 04pC007pU004pG004pA004pA00 | |
| | | pC004pA004 | | 4pU004p001A004p001C004 | |
| 429 | 451 | U004p001G004p001U004pC004 | 835 | U004p001U007p001G004pU004p | 1076 |
| | | pA004pU004pU007pC004pA007 | | C004pU007pA004pA004pG004pA | |
| | | pC007pU007pU004pC004pU004 | | 004pA004pG004pU004pG007pA0 | |
| | | pU004pA004pG004pA004pC004 | | 04pA007pU004pG004pA004pC00 | |
| | | pA004pA004 | | 4pA004p001A004p001C004 | |
| 430 | 461 | U004p001U004p001C004pU004 | 836 | U004p001G007p001U004pC004p | 1077 |
| | | pU004pA004pG007pA004pC007 | | A004pA007pU004pU004pC004pU | |
| | | pA007pA007pA004pG004pA004 | | 004pU004pU004pG004pU007pC0 | |
| | | pA004pU004pU004pG004pA004 | | 04pU007pA004pA004pG004pA00 | |
| | | pC004pA004 | | 4pA004p001G004p001U004 | |
| 431 | 543 | U004p001A004p001G004pC004 | 837 | A004p001A007p001C004pU004p | 1078 |
| | | pA004pA004pA007pG004pU007 | | G004pA007pG004pG004pG004pC | |
| | | pU007pU007pG004pC004pC004 | | 004pA004pA004pA004pC007pU0 | |
| | | pC004pU004pC004pA004pG004 | | 04pU007pU004pG004pC004pU00 | |
| | | pU004pU004 | | 4pA004p001A004p001U004 | |
| 432 | 561 | G004p001U004p001U004pC004 | 838 | U004p001U007p001U004pC004p | 1079 |
| | | pC004pA004pA007pC004pU007 | | A004pU007pC004pC004pU004pG | |
| | | pC007pA007pC004pA004pG004 | | 004pU004pG004pA004pG007pU0 | |
| | | pG004pA004pU004pG004pA004 | | 04pU007pG004pG004pA004pA00 | |
| | | pA004pA004 | | 4pC004p001U004p001G004 | |
| 433 | 587 | G004p001A004p001A004pA004 | 839 | U004p001A007p001U004pU004p | 1080 |
| | | pA004pU004pA007pU004pU007 | | C004pC007pA004pC004pG004pA | |
| | | pG007pC007pU004pC004pG004 | | 004pG004pC004pA004pA007pU0 | |
| | | pU004pG004pG004pA004pA004 | | 04pA007pU004pU004pU004pU00 | |
| | | pU004pA004 | | 4pC004p001C004p001C004 | |
| 434 | 588 | A004p001A004p001A004pA004 | 840 | U004p001C007p001A004pU004p | 1081 |
| | | pU004pA004pU007pU004pG007 | | U004pC007pC004pA004pC004pG | |
| | | pC007pU007pC004pG004pU004 | | 004pA004pG004pC004pA007pA0 | |
| | | pG004pG004pA004pA004pU004 | | 04pU007pA004pU004pU004pU00 | |
| | | pG004pA004 | | 4pU004p001C004p001C004 | |
| 435 | 589 | A004p001A004p001A004pU004 | 841 | U004p001C007p001C004pA004p | 1082 |
| | | pA004pU004pU007pG004pC007 | | U004pU007pC004pC004pA004pC | |
| | | pU007pC007pG004pU004pG004 | | 004pG004pA004pG004pC007pA0 | |
| | | pG004pA004pA004pU004pG004 | | 04pA007pU004pA004pU004pU00 | |
| | | pG004pA004 | | 4pU004p001U004p001C004 | |
| 436 | 590 | A004p001A004p001U004pA004 | 842 | U004p001G007p001C004pC004p | 1083 |
| | | pU004pU004pG007pC004pU007 | | A004pU007pU004pC004pC004pA | |
| | | pC007pG007pU004pG004pG004 | | 004pC004pG004pA004pG007pC0 | |
| | | pA004pA004pU004pG004pG004 | | 04pA007pA004pU004pA004pU00 | |
| | | pC004pA004 | | 4pU004p001U004p001U004 | |
| 437 | 593 | A004p001U004p001U004pG004 | 843 | A004p001A007p001U004pU004p | 1084 |
| | | pC004pU004pC007pG004pU007 | | G004pC007pC004pA004pU004pU | |
| | | pG007pG007pA004pA004pU004 | | 004pC004pC004pA004pC007pG0 | |
| | | pG004pG004pC004pA004pA004 | | 04pA007pG004pC004pA004pA00 | |
| | | pU004pU004 | | 4pU004p001A004p001U004 | |
| 438 | 595 | U004p001G004p001C004pU004 | 844 | A004p001A007p001A004pA004p | 1085 |
| | | pC004pG004pU007pG004pG007 | | U004pU007pG004pC004pC004pA | |
| | | pA007pA007pU004pG004pG004 | | 004pU004pU004pC004pC007pA0 | |
| | | pC004pA004pA004pU004pU004 | | 04pC007pG004pA004pG004pC00 | |
| | | pU004pU004 | | 4pA004p001A004p001U004 | |
| 439 | 600 | G004p001U004p001G004pG004 | 845 | U004p001A007p001C004pC004p | 1086 |
| | | pA004pA004pU007pG004pG007 | | U004pA007pA004pA004pA004pU | |
| | | pC007pA007pA004pU004pU004 | | 004pU004pG004pC004pC007pA0 | |
| | | pU004pU004pA004pG004pG004 | | 04pU007pU004pC004pC004pA00 | |
| | | pU004pA004 | | 4pC004p001G004p001A004 | |
| 440 | 620 | C004p001C004p001U004pA004 | 846 | A004p001G007p001C004pA004p | 1087 |
| | | pc004pG004pU007pU004pU007 | | U004pC007pG004pA004pG004pG | |
| | | pA007pC007pC004pC004pU004 | | 004pG004pU004pA004pA007pA0 | |
| | | pC004pG004pA004pU004pG004 | | 04pC007pG004pU004pA004pG00 | |
| | | pC004pU004 | | 4pG004p001A004p001C004 | |
| 441 | 621 | C004p001U004p001A004pC004 | 847 | U004p001A007p001G004pC004p | 1088 |
| | | pG004pU004pU007pU004pA007 | | A004pU007pC004pG004pA004pG | |
| | | pC007pC007pC004pU004pC004 | | 004pG004pG004pU004pA007pA0 | |
| | | pG004pA004pU004pG004pC004 | | 04pA007pC004pG004pU004pA00 | |
| | | pU004pA004 | | 4pG004p001G004p001A004 | |
| 442 | 641 | C004p001U004p001U004pG004 | 848 | A004p001A007p001U004pC004p | 1089 |
| | | pU004pU004pG007pA004pA007 | | A004pC007pA004pA004pG004pA | |
| | | pU007pG007pU004pC004pU004 | | 004pC004pA004pU004pU007pC0 | |
| | | pU004pG004pU004pG004pA004 | | 04pA007pA004pC004pA004pA00 | |
| | | pU004pU004 | | 4pG004p001A004p001G004 | |
| 443 | 644 | G004p001U004p001U004pG004 | 849 | U004p001C007p001C004pA004p | 1090 |
| | | pA004pA004pU007pG004pU007 | | A004pU007pC004pA004pC004pA | |
| | | pc007pU007pU004pG004pU004 | | 004pA004pG004pA004pC007pA0 | |
| | | pG004pA004pU004pU004pG004 | | 04pU007pU004pC004pA004pA00 | |
| | | pG004pA004 | | 4pC004p001A004p001A004 | |
| 444 | 683 | G004p001U004p001A004pC004 | 850 | U004p001A007p001U004pA004p | 1091 |
| | | pG004pU004pC007pA004pG007 | | A004pU007pU004pU004pC004pA | |
| | | pC007pU007pU004pG004pA004 | | 004pA004pG004pC004pU007pG0 | |
| | | pA004pA004pU004pU004pA004 | | 04pA007pC004pG004pU004pA00 | |
| | | pU004pA004 | | 4pC004p001C004p001C004 | |
| 445 | 688 | U004p001C004p001A004pG004 | 851 | U004p001A007p001G004pC004p | 1092 |
| | | pC004pU004pU007pG004pA007 | | A004pC007pA004pU004pA004pA | |
| | | pA007pA007pU004pU004pA004 | | 004pU004pU004pU004pC007pA0 | |
| | | pU004pG004pU004pG004pC004 | | 04pA007pG004pC004pU004pG00 | |
| | | pU004pA004 | | 4pA004p001C004p001G004 | |
| 446 | 697 | A004p001A004p001U004pU004 | 852 | U004p001A007p001G004pC004p | 1093 |
| | | pA004pU004pG007pU004pG007 | | C004pA007pA004pA004pG004pC | |
| | | pC007pU007pG004pC004pU004 | | 004pA004pG004pC004pA007pC0 | |
| | | pU004pU004pG004pG004pC004 | | 04pA007pU004pA004pA004pU00 | |
| | | pU004pA004 | | 4pU004p001U004p001C004 | |
| 447 | 710 | U004p001U004p001U004pG004 | 853 | A004p001A007p001G004pA004p | 1094 |
| | | pG004pC004pU007pG004pC007 | | A004pC007pU004pG004pA004pC | |
| | | pA007pU007pG004pU004pC004 | | 004pA004pU004pG004pC007pA0 | |
| | | pA004pG004pU004pU004pC004 | | 04pG007pC004pC004pA004pA00 | |
| | | pU004pU004 | | 4pA004p001G004p001C004 | |
| 448 | 729 | U004p001U004p001G004pC004 | 854 | U004p001G007p001A004pA004p | 1095 |
| | | pC004pA004pA007pC004pU007 | | C004pA007pC004pG004pA004pA | |
| | | pA007pC007pU004pU004pC004 | | 004pG004pU004pA004pG007pU0 | |
| | | pG004pU004pG004pU004pU004 | | 04pU007pG004pG004pC004pA00 | |
| | | pC004pA004 | | 4pA004p001G004p001A004 | |
| 449 | 730 | U004p001G004p001C004pC004 | 855 | A004p001U007p001G004pA004p | 1096 |
| | | pA004pA004pC007pU004pA007 | | A004pC007pA004pC004pG004pA | |
| | | pC007pU007pU004pC004pG004 | | 004pA004pG004pU004pA007pG0 | |
| | | pU004pG004pU004pU004pC004 | | 04pU007pU004pG004pG004pC00 | |
| | | pA004pU004 | | 4pA004p001A004p001G004 | |
| 450 | 734 | A004p001A004p001C004pU004 | 856 | A004p001G007p001U004pC004p | 1097 |
| | | pA004pC004pU007pU004pC007 | | A004pU007pG004pA004pA004pC | |
| | | pG007pU007pG004pU004pU004 | | 004pA004pC004pG004pA007pA0 | |
| | | pC004pA004pU004pG004pA004 | | 04pG007pU004pA004pG004pU00 | |
| | | pC004pU004 | | 4pU004p001G004p001G004 | |
| 451 | 738 | A004p001C004p001U004pU004 | 857 | A004p001G007p001A004pA004p | 1098 |
| | | pC004pG004pU007pG004pU007 | | A004pG007pU004pC004pA004pU | |
| | | pU007pC007pA004pU004pG004 | | 004pG004pA004pA004pC007pA0 | |
| | | pA004pC004pU004pU004pU004 | | 04pC007pG004pA004pA004pG00 | |
| | | pC004pU004 | | 4pU004p001A004p001G004 | |
| 452 | 739 | C004p001U004p001U004pC004 | 858 | A004p001A007p001G004pA004p | 1099 |
| | | pG004pU004pG007pU004pU007 | | A004pA007pG004pU004pC004pA | |
| | | pC007pA007pU004pG004pA004 | | 004pU004pG004pA004pA007pC0 | |
| | | pC004pU004pU004pU004pC004 | | 04pA007pC004pG004pA004pA00 | |
| | | pU004pU004 | | 4pG004p001U004p001A004 | |
| 453 | 902 | A004p001U004p001G004pU004 | 859 | A004p001A007p001G004pA004p | 1100 |
| | | pC004pU004pC007pU004pA007 | | A004pC007pC004pA004pA004pG | |
| | | pG007pG007pC004pU004pU004 | | 004pC004pC004pU004pA007pG0 | |
| | | pG004pG004pU004pU004pC004 | | 04pA007pG004pA004pC004pA00 | |
| | | pU004pU004 | | 4pU004p001A004p001A004 | |
| 454 | 909 | U004p001A004p001G004pG004 | 860 | U004p001A007p001U004pG004p | 1101 |
| | | pC004pU004pU007pG004pG007 | | A004pA007pC004pA004pA004pG | |
| | | pU007pU007pC004pU004pU004 | | 004pA004pA004pC004pC007pA0 | |
| | | pG004pU004pU004pC004pA004 | | 04pA007pG004pC004pC004pU00 | |
| | | pU004pA004 | | 4pA004p001G004p001A004 | |
| 455 | 919 | U004p001C004p001U004pU004 | 861 | U004p001G007p001A004pC004p | 1102 |
| | | pG004pU004pU007pC004pA007 | | U004pG007pU004pG004pA004pG | |
| | | pU007pG007pC004pU004pC004 | | 004pC004pA004pU004pG007pA0 | |
| | | pA004pC004pA004pG004pU004 | | 04pA007pC004pA004pA004pG00 | |
| | | pC004pA004 | | 4pA004p001A004p001C004 | |
| 456 | 927 | A004p001U004p001G004pC004 | 862 | U004p001U007p001A004pU004p | 1103 |
| | | pU004pC004pA007pC004pA007 | | C004pC007pA004pG004pC004pG | |
| | | pG007pU007pC004pG004pC004 | | 004pA004pC004pU004pG007pU0 | |
| | | pU004pG004pG004pA004pU004 | | 04pG007pA004pG004pC004pA00 | |
| | | pA004pA004 | | 4pU004p001G004p001A004 | |
| 457 | 928 | U004p001G004p001C004pU004 | 863 | U004p001C007p001U004pA004p | 1104 |
| | | pC004pA004pC007pA004pG007 | | U004pC007pC004pA004pG004pC | |
| | | pU007pC007pG004pC004pU004 | | 004pG004pA004pC004pU007pG0 | |
| | | pG004pG004pA004pU004pA004 | | 04pU007pG004pA004pG004pC00 | |
| | | pG004pA004 | | 4pA004p001U004p001G004 | |
| 458 | 932 | C004p001A004p001C004pA004 | 864 | A004p001U007p001C004pA004p | 1105 |
| | | pG004pU004pC007pG004pC007 | | G004pC007pU004pA004pU004pC | |
| | | pU007pG007pG004pA004pU004 | | 004pC004pA004pG004pC007pG0 | |
| | | pA004pG004pC004pU004pG004 | | 04pA007pC004pU004pG004pU00 | |
| | | pA004pU004 | | 4pG004p001A004p001G004 | |
| 459 | 935 | A004p001G004p001U004pC004 | 865 | A004p001G007p001G004pA004p | 1106 |
| | | pG004pC004pU007pG004pG007 | | U004pC007pA004pG004pC004pU | |
| | | pA007pU007pA004pG004pC004 | | 004pA004pU004pC004pC007pA0 | |
| | | pU004pG004pA004pU004pC004 | | 04pG007pC004pG004pA004pC00 | |
| | | pC004pU004 | | 4pU004p001G004p001U004 | |
| 460 | 954 | C004p001U004p001U004pC004 | 866 | U004p001U007p001G004pU004p | 1107 |
| | | pU004pC004pC007pU004pC007 | | A004pC007pU004pG004pU004pU | |
| | | pA007pA007pA004pA004pC004 | | 004pU004pU004pG004pA007pG0 | |
| | | pA004pG004pU004pA004pC004 | | 04pG007pA004pG004pA004pA00 | |
| | | pA004pA004 | | 4pG004p001G004p001A004 | |
| 461 | 957 | C004p001U004p001C004pC004 | 867 | U004p001U007p001G004pC004p | 1108 |
| | | pU004pC004pA007pA004pA007 | | U004pG007pU004pA004pC004pU | |
| | | pA007pC007pA004pG004pU004 | | 004pG004pU004pU004pU007pU0 | |
| | | pA004pC004pA004pG004pC004 | | 04pG007pA004pG004pG004pA00 | |
| | | pA004pA004 | | 4pG004p001A004p001A004 | |
| 462 | 966 | A004p001C004p001A004pG004 | 868 | U004p001A007p001G004pA004p | 1109 |
| | | pU004pA004pC007pA004pG007 | | A004pG007pU004pA004pU004pC | |
| | | pC007pA007pG004pA004pU004 | | 004pU004pG004pC004pU007pG0 | |
| | | pA004pC004pU004pU004pC004 | | 04pU007pA004pC004pU004pG00 | |
| | | pU004pA004 | | 4pU004p001U004p001U004 | |
| 463 | 967 | C004p001A004p001G004pU004 | 869 | U004p001U007p001A004pG004p | 1110 |
| | | pA004pC004pA007pG004pC007 | | A004pA007pG004pU004pA004pU | |
| | | pA007pG007pA004pU004pA004 | | 004pC004pU004pG004pC007pU0 | |
| | | pC004pU004pU004pC004pU004 | | 04pG007pU004pA004pC004pU00 | |
| | | pA004pA004 | | 4pG004p001U004p001U004 | |
| 464 | 968 | A004p001G004p001U004pA004 | 870 | U004p001U007p001U004pA004p | 1111 |
| | | pC004pA004pG007pC004pA007 | | G004pA007pA004pG004pU004pA | |
| | | pG007pA007pU004pA004pC004 | | 004pU004pC004pU004pG007pC0 | |
| | | pU004pU004pC004pU004pA004 | | 04pU007pG004pU004pA004pC00 | |
| | | pA004pA004 | | 4pU004p001G004p001U004 | |
| 465 | 972 | C004p001A004p001G004pC004 | 871 | A004p001A007p001A004pC004p | 1112 |
| | | pA004pG004pA007pU004pA007 | | C004pU007pU004pA004pG004pA | |
| | | pC007pU007pU004pC004pU004 | | 004pA004pG004pU004pA007pU0 | |
| | | pA004pA004pG004pG004pU004 | | 04pC007pU004pG004pC004pU00 | |
| | | pU004pU004 | | 4pG004p001U004p001A004 | |
| 466 | 1083 | U004p001U004p001G004pA004 | 872 | U004p001U007p001A004pG004p | 1113 |
| | | pA004pC004pA007pA004pG007 | | G004pG007pU004pA004pA004pU | |
| | | pU007pU007pA004pU004pU004 | | 004pA004pA004pC004pU007pU0 | |
| | | pA004pC004pC004pC004pU004 | | 04pG007pU004pU004pC004pA00 | |
| | | pA004pA004 | | 4pA004p001U004p001A004 | |
| 467 | 1085 | G004p001A004p001A004pC004 | 873 | A004p001C007p001U004pU004p | 1114 |
| | | pA004pA004pG007pU004pU007 | | A004pG007pG004pG004pU004pA | |
| | | pA007pU007pU004pA004pC004 | | 004pA004pU004pA004pA007pC0 | |
| | | pC004pC004pU004pA004pA004 | | 04pU007pU004pG004pU004pU00 | |
| | | pG004pU004 | | 4pC004p001A004p001A004 | |
| 468 | 1087 | A004p001C004p001A004pA004 | 874 | A004p001A007p001A004pC004p | 1115 |
| | | pG004pU004pU007pA004pU007 | | U004pU007pA004pG004pG004pG | |
| | | pU007pA007pC004pC004pC004 | | 004pU004pA004pA004pU007pA0 | |
| | | pU004pA004pA004pG004pU004 | | 04pA007pC004pU004pU004pG00 | |
| | | pU004pU004 | | 4pU004p001U004p001C004 | |
| 469 | 1088 | C004p001A004p001A004pG004 | 875 | U004p001A007p001A004pA004p | 1116 |
| | | pU004pU004pA007pU004pU007 | | C004pU007pU004pA004pG004pG | |
| | | pA007pC007pC004pC004pU004 | | 004pG004pU004pA004pA007pU0 | |
| | | pA004pA004pG004pU004pU004 | | 04pA007pA004pC004pU004pU00 | |
| | | pU004pA004 | | 4pG004p001U004p001U004 | |
| 470 | 1090 | A004p001G004p001U004pU004 | 876 | U004p001C007p001U004pA004p | 1117 |
| | | pA004pU004pU007pA004pC007 | | A004pA007pC004pU004pU004pA | |
| | | pC007pC007pU004pA004pA004 | | 004pG004pG004pG004pU007pA0 | |
| | | pG004pU004pU004pU004pA004 | | 04pA007pU004pA004pA004pC00 | |
| | | pG004pA004 | | 4pU004p001U004p001G004 | |
| 471 | 1112 | C004p001U004p001C004pC004 | 877 | U004p001U007p001A004pC004p | 1118 |
| | | pU004pU004pC007pU004pG007 | | U004pU007pG004pA004pC004pA | |
| | | pG007pC007pU004pG004pU004 | | 004pG004pC004pC004pA007pG0 | |
| | | pC004pA004pA004pG004pU004 | | 04pA007pA004pG004pG004pA00 | |
| | | pA004pA004 | | 4pG004p001A004p001G004 | |
| 472 | 1172 | U004p001U004p001A004pA004 | 878 | A004p001G007p001A004pU004p | 1119 |
| | | pA004pA004pA007pA004pC007 | | G004pU007pG004pA004pU004pA | |
| | | pC007pC007pU004pA004pU004 | | 004pG004pG004pG004pU007pU0 | |
| | | pC004pA004pC004pA004pU004 | | 04pU007pU004pU004pU004pA00 | |
| | | pC004pU004 | | 4pA004p001U004p001G004 | |
| 473 | 1181 | C004p001C004p001U004pA004 | 879 | U004p001A007p001C004pU004p | 1120 |
| | | pU004pC004pA007pC004pA007 | | A004pC007pA004pG004pG004pA | |
| | | pU007pC007pU004pC004pC004 | | 004pG004pA004pU004pG007pU0 | |
| | | pU004pG004pU004pA004pG004 | | 04pG007pA004pU004pA004pG00 | |
| | | pU004pA004 | | 4pG004p001G004p001U004 | |
| 474 | 1183 | U004p001A004p001U004pC004 | 880 | U004p001U007p001C004pA004p | 1121 |
| | | pA004pC004pA007pU004pC007 | | C004pU007pA004pC004pA004pG | |
| | | pU007pC007pC004pU004pG004 | | 004pG004pA004pG004pA007pU0 | |
| | | pU004pA004pG004pU004pG004 | | 04pG007pU004pG004pA004pU00 | |
| | | pA004pA004 | | 4pA004p001G004p001G004 | |
| 475 | 1224 | A004p001U004p001U004pG004 | 881 | U004p001A007p001G004pG004p | 1122 |
| | | pU004pU004pG007pU004pA007 | | U004pU007pC004pA004pC004pG | |
| | | pG007pA007pC004pG004pU004 | | 004pU004pC004pU004pA007pC0 | |
| | | pG004pA004pA004pC004pC004 | | 04pA007pA004pC004pA004pA00 | |
| | | pU004pA004 | | 4pU004p001U004p001G004 | |
| 476 | 1283 | G004p001A004p001A004pG004 | 882 | U004p001C007p001G004pG004p | 1123 |
| | | pA004pG004pA007pC004pA007 | | U004pU007pU004pA004pU004pC | |
| | | pG007pG007pG004pA004pU004 | | 004pC004pC004pU004pG007pU0 | |
| | | pA004pA004pA004pC004pC004 | | 04pC007pU004pC004pU004pU00 | |
| | | pG004pA004 | | 4pC004p001C004p001U004 | |
| 477 | 1284 | A004p001A004p001G004pA004 | 883 | U004p001U007p001C004pG004p | 1124 |
| | | pG004pA004pC007pA004pG007 | | G004pU007pU004pU004pA004pU | |
| | | pG007pG007pA004pU004pA004 | | 004pC004pC004pC004pU007pG0 | |
| | | pA004pA004pC004pC004pG004 | | 04pU007pC004pU004pC004pU00 | |
| | | pA004pA004 | | 4pU004p001C004p001C004 | |
| 478 | 1287 | A004p001G004p001A004pC004 | 884 | U004p001U007p001U004pC004p | 1125 |
| | | pA004pG004pG007pG004pA007 | | U004pC007pG004pG004pU004pU | |
| | | pU007pA007pA004pA004pC004 | | 004pU004pA004pU004pC007pC0 | |
| | | pC004pG004pA004pG004pA004 | | 04pC007pU004pG004pU004pC00 | |
| | | pA004pA004 | | 4pU004p001C004p001U004 | |
| 479 | 1288 | G004p001A004p001C004pA004 | 885 | U004p001U007p001U004pU004p | 1126 |
| | | pG004pG004pG007pA004pU007 | | C004pU007pC004pG004pG004pU | |
| | | pA007pA007pA004pC004pC004 | | 004pU004pU004pA004pU007pC0 | |
| | | pG004pA004pG004pA004pA004 | | 04pC007pC004pU004pG004pU00 | |
| | | pA004pA004 | | 4pC004p001U004p001C004 | |
| 480 | 1291 | A004p001G004p001G004pG004 | 886 | U004p001U007p001U004pC004p | 1127 |
| | | pA004pU004pA007pA004pA007 | | U004pU007pU004pC004pU004pC | |
| | | pC007pC007pG004pA004pG004 | | 004pG004pG004pU004pU007pU0 | |
| | | pA004pA004pA004pG004pA004 | | 04pA007pU004pC004pC004pC00 | |
| | | pA004pA004 | | 4pU004p001G004p001U004 | |
| 481 | 1297 | A004p001A004p001A004pC004 | 887 | U004p001C007p001A004pA004p | 1128 |
| | | pC004pG004pA007pG004pA007 | | C004pU007pU004pU004pU004pC | |
| | | pA007pA007pG004pA004pA004 | | 004pU004pU004pU004pC007pU0 | |
| | | pA004pA004pG004pU004pU004 | | 04pC007pG004pG004pU004pU00 | |
| | | pG004pA004 | | 4pU004p001A004p001U004 | |
| 482 | 1313 | G004p001U004p001U004pG004 | 888 | U004p001A007p001A004pG004p | 1129 |
| | | pA004pG004pG007pU004pU007 | | G004pG007pU004pU004pU004pU | |
| | | pA007pU007pA004pA004pA004 | | 004pA004pU004pA004pA007pC0 | |
| | | pA004pC004pC004pC004pU004 | | 04pC007pU004pC004pA004pA00 | |
| | | pU004pA004 | | 4pC004p001U004p001U004 | |
| 483 | 1318 | G004p001G004p001U004pU004 | 889 | U004p001C007p001C004pA004p | 1130 |
| | | pA004pU004pA007pA004pA007 | | C004pU007pA004pA004pG004pG | |
| | | pA007pC007pC004pC004pU004 | | 004pG004pU004pU004pU007pU0 | |
| | | pU004pA004pG004pU004pG004 | | 04pA007pU004pA004pA004pC00 | |
| | | pG004pA004 | | 4pC004p001U004p001C004 | |
| 484 | 1326 | A004p001A004p001C004pC004 | 890 | U004p001U007p001G004pU004p | 1131 |
| | | pC004pU004pU007pA004pG007 | | U004pU007pC004pA004pG004pC | |
| | | pU007pG007pG004pC004pU004 | | 004pC004pA004pC004pU007pA0 | |
| | | pG004pA004pA004pA004pC004 | | 04pA007pG004pG004pG004pU00 | |
| | | pA004pA004 | | 4pU004p001U004p001U004 | |
| 485 | 1327 | A004p001C004p001C004pC004 | 891 | U004p001C007p001U004pG004p | 1132 |
| | | pU004pU004pA007pG004pU007 | | U004pU007pU004pC004pA004pG | |
| | | pG007pG007pC004pU004pG004 | | 004pC004pC004pA004pC007pU0 | |
| | | pA004pA004pA004pC004pA004 | | 04pA007pA004pG004pG004pG00 | |
| | | pG004pA004 | | 4pU004p001U004p001U004 | |
| 486 | 1328 | C004p001C004p001C004pU004 | 892 | A004p001U007p001C004pU004p | 1133 |
| | | pU004pA004pG007pU004pG007 | | G004pU007pU004pU004pC004pA | |
| | | pG007pC007pU004pG004pA004 | | 004pG004pC004pC004pA007pC0 | |
| | | pA004pA004pC004pA004pG004 | | 04pU007pA004pA004pG004pG00 | |
| | | pA004pU004 | | 4pG004p001U004p001U004 | |
| 487 | 1329 | C004p001C004p001U004pU004 | 893 | U004p001A007p001U004pC004p | 1134 |
| | | pA004pG004pU007pG004pG007 | | U004pG007pU004pU004pU004pC | |
| | | pC007pU007pG004pA004pA004 | | 004pA004pG004pC004pC007pA0 | |
| | | pA004pC004pA004pG004pA004 | | 04pC007pU004pA004pA004pG00 | |
| | | pU004pA004 | | 4pG004p001G004p001U004 | |
| 488 | 1357 | C004p001A004p001G004pA004 | 894 | U004p001C007p001A004pA004p | 1135 |
| | | pG004pC004pU007pA004pC007 | | C004pC007pA004pC004pA004pA | |
| | | pA007pU007pU004pU004pG004 | | 004pA004pU004pG004pU007pA0 | |
| | | pU004pG004pG004pU004pU004 | | 04pG007pC004pU004pC004pU00 | |
| | | pG004pA004 | | 4pG004p001U004p001U004 | |
| 489 | 1380 | A004p001C004p001U004pC004 | 895 | A004p001A007p001G004pU004p | 1136 |
| | | pC004pU004pC007pC004pU007 | | A004pU007pC004pG004pA004pG | |
| | | pU007pA007pC004pU004pC004 | | 004pU004pA004pA004pG007pG0 | |
| | | pG004pA004pU004pA004pC004 | | 04pA007pG004pG004pA004pG00 | |
| | | pU004pU004 | | 4pU004p001U004p001A004 | |
| 490 | 1381 | C004p001U004p001C004pC004 | 896 | U004p001A007p001A004pG004p | 1137 |
| | | pU004pC004pC007pU004pU007 | | U004pA007pU004pC004pG004pA | |
| | | pA007pC007pU004pC004pG004 | | 004pG004pU004pA004pA007pG0 | |
| | | pA004pU004pA004pC004pU004 | | 04pG007pA004pG004pG004pA00 | |
| | | pU004pA004 | | 4pG004p001U004p001U004 | |
| 491 | 1410 | U004p001G004p001G004pU004 | 897 | U004p001U007p001U004pC004p | 1138 |
| | | pG004pA004pC007pA004pC007 | | A004pG007pG004pU004pU004pC | |
| | | pA007pG007pG004pA004pA004 | | 004pC004pU004pG004pU007pG0 | |
| | | pC004pC004pU004pG004pA004 | | 04pU007pC004pA004pC004pC00 | |
| | | pA004pA004 | | 4pA004p001G004p001U004 | |
| 492 | 1494 | A004p001A004p001G004pG004 | 898 | U004p001A007p001C004pU004p | 1139 |
| | | pU004pG004pC007pA004pA007 | | A004pA007pG004pG004pA004pA | |
| | | pA007pA007pU004pU004pC004 | | 004pU004pU004pU004pU007pG0 | |
| | | pc004pU004pU004pA004pG004 | | 04pC007pA004pC004pC004pU00 | |
| | | pU004pA004 | | 4pU004p001U004p001C004 | |
| 493 | 1505 | U004p001U004p001C004pC004 | 899 | U004p001A007p001U004pC004p | 1140 |
| | | pU004pU004pA007pG004pU007 | | U004pC007pA004pG004pC004pA | |
| | | pG007pA007pU004pG004pC004 | | 004pU004pC004pA004pC007pU0 | |
| | | pU004pG004pA004pG004pA004 | | 04pA007pA004pG004pG004pA00 | |
| | | pU004pA004 | | 4pA004p001U004p001U004 | |
| 494 | 1516 | U004p001G004p001C004pU004 | 900 | A004p001C007p001U004pA004p | 1141 |
| | | pG004pA004pG007pA004pU007 | | A004pC007pU004pG004pG004pA | |
| | | pC007pA007pU004pC004pC004 | | 004pU004pG004pA004pU007pC0 | |
| | | pA004pG004pU004pU004pA004 | | 04pU007pC004pA004pG004pC00 | |
| | | pG004pU004 | | 4pA004p001U004p001C004 | |
| 495 | 1516 | U004p001G004p001C004pU004 | 901 | A004p001C007p001U004pA004p | 1142 |
| | | pG004pA004pG007pA004pU007 | | A004pC007pU004pG004pG004pA | |
| | | pC007pA007pU004pC004pC004 | | 004pU004pG004pA004pU007pC0 | |
| | | pA004pG004pU004pU004pA004 | | 04pU007pC004pA004pG004pC00 | |
| | | pG004pU004 | | 4pA004p001U004p001C004 | |
| 496 | 1519 | U004p001G004p001A004pG004 | 902 | U004p001U007p001G004pA004p | 1143 |
| | | pA004pU004pC007pA004pU007 | | C004pU007pA004pA004pC004pU | |
| | | pC007pC007pA004pG004pU004 | | 004pG004pG004pA004pU007pG0 | |
| | | pU004pA004pG004pU004pC004 | | 04pA007pU004pC004pU004pC00 | |
| | | pA004pA004 | | 4pA004p001G004p001C004 | |
| 497 | 1521 | A004p001G004p001A004pU004 | 903 | U004p001A007p001U004pU004p | 1144 |
| | | pC004pA004pU007pC004pC007 | | G004pA007pC004pU004pA004pA | |
| | | pA007pG007pU004pU004pA004 | | 004pC004pU004pG004pG007pA0 | |
| | | pG004pU004pC004pA004pA004 | | 04pU007pG004pA004pU004pC00 | |
| | | pU004pA004 | | 4pU004p001C004p001A004 | |
| 498 | 1523 | A004p001U004p001C004pA004 | 904 | A004p001G007p001C004pA004p | 1145 |
| | | pU004pC004pC007pA004pG007 | | U004pU007pG004pA004pC004pU | |
| | | pU007pU007pA004pG004pU004 | | 004pA004pA004pC004pU007pG0 | |
| | | pC004pA004pA004pU004pG004 | | 04pG007pA004pU004pG004pA00 | |
| | | pC004pU004 | | 4pU004p001C004p001U004 | |
| 499 | 1527 | U004p001C004p001C004pA004 | 905 | U004p001C007p001U004pU004p | 1146 |
| | | pG004pU004pU007pA004pG007 | | A004pG007pC004pA004pU004pU | |
| | | pU007pC007pA004pA004pU004 | | 004pG004pA004pC004pU007pA0 | |
| | | pG004pC004pU004pA004pA004 | | 04pA007pC004pU004pG004pG00 | |
| | | pG004pA004 | | 4pA004p001U004p001G004 | |
| 500 | 1530 | A004p001G004p001U004pU004 | 906 | U004p001A007p001U004pG004p | 1147 |
| | | pA004pG004pU007pC004pA007 | | C004pU007pU004pA004pG004pC | |
| | | pA007pU007pG004pC004pU004 | | 004pA004pU004pU004pG007pA0 | |
| | | pA004pA004pG004pC004pA004 | | 04pC007pU004pA004pA004pC00 | |
| | | pU004pA004 | | 4pU004p001G004p001G004 | |
| 501 | 1531 | G004p001U004p001U004pA004 | 907 | A004p001U007p001A004pU004p | 1148 |
| | | pG004pU004pC007pA004pA007 | | G004pC007pU004pU004pA004pG | |
| | | pU007pG007pC004pU004pA004 | | 004pC004pA004pU004pU007pG0 | |
| | | pA004pG004pC004pA004pU004 | | 04pA007pC004pU004pA004pA00 | |
| | | pA004pU004 | | 4pC004p001U004p001G004 | |
| 502 | 1532 | U004p001U004p001A004pG004 | 908 | U004p001A007p001U004pA004p | 1149 |
| | | pU004pC004pA007pA004pU007 | | U004pG007pC004pU004pU004pA | |
| | | pG007pC007pU004pA004pA004 | | 004pG004pC004pA004pU007pU0 | |
| | | pG004pC004pA004pU004pA004 | | 04pG007pA004pC004pU004pA00 | |
| | | pU004pA004 | | 4pA004p001C004p001U004 | |
| 503 | 1535 | G004p001U004p001C004pA004 | 909 | U004p001G007p001G004pG004p | 1150 |
| | | pA004pU004pG007pC004pU007 | | A004pU007pA004pU004pG004pC | |
| | | pA007pA007pG004pC004pA004 | | 004pU004pU004pA004pG007pC0 | |
| | | pU004pA004pU004pC004pC004 | | 04pA007pU004pU004pG004pA00 | |
| | | pC004pA004 | | 4pC004p001U004p001A004 | |
| 504 | 1546 | G004p001C004p001A004pU004 | 910 | A004p001A007p001C004pU004p | 1151 |
| | | pA004pU004pC007pC004pC007 | | U004pG007pU004pA004pG004pG | |
| | | pA007pG007pC004pC004pU004 | | 004pC004pU004pG004pG007pG0 | |
| | | pA004pC004pA004pA004pG004 | | 04pA007pU004pA004pU004pG00 | |
| | | pU004pU004 | | 4pC004p001U004p001U004 | |
| 505 | 1547 | C004p001A004p001U004pA004 | 911 | U004p001A007p001A004pC004p | 1152 |
| | | pU004pC004pC007pC004pA007 | | U004pU007pG004pU004pA004pG | |
| | | pG007pC007pC004pU004pA004 | | 004pG004pC004pU004pG007pG0 | |
| | | pC004pA004pA004pG004pU004 | | 04pG007pA004pU004pA004pU00 | |
| | | pU004pA004 | | 4pG004p001C004p001U004 | |
| 506 | 1548 | A004p001U004p001A004pU004 | 912 | U004p001C007p001A004pA004p | 1153 |
| | | pC004pC004pC007pA004pG007 | | C004pU007pU004pG004pU004pA | |
| | | pC007pC007pU004pA004pC004 | | 004pG004pG004pC004pU007pG0 | |
| | | pA004pA004pG004pU004pU004 | | 04pG007pG004pA004pU004pA00 | |
| | | pG004pA004 | | 4pU004p001G004p001C004 | |
| 507 | 1555 | A004p001G004p001C004pC004 | 913 | A004p001G007p001A004pG004p | 1154 |
| | | pU004pA004pC007pA004pA007 | | U004pU007pU004pC004pC004pA | |
| | | pG007pU007pU004pG004pG004 | | 004pA004pC004pU004pU007pG0 | |
| | | pA004pA004pA004pC004pU004 | | 04pU007pA004pG004pG004pC00 | |
| | | pC004pU004 | | 4pU004p001G004p001G004 | |
| 508 | 1561 | C004p001A004p001A004pG004 | 914 | U004p001C007p001C004pA004p | 1155 |
| | | pU004pU004pG007pG004pA007 | | U004pC007pA004pG004pA004pG | |
| | | pA007pA007pC004pU004pC004 | | 004pU004pU004pU004pC007pC0 | |
| | | pU004pG004pA004pU004pG004 | | 04pA007pA004pC004pU004pU00 | |
| | | pG004pA004 | | 4pG004p001U004p001A004 | |
| 509 | 1562 | A004p001A004p001G004pU004 | 915 | U004p001U007p001C004pC004p | 1156 |
| | | pU004pG004pG007pA004pA007 | | A004pU007pC004pA004pG004pA | |
| | | pA007pC007pU004pC004pU004 | | 004pG004pU004pU004pU007pC0 | |
| | | pG004pA004pU004pG004pG004 | | 04pC007pA004pA004pC004pU00 | |
| | | pA004pA004 | | 4pU004p001G004p001U004 | |
| 510 | 1567 | G004p001G004p001A004pA004 | 916 | U004p001G007p001A004pG004p | 1157 |
| | | pA004pC004pU007pC004pU007 | | U004pU007pU004pC004pC004pA | |
| | | pG007pA007pU004pG004pG004 | | 004pU004pC004pA004pG007pA0 | |
| | | pA004pA004pA004pC004pU004 | | 04pG007pU004pU004pU004pC00 | |
| | | pC004pA004 | | 4pC004p001A004p001A004 | |
| 511 | 1580 | G004p001A004p001A004pA004 | 917 | U004p001A007p001C004pA004p | 1158 |
| | | pC004pU004pC007pA004pU007 | | C004pC007pA004pC004pG004pC | |
| | | pG007pA007pG004pC004pG004 | | 004pU004pC004pA004pU007pG0 | |
| | | pU004pG004pG004pU004pG004 | | 04pA007pG004pU004pU004pU00 | |
| | | pU004pA004 | | 4pC004p001C004p001A004 | |
| 512 | 1582 | A004p001A004p001C004pU004 | 918 | U004p001A007p001U004pA004p | 1159 |
| | | pC004pA004pU007pG004pA007 | | C004pA007pC004pC004pA004pC | |
| | | pG007pC007pG004pU004pG004 | | 004pG004pC004pU004pC007pA0 | |
| | | pG004pU004pG004pU004pA004 | | 04pU007pG004pA004pG004pU00 | |
| | | pU004pA004 | | 4pU004p001U004p001C004 | |
| 513 | 1583 | A004p001C004p001U004pC004 | 919 | A004p001G007p001A004pU004p | 1160 |
| | | pA004pU004pG007pA004pG007 | | A004pC007pA004pC004pC004pA | |
| | | pC007pG007pU004pG004pG004 | | 004pC004pG004pC004pU007pC0 | |
| | | pU004pG004pU004pA004pU004 | | 04pA007pU004pG004pA004pG00 | |
| | | pC004pU004 | | 4pU004p001U004p001U004 | |
| 514 | 1585 | U004p001C004p001A004pU004 | 920 | A004p001U007p001A004pG004p | 1161 |
| | | pG004pA004pG007pC004pG007 | | A004pU007pA004pC004pA004pC | |
| | | pU007pG007pG004pU004pG004 | | 004pC004pA004pC004pG007pC0 | |
| | | pU004pA004pU004pC004pU004 | | 04pU007pC004pA004pU004pG00 | |
| | | pA004pU004 | | 4pA004p001G004p001U004 | |
| 515 | 1587 | A004p001U004p001G004pA004 | 921 | U004p001A007p001A004pU004p | 1162 |
| | | pG004pC004pG007pU004pG007 | | A004pG007pA004pU004pA004pC | |
| | | pG007pU007pG004pU004pA004 | | 004pA004pC004pC004pA007pC0 | |
| | | pU004pC004pU004pA004pU004 | | 04pG007pC004pU004pC004pA00 | |
| | | pU004pA004 | | 4pU004p001G004p001A004 | |
| 516 | 1588 | U004p001G004p001A004pG004 | 922 | U004p001G007p001A004pA004p | 1163 |
| | | pC004pG004pU007pG004pG007 | | U004pA007pG004pA004pU004pA | |
| | | pU007pG007pU004pA004pU004 | | 004pC004pA004pC004pC007pA0 | |
| | | pC004pU004pA004pU004pU004 | | 04pC007pG004pC004pU004pC00 | |
| | | pC004pA004 | | 4pA004p001U004p001G004 | |
| 517 | 1589 | G004p001A004p001G004pC004 | 923 | U004p001C007p001G004pA004p | 1164 |
| | | pG004pU004pG007pG004pU007 | | A004pU007pA004pG004pA004pU | |
| | | pG007pU007pA004pU004pC004 | | 004pA004pC004pA004pC007pC0 | |
| | | pU004pA004pU004pU004pC004 | | 04pA007pC004pG004pC004pU00 | |
| | | pG004pA004 | | 4pC004p001A004p001U004 | |
| 518 | 1656 | A004p001C004p001C004pU004 | 924 | U004p001A007p001U004pA004p | 1165 |
| | | pA004pC004pC007pU004pU007 | | A004pU007pC004pC004pC004pU | |
| | | pA007pC007pA004pG004pG004 | | 004pG004pU004pA004pA007pG0 | |
| | | pG004pA004pU004pU004pA004 | | 04pG007pU004pA004pG004pG00 | |
| | | pU004pA004 | | 4pU004p001A004p001C004 | |
| 519 | 1658 | C004p001U004p001A004pC004 | 925 | A004p001U007p001U004pA004p | 1166 |
| | | pC004pU004pU007pA004pC007 | | U004pA007pA004pU004pC004pC | |
| | | pA007pG007pG004pG004pA004 | | 004pC004pU004pG004pU007pA0 | |
| | | pU004pU004pA004pU004pA004 | | 04pA007pG004pG004pU004pA00 | |
| | | pA004pU004 | | 4pG004p001G004p001U004 | |
| 520 | 1664 | U004p001A004p001C004pA004 | 926 | U004p001G007p001A004pG004p | 1167 |
| | | pG004pG004pG007pA004pU007 | | U004pA007pA004pU004pU004pA | |
| | | pU007pA007pU004pA004pA004 | | 004pU004pA004pA004pU007pC0 | |
| | | pU004pU004pA004pC004pU004 | | 04pC007pC004pU004pG004pU00 | |
| | | pC004pA004 | | 4pA004p001A004p001G004 | |
| 521 | 1862 | A004p001G004p001C004pA004 | 927 | A004p001U007p001C004pU004p | 1168 |
| | | pG004pC004pC007pG004pA007 | | G004pC007pA004pA004pG004pG | |
| | | pG007pU007pC004pC004pU004 | | 004pA004pC004pU004pC007pG0 | |
| | | pU004pG004pC004pA004pG004 | | 04pG007pC004pU004pG004pC00 | |
| | | pA004pU004 | | 4pU004p001G004p001G004 | |
| 522 | 1875 | U004p001U004p001G004pC004 | 928 | U004p001A007p001C004pG004p | 1169 |
| | | pA004pG004pA007pU004pG007 | | A004pG007pU004pC004pA004pU | |
| | | pG007pG007pA004pU004pG004 | | 004pC004pC004pC004pA007pU0 | |
| | | pA004pC004pU004pC004pG004 | | 04pC007pU004pG004pC004pA00 | |
| | | pU004pA004 | | 4pA004p001G004p001G004 | |
| 523 | 1876 | U004p001G004p001C004pA004 | 929 | U004p001C007p001A004pC004p | 1170 |
| | | pG004pA004pU007pG004pG007 | | G004pA007pG004pU004pC004pA | |
| | | pG007pA007pU004pG004pA004 | | 004pU004pC004pC004pC007pA0 | |
| | | pC004pU004pC004pG004pU004 | | 04pU007pC004pU004pG004pC00 | |
| | | pG004pA004 | | 4pA004p001A004p001G004 | |
| 524 | 1878 | C004p001A004p001G004pA004 | 930 | U004p001G007p001C004pC004p | 1171 |
| | | pU004pG004pG007pG004pA007 | | A004pC007pG004pA004pG004pU | |
| | | pU007pG007pA004pC004pU004 | | 004pC004pA004pU004pC007pC0 | |
| | | pC004pG004pU004pG004pG004 | | 04pC007pA004pU004pC004pU00 | |
| | | pC004pA004 | | 4pG004p001C004p001A004 | |
| 525 | 1879 | A004p001G004p001A004pU004 | 931 | U004p001G007p001G004pC004p | 1172 |
| | | pG004pG004pG007pA004pU007 | | C004pA007pC004pG004pA004pG | |
| | | pG007pA007pC004pU004pC004 | | 004pU004pC004pA004pU007pC0 | |
| | | pG004pU004pG004pG004pC004 | | 04pC007pC004pA004pU004pC00 | |
| | | pC004pA004 | | 4pU004p001G004p001C004 | |
| 526 | 1889 | A004p001C004p001U004pC004 | 932 | A004p001C007p001G004pC004p | 1173 |
| | | pG004pU004pG007pG004pC007 | | A004pC007pA004pA004pC004pU | |
| | | pC007pC007pA004pG004pU004 | | 004pG004pG004pG004pC007pC0 | |
| | | pU004pG004pU004pG004pC004 | | 04pA007pC004pG004pA004pG00 | |
| | | pG004pU004 | | 4pU004p001C004p001A004 | |
| 527 | 1898 | C004p001C004p001A004pG004 | 933 | A004p001C007p001G004pU004p | 1174 |
| | | pU004pU004pG007pU004pG007 | | G004pG007pA004pA004pG004pA | |
| | | pc007pG007pU004pC004pU004 | | 004pC004pG004pC004pA007pC0 | |
| | | pU004pC004pC004pA004pC004 | | 04pA007pA004pC004pU004pG00 | |
| | | pG004pU004 | | 4pG004p001G004p001C004 | |
| 528 | 1901 | G004p001U004p001U004pG004 | 934 | A004p001G007p001C004pA004p | 1175 |
| | | pU004pG004pC007pG004pU007 | | C004pG007pU004pG004pG004pA | |
| | | pC007pU007pU004pC004pC004 | | 004pA004pG004pA004pC007pG0 | |
| | | pA004pC004pG004pU004pG004 | | 04pC007pA004pC004pA004pA00 | |
| | | pC004pU004 | | 4pC004p001U004p001G004 | |
| 529 | 1936 | A004p001G004p001U004pG004 | 935 | U004p001U007p001U004pU004p | 1176 |
| | | pA004pA004pA007pG004pC007 | | C004pG007pA004pG004pC004pC | |
| | | pC007pU007pG004pG004pC004 | | 004pA004pG004pG004pC007pU0 | |
| | | pU004pC004pG004pA004pA004 | | 04pU007pU004pC004pA004pC00 | |
| | | pA004pA004 | | 4pU004p001U004p001C004 | |
| 530 | 1945 | C004p001U004p001G004pG004 | 936 | U004p001C007p001U004pU004p | 1177 |
| | | pC004pU004pC007pG004pA007 | | C004pA007pG004pA004pU004pG | |
| | | pA007pA007pC004pA004pU004 | | 004pU004pU004pU004pC007pG0 | |
| | | pC004pU004pG004pA004pA004 | | 04pA007pG004pC004pC004pA00 | |
| | | pG004pA004 | | 4pG004p001G004p001C004 | |
| 531 | 1952 | G004p001A004p001A004pA004 | 937 | U004p001G007p001C004pG004p | 1178 |
| | | pC004pA004pU007pC004pU007 | | A004pA007pC004pC004pC004pU | |
| | | pG007pA007pA004pG004pG004 | | 004pU004pC004pA004pG007pA0 | |
| | | pG004pU004pU004pC004pG004 | | 04pU007pG004pU004pU004pU00 | |
| | | pC004pA004 | | 4pC004p001G004p001A004 | |
| 532 | 1953 | A004p001A004p001A004pC004 | 938 | U004p001U007p001G004pC004p | 1179 |
| | | pA004pU004pC007pU004pG007 | | G004pA007pA004pC004pC004pC | |
| | | pA007pA007pG004pG004pG004 | | 004pU004pU004pC004pA007pG0 | |
| | | pU004pU004pC004pG004pC004 | | 04pA007pU004pG004pU004pU00 | |
| | | pA004pA004 | | 4pU004p001C004p001G004 | |
| 533 | 1959 | C004p001U004p001G004pA004 | 939 | U004p001U007p001A004pU004p | 1180 |
| | | pA004pG004pG007pG004pU007 | | C004pA007pC004pU004pG004pC | |
| | | pU007pC007pG004pC004pA004 | | 004pG004pA004pA004pC007pC0 | |
| | | pG004pU004pG004pA004pU004 | | 04pC007pU004pU004pC004pA00 | |
| | | pA004pA004 | | 4pG004p001A004p001U004 | |
| 534 | 1961 | G004p001A004p001A004pG004 | 940 | U004p001U007p001U004pU004p | 1181 |
| | | pG004pG004pU007pU004pC007 | | A004pU007pC004pA004pC004pU | |
| | | pG007pC007pA004pG004pU004 | | 004pG004pC004pG004pA007pA0 | |
| | | pG004pA004pU004pA004pA004 | | 04pC007pC004pC004pU004pU00 | |
| | | pA004pA004 | | 4pC004p001A004p001G004 | |
| 535 | 1985 | G004p001C004p001A004pU004 | 941 | U004p001C007p001U004pG004p | 1182 |
| | | pU004pU004pG007pA004pC007 | | C004pU007pA004pG004pU004pG | |
| | | pA007pG007pC004pA004pC004 | | 004pC004pU004pG004pU007pC0 | |
| | | pU004pA004pG004pC004pA004 | | 04pA007pA004pA004pU004pG00 | |
| | | pG004pA004 | | 4pC004p001C004p001U004 | |
| 536 | 1989 | U004p001U004p001G004pA004 | 942 | U004p001A007p001A004pA004p | 1183 |
| | | pC004pA004pG007pC004pA007 | | U004pC007pU004pG004pC004pU | |
| | | pC007pU007pA004pG004pC004 | | 004pA004pG004pU004pG007pC0 | |
| | | pA004pG004pA004pU004pU004 | | 04pU007pG004pU004pC004pA00 | |
| | | pU004pA004 | | 4pA004p001A004p001U004 | |
| 537 | 1995 | G004p001C004p001A004pC004 | 943 | U004p001A007p001C004pG004p | 1184 |
| | | pU004pA004pG007pC004pA007 | | U004pG007pC004pA004pA004pA | |
| | | pG007pA007pU004pU004pU004 | | 004pU004pC004pU004pG007pC0 | |
| | | pG004pC004pA004pC004pG004 | | 04pU007pA004pG004pU004pG00 | |
| | | pU004pA004 | | 4pC004p001U004p001G004 | |
| 538 | 1996 | C004p001A004p001C004pU004 | 944 | A004p001G007p001A004pC004p | 1185 |
| | | pA004pG004pC007pA004pG007 | | G004pU007pG004pC004pA004pA | |
| | | pA007pU007pU004pU004pG004 | | 004pA004pU004pC004pU007pG0 | |
| | | pC004pA004pC004pG004pU004 | | 04pC007pU004pA004pG004pU00 | |
| | | pC004pU004 | | 4pG004p001C004p001U004 | |
| 539 | 1998 | C004p001U004p001A004pG004 | 945 | U004p001U007p001A004pG004p | 1186 |
| | | pC004pA004pG007pA004pU007 | | A004pC007pG004pU004pG004pC | |
| | | pU007pU007pG004pC004pA004 | | 004pA004pA004pA004pU007pC0 | |
| | | pC004pG004pU004pC004pU004 | | 04pU007pG004pC004pU004pA00 | |
| | | pA004pA004 | | 4pG004p001U004p001G004 | |
| 540 | 1999 | U004p001A004p001G004pC004 | 946 | U004p001G007p001U004pA004p | 1187 |
| | | pA004pG004pA007pU004pU007 | | G004pA007pC004pG004pU004pG | |
| | | pU007pG007pC004pA004pC004 | | 004pC004pA004pA004pA007pU0 | |
| | | pG004pU004pC004pU004pA004 | | 04pC007pU004pG004pC004pU00 | |
| | | pC004pA004 | | 4pA004p001G004p001U004 | |
| 541 | 2000 | A004p001G004p001C004pA004 | 947 | U004p001U007p001G004pU004p | 1188 |
| | | pG004pA004pU007pU004pU007 | | A004pG007pA004pC004pG004pU | |
| | | pG007pC007pA004pC004pG004 | | 004pG004pC004pA004pA007pA0 | |
| | | pU004pC004pU004pA004pC004 | | 04pU007pC004pU004pG004pC00 | |
| | | pA004pA004 | | 4pU004p001A004p001G004 | |
| 542 | 2004 | G004p001A004p001U004pU004 | 948 | U004p001U007p001U004pU004p | 1189 |
| | | pU004pG004pC007pA004pC007 | | C004pU007pG004pU004pA004pG | |
| | | pG007pU007pC004pU004pA004 | | 004pA004pC004pG004pU007pG0 | |
| | | pC004pA004pG004pA004pA004 | | 04pC007pA004pA004pA004pU00 | |
| | | pA004pA004 | | 4pC004p001U004p001G004 | |
| 543 | 2006 | U004p001U004p001U004pG004 | 949 | A004p001A007p001G004pU004p | 1190 |
| | | pC004pA004pC007pG004pU007 | | U004pU007pC004pU004pG004pU | |
| | | pC007pU007pA004pC004pA004 | | 004pA004pG004pA004pC007pG0 | |
| | | pG004pA004pA004pA004pC004 | | 04pU007pG004pC004pA004pA00 | |
| | | pU004pU004 | | 4pA004p001U004p001C004 | |
| 544 | 2007 | U004p001U004p001G004pC004 | 950 | U004p001A007p001A004pG004p | 1191 |
| | | pA004pC004pG007pU004pC007 | | U004pU007pU004pC004pU004pG | |
| | | pU007pA007pC004pA004pG004 | | 004pU004pA004pG004pA007pC0 | |
| | | pA004pA004pA004pC004pU004 | | 04pG007pU004pG004pC004pA00 | |
| | | pU004pA004 | | 4pA004p001A004p001U004 | |
| 545 | 2040 | C004p001U004p001G004pG004 | 951 | U004p001G007p001A004pU004p | 1192 |
| | | pA004pC004pG007pC004pA007 | | A004pU007pA004pA004pA004pG | |
| | | pA007pC007pC004pU004pU004 | | 004pG004pU004pU004pG007pC0 | |
| | | pU004pA004pU004pA004pU004 | | 04pG007pU004pC004pC004pA00 | |
| | | pC004pA004 | | 4pG004p001C004p001U004 | |
| 546 | 2042 | G004p001G004p001A004pC004 | 952 | A004p001C007p001G004pG004p | 1193 |
| | | pG004pC004pA007pA004pC007 | | A004pU007pA004pU004pA004pA | |
| | | pC007pU007pU004pU004pA004 | | 004pA004pG004pG004pU007pU0 | |
| | | pU004pA004pU004pC004pC004 | | 04pG007pC004pG004pU004pC00 | |
| | | pG004pU004 | | 4pC004p001A004p001G004 | |
| 547 | 2043 | G004p001A004p001C004pG004 | 953 | A004p001A007p001C004pG004p | 1194 |
| | | pC004pA004pA007pC004pC007 | | G004pA007pU004pA004pU004pA | |
| | | pU007pU007pU004pA004pU004 | | 004pA004pA004pG004pG007pU0 | |
| | | pA004pU004pC004pC004pG004 | | 04pU007pG004pC004pG004pU00 | |
| | | pU004pU004 | | 4pC004p001C004p001A004 | |
| 548 | 2170 | C004p001G004p001U004pU004 | 954 | U004p001U007p001A004pC004p | 1195 |
| | | pA004pG004pU007pG004pG007 | | A004pA007pU004pA004pG004pU | |
| | | pU007pA007pA004pC004pU004 | | 004pU004pA004pC004pC007pA0 | |
| | | pA004pU004pU004pG004pU004 | | 04pC007pU004pA004pA004pC00 | |
| | | pA004pA004 | | 4pG004p001G004p001C004 | |
| 549 | 2172 | U004p001U004p001A004pG004 | 953 | U004p001A007p001G004pU004p | 1196 |
| | | pU004pG004pG007pU004pA007 | | A004pC007pA004pA004pU004pA | |
| | | pA007pC007pU004pA004pU004 | | 004pG004pU004pU004pA007pC0 | |
| | | pU004pG004pU004pA004pC004 | | 04pC007pA004pC004pU004pA00 | |
| | | pU004pA004 | | 4pA004p001C004p001G004 | |
| 550 | 2179 | U004p001A004p001A004pC004 | 956 | U004p001U007p001C004pU004p | 1197 |
| | | pU004pA004pU007pU004pG007 | | U004pG007pU004pC004pA004pG | |
| | | pU007pA007pC004pU004pG004 | | 004pU004pA004pC004pA007pA0 | |
| | | pA004pC004pA004pA004pG004 | | 04pU007pA004pG004pU004pU00 | |
| | | pA004pA004 | | 4pA004p001C004p001C004 | |
| 551 | 2183 | U004p001A004p001U004pU004 | 957 | A004p001G007p001G004pU004p | 1198 |
| | | pG004pU004pA007pC004pU007 | | U004pU007pC004pU004pU004pG | |
| | | pG007pA007pC004pA004pA004 | | 004pU004pC004pA004pG007pU0 | |
| | | pG004pA004pA004pA004pC004 | | 04pA007pC004pA004pA004pU00 | |
| | | pC004pU004 | | 4pA004p001G004p001U004 | |
| 552 | 2193 | A004p001C004p001A004pA004 | 958 | U004p001U007p001A004pU004p | 1199 |
| | | pG004pA004pA007pA004pC007 | | A004pG007pC004pA004pG004pC | |
| | | pC007pU007pG004pC004pU004 | | 004pA004pG004pG004pU007pU0 | |
| | | pG004pC004pU004pA004pU004 | | 04pU007pC004pU004pU004pG00 | |
| | | pA004pA004 | | 4pU004p001C004p001A004 | |
| 553 | 2264 | G004p001C004p001C004pA004 | 959 | U004p001A007p001C004pU004p | 1200 |
| | | pA004pG004pG007pU004pU007 | | U004pC007pU004pC004pU004pG | |
| | | pG007pU007pC004pA004pG004 | | 004pA004pC004pA004pA007pC0 | |
| | | pA004pG004pA004pA004pG004 | | 04pC007pU004pU004pG004pG00 | |
| | | pU004pA004 | | 4pC004p001U004p001G004 | |
| 554 | 2266 | C004p001A004p001A004pG004 | 960 | A004p001A007p001U004pA004p | 1201 |
| | | pG004pU004pU007pG004pU007 | | C004pU007pU004pC004pU004pC | |
| | | pC007pA007pG004pA004pG004 | | 004pU004pG004pA004pC007pA0 | |
| | | pA004pA004pG004pU004pA004 | | 04pA007pC004pC004pU004pU00 | |
| | | pU004pU004 | | 4pG004p001G004p001C004 | |
| 555 | 2269 | G004p001G004p001U004pU004 | 961 | U004p001U007p001U004pA004p | 1202 |
| | | pG004pU004pC007pA004pG007 | | A004pU007pA004pC004pU004pU | |
| | | pA007pG007pA004pA004pG004 | | 004pC004pU004pC004pU007pG0 | |
| | | pU004pA004pU004pU004pA004 | | 04pA007pC004pA004pA004pC00 | |
| | | pA004pA004 | | 4pC004p001U004p001U004 | |
| 556 | 2274 | U004p001C004p001A004pG004 | 962 | U004p001A007p001G004pU004p | 1203 |
| | | pA004pG004pA007pA004pG007 | | C004pU007pU004pU004pA004pA | |
| | | pU007pA007pU004pU004pA004 | | 004pU004pA004pC004pU007pU0 | |
| | | pA004pA004pG004pA004pC004 | | 04pC007pU004pC004pU004pG00 | |
| | | pU004pA004 | | 4pA004p001C004p001A004 | |
| 557 | 2276 | A004p001G004p001A004pG004 | 963 | U004p001G007p001U004pA004p | 1204 |
| | | pA004pA004pG007pU004pA007 | | G004pU007pC004pU004pU004pU | |
| | | pU007pU007pA004pA004pA004 | | 004pA004pA004pU004pA007pC0 | |
| | | pG004pA004pC004pU004pA004 | | 04pU007pU004pC004pU004pC00 | |
| | | pC004pA004 | | 4pU004p001G004p001A004 | |
| 558 | 2277 | G004p001A004p001G004pA004 | 964 | U004p001G007p001G004pU004p | 1205 |
| | | pA004pG004pU007pA004pU007 | | A004pG007pU004pC004pU004pU | |
| | | pU007pA007pA004pA004pG004 | | 004pU004pA004pA004pU007pA0 | |
| | | pA004pC004pU004pA004pC004 | | 04pC007pU004pU004pC004pU00 | |
| | | pC004pA004 | | 4pC004p001U004p001G004 | |
| 559 | 2278 | A004p001G004p001A004pA004 | 965 | U004p001U007p001G004pG004p | 1206 |
| | | pG004pU004pA007pU004pU007 | | U004pA007pG004pU004pC004pU | |
| | | pA007pA007pA004pG004pA004 | | 004pU004pU004pA004pA007pU0 | |
| | | pC004pU004pA004pC004pC004 | | 04pA007pC004pU004pU004pC00 | |
| | | pA004pA004 | | 4pU004p001C004p001U004 | |
| 560 | 2300 | G004p001A004p001G004pG004 | 966 | U004p001U007p001U004pG004p | 1207 |
| | | pC004pU004pA007pU004pG007 | | A004pC007pC004pU004pC004pA | |
| | | pA007pU007pU004pG004pA004 | | 004pA004pU004pC004pA007pU0 | |
| | | pG004pG004pU004pC004pA004 | | 04pA007pG004pC004pC004pU00 | |
| | | pA004pA004 | | 4pC004p001U004p001G004 | |
| 561 | 2301 | A004p001G004p001G004pC004 | 967 | U004p001G007p001U004pU004p | 1208 |
| | | pU004pA004pU007pG004pA007 | | G004pA007pC004pC004pU004pC | |
| | | pU007pU007pG004pA004pG004 | | 004pA004pA004pU004pC007pA0 | |
| | | pG004pU004pC004pA004pA004 | | 04pU007pA004pG004pC004pC00 | |
| | | pC004pA004 | | 4pU004p001C004p001U004 | |
| 562 | 2305 | U004p001A004p001U004pG004 | 968 | U004p001U007p001A004pA004p | 1209 |
| | | pA004pU004pU007pG004pA007 | | U004pG007pU004pU004pG004pA | |
| | | pG007pG007pU004pC004pA004 | | 004pC004pC004pU004pC007pA0 | |
| | | pA004pC004pA004pU004pU004 | | 04pA007pU004pC004pA004pU00 | |
| | | pA004pA004 | | 4pA004p001G004p001C004 | |
| 563 | 2306 | A004p001U004p001G004pA004 | 969 | U004p001U007p001U004pA004p | 1210 |
| | | pU004pU004pG007pA004pG007 | | A004pU007pG004pU004pU004pG | |
| | | pG007pU007pC004pA004pA004 | | 004pA004pC004pC004pU007pC0 | |
| | | pC004pA004pU004pU004pA004 | | 04pA007pA004pU004pC004pA00 | |
| | | pA004pA004 | | 4pU004p001A004p001G004 | |
| 564 | 2320 | C004p001A004p001U004pU004 | 970 | U004p001C007p001C004pA004p | 1211 |
| | | pA004pA004pC007pA004pA007 | | C004pU007pA004pA004pA004pU | |
| | | pG007pA007pA004pU004pU004 | | 004pU004pC004pU004pU007pG0 | |
| | | pU004pA004pG004pU004pG004 | | 04pU007pU004pA004pA004pU00 | |
| | | pG004pA004 | | 4pG004p001U004p001U004 | |
| 565 | 2323 | U004p001A004p001A004pC004 | 971 | U004p001A007p001G004pC004p | 1212 |
| | | pA004pA004pG007pA004pA007 | | C004pC007pA004pC004pU004pA | |
| | | pU007pU007pU004pA004pG004 | | 004pA004pA004pU004pU007pC0 | |
| | | pU004pG004pG004pG004pC004 | | 04pU007pU004pG004pU004pU00 | |
| | | pU004pA004 | | 4pA004p001A004p001U004 | |
| 566 | 2328 | A004p001G004p001A004pA004 | 972 | U004p001G007p001G004pC004p | 1213 |
| | | pU004pU004pU007pA004pG007 | | A004pG007pA004pG004pC004pC | |
| | | pU007pG007pG004pG004pC004 | | 004pC004pA004pC004pU007pA0 | |
| | | pU004pC004pU004pG004pC004 | | 04pA007pA004pU004pU004pC00 | |
| | | pC004pA004 | | 4pU004p001U004p001G004 | |
| 567 | 2344 | U004p001G004p001C004pC004 | 973 | U004p001C007p001U004pA004p | 1214 |
| | | pA004pU004pG007pG004pC007 | | U004pG007pC004pU004pC004pC | |
| | | pU007pG007pG004pG004pA004 | | 004pC004pA004pG004pC007pC0 | |
| | | pG004pC004pA004pU004pA004 | | 04pA007pU004pG004pG004pC00 | |
| | | pG004pA004 | | 4pA004p001G004p001A004 | |
| 568 | 2345 | G004p001C004p001C004pA004 | 974 | U004p001C007p001C004pU004p | 1215 |
| | | pU004pG004pG007pC004pU007 | | A004pU007pG004pC004pU004pC | |
| | | pG007pG007pG004pA004pG004 | | 004pC004pC004pA004pG007pC0 | |
| | | pC004pA004pU004pA004pG004 | | 04pC007pA004pU004pG004pG00 | |
| | | pG004pA004 | | 4pC004p001A004p001G004 | |
| 569 | 2357 | A004p001G004p001C004pA004 | 975 | U004p001G007p001C004pG004p | 1216 |
| | | pU004pA004pG007pG004pA007 | | U004pU007pG004pU004pA004pG | |
| | | pG007pG007pC004pU004pA004 | | 004pC004pC004pU004pC007pC0 | |
| | | pC004pA004pA004pC004pG004 | | 04pU007pA004pU004pG004pC00 | |
| | | pC004pA004 | | 4pU004p001C004p001C004 | |
| 570 | 2358 | G004p001C004p001A004pU004 | 976 | U004p001G007p001G004pC004p | 1217 |
| | | pA004pG004pG007pA004pG007 | | G004pU007pU004pG004pU004pA | |
| | | pG007pC007pU004pA004pC004 | | 004pG004pC004pC004pU007pC0 | |
| | | pA004pA004pC004pG004pC004 | | 04pC007pU004pA004pU004pG00 | |
| | | pC004pA004 | | 4pC004p001U004p001C004 | |
| 571 | 2362 | A004p001G004p001G004pA004 | 977 | U004p001C007p001A004pU004p | 1218 |
| | | pG004pG004pC007pU004pA007 | | G004pG007pG004pC004pG004pU | |
| | | pC007pA007pA004pC004pG004 | | 004pU004pG004pU004pA007pG0 | |
| | | pc004pC004pC004pA004pU004 | | 04pC007pC004pU004pC004pC00 | |
| | | pG004pA004 | | 4pU004p001A004p001U004 | |
| 572 | 2368 | C004p001U004p001A004pC004 | 978 | U004p001U007p001U004pG004p | 1219 |
| | | pA004pA004pC007pG004pC007 | | C004pU007pG004pC004pA004pU | |
| | | pC007pC007pA004pU004pG004 | | 004pG004pG004pG004pC007pG0 | |
| | | pC004pA004pG004pC004pA004 | | 04pU007pU004pG004pU004pA00 | |
| | | pA004pA004 | | 4pG004p001C004p001C004 | |
| 573 | 2370 | A004p001C004p001A004pA004 | 979 | U004p001G007p001U004pU004p | 1220 |
| | | pC004pG004pC007pC004pC007 | | U004pG007pC004pU004pG004pC | |
| | | pA007pU007pG004pC004pA004 | | 004pA004pU004pG004pG007pG0 | |
| | | pG004pC004pA004pA004pA004 | | 04pC007pG004pU004pU004pG00 | |
| | | pC004pA004 | | 4pU004p001A004p001G004 | |
| 574 | 2376 | C004p001C004p001C004pA004 | 980 | U004p001G007p001A004pC004p | 1221 |
| | | pU004pG004pC007pA004pG007 | | A004pA007pU004pG004pU004pU | |
| | | pC007pA007pA004pA004pC004 | | 004pU004pG004pC004pU007pG0 | |
| | | pA004pU004pU004pG004pU004 | | 04pC007pA004pU004pG004pG00 | |
| | | pC004pA004 | | 4pG004p001C004p001G004 | |
| 575 | 2377 | C004p001C004p001A004pU004 | 981 | U004p001U007p001G004pA004p | 1222 |
| | | pG004pC004pA007pG004pC007 | | C004pA007pA004pU004pG004pU | |
| | | pA007pA007pA004pC004pA004 | | 004pU004pU004pG004pC007pU0 | |
| | | pU004pU004pG004pU004pC004 | | 04pG007pC004pA004pU004pG00 | |
| | | pA004pA004 | | 4pG004p001G004p001C004 | |
| 576 | 2399 | G004p001C004p001C004pA004 | 982 | U004p001C007p001C004pA004p | 1223 |
| | | pU004pC004pU007pA004pC007 | | C004pA007pG004pG004pC004pA | |
| | | pA007pU007pU004pG004pC004 | | 004pA004pU004pG004pU007pA0 | |
| | | pC004pU004pG004pU004pG004 | | 04pG007pA004pU004pG004pG00 | |
| | | pG004pA004 | | 4pC004p001G004p001G004 | |
| 577 | 2424 | A004p001U004p001G004pC004 | 983 | U004p001A007p001C004pC004p | 1224 |
| | | pA004pG004pC007pA004pC007 | | A004pA007pC004pA004pU004pU | |
| | | pA007pG007pA004pA004pU004 | | 004pC004pU004pG004pU007pG0 | |
| | | pG004pU004pU004pG004pG004 | | 04pC007pU004pG004pC004pA00 | |
| | | pU004pA004 | | 4pU004p001C004p001C004 | |
| 578 | 2426 | G004p001C004p001A004pG004 | 984 | A004p001C007p001U004pA004p | 1225 |
| | | pC004pA004pC007pA004pG007 | | C004pC007pA004pA004pC004pA | |
| | | pA007pA007pU004pG004pU004 | | 004pU004pU004pC004pU007pG0 | |
| | | pU004pG004pG004pU004pA004 | | 04pU007pG004pC004pU004pG00 | |
| | | pG004pU004 | | 4pC004p001A004p001U004 | |
| 579 | 2429 | G004p001C004p001A004pC004 | 985 | U004p001G007p001A004pA004p | 1226 |
| | | pA004pG004pA007pA004pU007 | | C004pU007pA004pC004pC004pA | |
| | | pG007pU007pU004pG004pG004 | | 004pA004pC004pA004pU007pU0 | |
| | | pU004pA004pG004pU004pU004 | | 04pC007pU004pG004pU004pG00 | |
| | | pC004pA004 | | 4pC004p001U004p001G004 | |
| 580 | 2479 | U004p001C004p001C004pC004 | 986 | U004p001A007p001U004pA004p | 1227 |
| | | pA004pC004pA007pA004pA007 | | A004pA007pU004pC004pU004pU | |
| | | pU007pG007pA004pA004pG004 | | 004pC004pA004pU004pU007pU0 | |
| | | pA004pU004pU004pU004pA004 | | 04pG007pU004pG004pG004pG00 | |
| | | pU004pA004 | | 4pA004p001C004p001C004 | |
| 581 | 2482 | C004p001A004p001C004pA004 | 987 | A004p001U007p001A004pU004p | 1228 |
| | | pA004pA004pU007pG004pA007 | | A004pU007pA004pA004pA004pU | |
| | | pA007pG007pA004pU004pU004 | | 004pC004pU004pU004pC007pA0 | |
| | | pU004pA004pU004pA004pU004 | | 04pU007pU004pU004pG004pU00 | |
| | | pA004pU004 | | 4pG004p001G004p001G004 | |
| 582 | 2484 | C004p001A004p001A004pA004 | 988 | U004p001G007p001A004pU004p | 1229 |
| | | pU004pG004pA007pA004pG007 | | A004pU007pA004pU004pA004pA | |
| | | pA007pU007pU004pU004pA004 | | 004pA004pU004pC004pU007pU0 | |
| | | pU004pA004pU004pA004pU004 | | 04pC007pA004pU004pU004pU00 | |
| | | pC004pA004 | | 4pG004p001U004p001G004 | |
| 583 | 2502 | U004p001C004p001A004pG004 | 989 | U004p001A007p001G004pA004p | 1230 |
| | | pC004pU004pG007pC004pA007 | | U004pG007pG004pC004pA004pU | |
| | | pC007pC007pA004pU004pG004 | | 004pG004pG004pU004pG007pC0 | |
| | | pC004pC004pA004pU004pC004 | | 04pA007pG004pC004pU004pG00 | |
| | | pU004pA004 | | 4pA004p001U004p001A004 | |
| 584 | 2575 | U004p001U004p001U004pG004 | 990 | U004p001G007p001A004pA004p | 1231 |
| | | pC004pA004pG007pA004pU007 | | C004pA007pC004pC004pU004pA | |
| | | pG007pC007pU004pA004pG004 | | 004pG004pC004pA004pU007pC0 | |
| | | pG004pU004pG004pU004pU004 | | 04pU007pG004pC004pA004pA00 | |
| | | pC004pA004 | | 4pA004p001C004p001A004 | |
| 585 | 2576 | U004p001U004p001G004pC004 | 991 | U004p001U007p001G004pA004p | 1232 |
| | | pA004pG004pA007pU004pG007 | | A004pC007pA004pC004pC004pU | |
| | | pC007pU007pA004pG004pG004 | | 004pA004pG004pC004pA007pU0 | |
| | | pU004pG004pU004pU004pC004 | | 04pC007pU004pG004pC004pA00 | |
| | | pA004pA004 | | 4pA004p001A004p001C004 | |
| 586 | 2579 | C004p001A004p001G004pA004 | 992 | U004p001C007p001C004pU004p | 1233 |
| | | pU004pG004pC007pU004pA007 | | U004pG007pA004pA004pC004pA | |
| | | pG007pG007pU004pG004pU004 | | 004pC004pC004pU004pA007pG0 | |
| | | pU004pC004pA004pA004pG004 | | 04pC007pA004pU004pC004pU00 | |
| | | pG004pA004 | | 4pG004p001C004p001A004 | |
| 587 | 2592 | U004p001U004p001C004pA004 | 993 | U004p001A007p001U004pC004p | 1234 |
| | | pA004pG004pG007pA004pG007 | | U004pU007pU004pG004pC004pA | |
| | | pC007pA007pU004pG004pC004 | | 004pU004pG004pC004pU007pC0 | |
| | | pA004pA004pA004pG004pA004 | | 04pC007pU004pU004pG004pA00 | |
| | | pU004pA004 | | 4pA004p001C004p001A004 | |
| 588 | 2606 | A004p001A004p001A004pG004 | 994 | A004p001U007p001U004pU004p | 1235 |
| | | pA004pU004pA007pA004pU007 | | U004pC007pC004pC004pC004pA | |
| | | pC007pC007pU004pG004pG004 | | 004pG004pG004pA004pU007pU0 | |
| | | pG004pG004pA004pA004pA004 | | 04pA007pU004pC004pU004pU00 | |
| | | pA004pU004 | | 4pU004p001G004p001C004 | |
| 589 | 2620 | G004p001G004p001A004pA004 | 995 | U004p001C007p001A004pA004p | 1236 |
| | | pA004pA004pU007pG004pC007 | | G004pC007pU004pG004pC004pC | |
| | | pC007pC007pG004pG004pC004 | | 004pG004pG004pG004pC007pA0 | |
| | | pA004pG004pC004pU004pU004 | | 04pU007pU004pU004pU004pC00 | |
| | | pG004pA004 | | 4pC004p001C004p001C004 | |
| 590 | 2627 | G004p001C004p001C004pC004 | 996 | A004p001A007p001U004pU004p | 1237 |
| | | pG004pG004pC007pA004pG007 | | C004pG007pG004pG004pC004pA | |
| | | pc007pU007pU004pG004pC004 | | 004pA004pG004pC004pU007pG0 | |
| | | pC004pC004pG004pA004pA004 | | 04pC007pC004pG004pG004pG00 | |
| | | pU004pU004 | | 4pC004p001A004p001U004 | |
| 591 | 2633 | C004p001A004p001G004pC004 | 997 | A004p001C007p001A004pC004p | 1238 |
| | | pU004pU004pG007pC004pC007 | | A004pC007pA004pA004pU004pU | |
| | | pC007pG007pA004pA004pU004 | | 004pC004pG004pG004pG007pC0 | |
| | | pU004pG004pU004pG004pU004 | | 04pA007pA004pG004pC004pU00 | |
| | | pG004pU004 | | 4pG004p001C004p001C004 | |
| 592 | 2658 | C004p001C004p001G004pU004 | 998 | A004p001C007p001A004pA004p | 1239 |
| | | pA004pA004pU007pG004pG007 | | U004pU007pC004pC004pC004pC | |
| | | pC007pU007pG004pG004pG004 | | 004pA004pG004pC004pC007pA0 | |
| | | pG004pA004pA004pU004pU004 | | 04pU007pU004pA004pC004pG00 | |
| | | pG004pU004 | | 4pG004p001U004p001C004 | |
| 593 | 2677 | G004p001U004p001C004pA004 | 999 | U004p001C007p001C004pA004p | 1240 |
| | | pc004pU004pU007pA004pU007 | | A004pU007pG004pC004pU004pG | |
| | | pG007pG007pC004pA004pG004 | | 004pC004pC004pA004pU007pA0 | |
| | | pC004pA004pU004pU004pG004 | | 04pA007pG004pU004pG004pA00 | |
| | | pG004pA004 | | 4pC004p001A004p001A004 | |
| 594 | 2721 | A004p001C004p001A004pU004 | 1000 | U004p001C007p001G004pA004p | 1241 |
| | | pG004pA004pU007pU004pC007 | | C004pC007pU004pG004pU004pU | |
| | | pA007pC007pA004pA004pC004 | | 004pG004pU004pG004pA007pA0 | |
| | | pA004pG004pG004pU004pC004 | | 04pU007pC004pA004pU004pG00 | |
| | | pG004pA004 | | 4pU004p001G004p001A004 | |
| 595 | 2722 | C004p001A004p001U004pG004 | 1001 | U004p001U007p001C004pG004p | 1242 |
| | | pA004pU004pU007pC004pA007 | | A004pC007pC004pU004pG004pU | |
| | | pC007pA007pA004pC004pA004 | | 004pU004pG004pU004pG007pA0 | |
| | | pG004pG004pU004pC004pG004 | | 04pA007pU004pC004pA004pU00 | |
| | | pA004pA004 | | 4pG004p001U004p001G004 | |
| 596 | 2723 | A004p001U004p001G004pA004 | 1002 | U004p001U007p001U004pC004p | 1243 |
| | | pU004pU004pC007pA004pC007 | | G004pA007pC004pC004pU004pG | |
| | | pA007pA007pC004pA004pG004 | | 004pU004pU004pG004pU007pG0 | |
| | | pG004pU004pC004pG004pA004 | | 04pA007pA004pU004pC004pA00 | |
| | | pA004pA004 | | 4pU004p001G004p001U004 | |
| 597 | 2724 | U004p001G004p001A004pU004 | 1003 | U004p001C007p001U004pU004p | 1244 |
| | | pU004pC004pA007pC004pA007 | | C004pG007pA004pC004pC004pU | |
| | | pA007pC007pA004pG004pG004 | | 004pG004pU004pU004pG007pU0 | |
| | | pU004pC004pG004pA004pA004 | | 04pG007pA004pA004pU004pC00 | |
| | | pG004pA004 | | 4pA004p001U004p001G004 | |
| 598 | 2725 | G004p001A004p001U004pU004 | 1004 | A004p001U007p001C004pU004p | 1245 |
| | | pC004pA004pC007pA004pA007 | | U004pC007pG004pA004pC004pC | |
| | | pC007pA007pG004pG004pU004 | | 004pU004pG004pU004pU007pG0 | |
| | | pC004pG004pA004pA004pG004 | | 04pU007pG004pA004pA004pU00 | |
| | | pA004pU004 | | 4pC004p001A004p001U004 | |
| 599 | 2728 | U004p001C004p001A004pC004 | 1005 | U004p001U007p001G004pA004p | 1246 |
| | | pA004pA004pC007pA004pG007 | | U004pC007pU004pU004pC004pG | |
| | | pG007pU007pC004pG004pA004 | | 004pA004pC004pC004pU007pG0 | |
| | | pA004pG004pA004pU004pC004 | | 04pU007pU004pG004pU004pG00 | |
| | | pA004pA004 | | 4pA004p001A004p001U004 | |
| 600 | 2731 | C004p001A004p001A004pC004 | 1006 | A004p001A007p001A004pU004p | 1247 |
| | | pA004pG004pG007pU004pC007 | | U004pG007pA004pU004pC004pU | |
| | | pG007pA007pA004pG004pA004 | | 004pU004pC004pG004pA007pC0 | |
| | | pU004pC004pA004pA004pU004 | | 04pC007pU004pG004pU004pU00 | |
| | | pU004pU004 | | 4pG004p001U004p001G004 | |
| 601 | 2732 | A004p001A004p001C004pA004 | 1007 | U004p001A007p001A004pA004p | 1248 |
| | | pG004pG004pU007pC004pG007 | | U004pU007pG004pA004pU004pC | |
| | | pA007pA007pG004pA004pU004 | | 004pU004pU004pC004pG007pA0 | |
| | | pC004pA004pA004pU004pU004 | | 04pC007pC004pU004pG004pU00 | |
| | | pU004pA004 | | 4pU004p001G004p001U004 | |
| 602 | 2734 | C004p001A004p001G004pG004 | 1008 | U004p001G007p001U004pA004p | 1249 |
| | | pU004pC004pG007pA004pA007 | | A004pA007pU004pU004pG004pA | |
| | | pG007pA007pU004pC004pA004 | | 004pU004pC004pU004pU007pC0 | |
| | | pA004pU004pU004pU004pA004 | | 04pG007pA004pC004pC004pU00 | |
| | | pC004pA004 | | 4pG004p001U004p001U004 | |
| 603 | 2735 | A004p001G004p001G004pU004 | 1009 | U004p001U007p001G004pU004p | 1250 |
| | | pC004pG004pA007pA004pG007 | | A004pA007pA004pU004pU004pG | |
| | | pA007pU007pC004pA004pA004 | | 004pA004pU004pC004pU007pU0 | |
| | | pU004pU004pU004pA004pC004 | | 04pC007pG004pA004pC004pC00 | |
| | | pA004pA004 | | 4pU004p001G004p001U004 | |
| 604 | 2736 | G004p001G004p001U004pC004 | 1010 | U004p001U007p001U004pG004p | 1251 |
| | | pG004pA004pA007pG004pA007 | | U004pA007pA004pA004pU004pU | |
| | | pU007pC007pA004pA004pU004 | | 004pG004pA004pU004pC007pU0 | |
| | | pU004pU004pA004pC004pA004 | | 04pU007pC004pG004pA004pC00 | |
| | | pA004pA004 | | 4pC004p001U004p001G004 | |
| 605 | 2741 | A004p001A004p001G004pA004 | 1011 | U004p001A007p001G004pG004p | 1252 |
| | | pU004pC004pA007pA004pU007 | | U004pC007pU004pU004pG004pU | |
| | | pU007pU007pA004pC004pA004 | | 004pA004pA004pA004pU007pU0 | |
| | | pA004pG004pA004pC004pC004 | | 04pG007pA004pU004pC004pU00 | |
| | | pU004pA004 | | 4pU004p001C004p001G004 | |
| 606 | 2742 | A004p001G004p001A004pU004 | 1012 | U004p001G007p001A004pG004p | 1253 |
| | | pC004pA004pA007pU004pU007 | | G004pU007pC004pU004pU004pG | |
| | | pU007pA007pC004pA004pA004 | | 004pU004pA004pA004pA007pU0 | |
| | | pG004pA004pC004pC004pU004 | | 04pU007pG004pA004pU004pC00 | |
| | | pC004pA004 | | 4pU004p001U004p001C004 | |
| 607 | 2833 | U004p001A004p001A004pA004 | 1013 | A004p001G007p001A004pU004p | 1254 |
| | | pG004pG004pA007pC004pU007 | | U004pU007pU004pA004pU004pG | |
| | | pA007pA007pC004pA004pU004 | | 004pU004pU004pA004pG007pU0 | |
| | | pA004pA004pA004pA004pU004 | | 04pC007pC004pU004pU004pU00 | |
| | | pC004pU004 | | 4pA004p001G004p001A004 | |
| 608 | 2834 | A004p001A004p001A004pG004 | 1014 | U004p001A007p001G004pA004p | 1255 |
| | | pG004pA004pC007pU004pA007 | | U004pU007pU004pU004pA004pU | |
| | | pA007pC007pA004pU004pA004 | | 004pG004pU004pU004pA007pG0 | |
| | | pA004pA004pA004pU004pC004 | | 04pU007pC004pC004pU004pU00 | |
| | | pU004pA004 | | 4pU004p001A004p001G004 | |
| 609 | 2941 | A004p001G004p001A004pG004 | 1015 | U004p001G007p001G004pA004p | 1256 |
| | | pG004pU004pC007pU004pC007 | | A004pA007pG004pA004pA004pC | |
| | | pA007pG007pG004pU004pU004 | | 004pC004pU004pG004pA007pG0 | |
| | | pC004pU004pU004pU004pC004 | | 04pA007pC004pC004pU004pC00 | |
| | | pC004pA004 | | 4pU004p001C004p001U004 | |
| 610 | 2994 | G004p001C004p001U004pU004 | 1016 | A004p001A007p001A004pG004p | 1257 |
| | | pU004pA004pC007pA004pU007 | | A004pG007pC004pA004pC004pA | |
| | | pG007pC007pU004pG004pU004 | | 004pG004pC004pA004pU007pG0 | |
| | | pG004pC004pU004pC004pU004 | | 04pU007pA004pA004pA004pG00 | |
| | | pU004pU004 | | 4pC004p001A004p001C004 | |
| 611 | 3058 | U004p001G004p001G004pU004 | 1017 | U004p001A007p001G004pG004p | 1258 |
| | | pA004pA004pU007pC004pU007 | | U004pG007pA004pG004pC004pU | |
| | | pA007pC007pA004pG004pC004 | | 004pG004pU004pA004pG007pA0 | |
| | | pU004pC004pA004pC004pC004 | | 04pU007pU004pA004pC004pC00 | |
| | | pU004pA004 | | 4pA004p001U004p001C004 | |
| 612 | 3071 | C004p001U004p001C004pA004 | 1018 | A004p001U007p001A004pU004p | 1259 |
| | | pC004pC004pU007pC004pU007 | | U004pU007pG004pC004pC004pU | |
| | | pG007pA007pA004pG004pG004 | | 004pU004pC004pA004pG007pA0 | |
| | | pC004pA004pA004pA004pU004 | | 04pG007pG004pU004pG004pA00 | |
| | | pA004pU004 | | 4pG004p001C004p001U004 | |
| 613 | 3102 | A004p001A004p001A004pA004 | 1019 | A004p001A007p001G004pA004p | 1260 |
| | | pG004pU004pU007pU004pU007 | | A004pU007pU004pU004pC004pA | |
| | | pG007pA007pU004pG004pA004 | | 004pU004pC004pA004pA007pA0 | |
| | | pA004pA004pU004pU004pC004 | | 04pA007pC004pU004pU004pU00 | |
| | | pU004pU004 | | 4pU004p001U004p001U004 | |
| 614 | 3105 | A004p001G004p001U004pU004 | 1020 | U004p001U007p001C004pA004p | 1261 |
| | | pU004pU004pG007pA004pU007 | | A004pG007pA004pA004pU004pU | |
| | | pG007pA007pA004pA004pU004 | | 004pU004pC004pA004pU007pC0 | |
| | | pU004pC004pU004pU004pG004 | | 04pA007pA004pA004pA004pC00 | |
| | | pA004pA004 | | 4pU004p001U004p001U004 | |
| 615 | 3108 | U004p001U004p001U004pG004 | 1021 | A004p001A007p001C004pU004p | 1262 |
| | | pA004pU004pG007pA004pA007 | | U004pC007pA004pA004pG004pA | |
| | | pA007pU007pU004pC004pU004 | | 004pA004pU004pU004pU007pC0 | |
| | | pU004pG004pA004pA004pG004 | | 04pA007pU004pC004pA004pA00 | |
| | | pU004pU004 | | 4pA004p001A004p001C004 | |
| 616 | 3111 | G004p001A004p001U004pG004 | 1022 | A004p001U007p001G004pA004p | 1263 |
| | | pA004pA004pA007pU004pU007 | | A004pC007pU004pU004pC004pA | |
| | | pC007pU007pU004pG004pA004 | | 004pA004pG004pA004pA007pU0 | |
| | | pA004pG004pU004pU004pC004 | | 04pU007pU004pC004pA004pU00 | |
| | | pA004pU004 | | 4pC004p001A004p001A004 | |
| 617 | 3117 | A004p001U004p001U004pC004 | 1023 | A004p001U007p001C004pA004p | 1264 |
| | | pU004pU004pG007pA004pA007 | | C004pC007pA004pU004pG004pA | |
| | | pG007pU007pU004pC004pA004 | | 004pA004pC004pU004pU007pC0 | |
| | | pU004pG004pG004pU004pG004 | | 04pA007pA004pG004pA004pA00 | |
| | | pA004pU004 | | 4pU004p001U004p001U004 | |
| 618 | 3126 | G004p001U004p001U004pC004 | 1024 | A004p001U007p001U004pG004p | 1265 |
| | | pA004pU004pG007pG004pU007 | | C004pA007pC004pU004pG004pA | |
| | | pG007pA007pU004pC004pA004 | | 004pU004pC004pA004pC007pC0 | |
| | | pG004pU004pG004pC004pA004 | | 04pA007pU004pG004pA004pA00 | |
| | | pA004pU004 | | 4pC004p001U004p001U004 | |
| 619 | 3129 | C004p001A004p001U004pG004 | 1025 | U004p001C007p001A004pA004p | 1266 |
| | | pG004pU004pG007pA004pU007 | | U004pU007pG004pC004pA004pC | |
| | | pC007pA007pG004pU004pG004 | | 004pU004pG004pA004pU007pC0 | |
| | | pC004pA004pA004pU004pU004 | | 04pA007pC004pC004pA004pU00 | |
| | | pG004pA004 | | 4pG004p001A004p001A004 | |
| 620 | 3130 | A004p001U004p001G004pG004 | 1026 | U004p001U007p001C004pA004p | 1267 |
| | | pU004pG004pA007pU004pC007 | | A004pU007pU004pG004pC004pA | |
| | | pA007pG007pU004pG004pC004 | | 004pC004pU004pG004pA007pU0 | |
| | | pA004pA004pU004pU004pG004 | | 04pC007pA004pC004pC004pA00 | |
| | | pA004pA004 | | 4pU004p001G004p001A004 | |
| 621 | 3208 | A004p001A004p001A004pC004 | 1027 | U004p001A007p001A004pC004p | 1268 |
| | | pU004pC004pC007pU004pG007 | | U004pA007pC004pA004pA004pA | |
| | | pA007pU007pU004pU004pU004 | | 004pA004pU004pC004pA007pG0 | |
| | | pG004pU004pA004pG004pU004 | | 04pG007pA004pG004pU004pU00 | |
| | | pU004pA004 | | 4pU004p001C004p001A004 | |
| 622 | 3212 | U004p001C004p001C004pU004 | 1028 | A004p001A007p001A004pU004p | 1269 |
| | | pG004pA004pU007pU004pU007 | | U004pA007pA004pC004pU004pA | |
| | | pU007pG007pU004pA004pG004 | | 004pC004pA004pA004pA007pA0 | |
| | | pU004pU004pA004pA004pU004 | | 04pU007pC004pA004pG004pG00 | |
| | | pU004pU004 | | 4pA004p001G004p001U004 | |
| 623 | 3213 | C004p001C004p001U004pG004 | 1029 | U004p001A007p001A004pA004p | 1270 |
| | | pA004pU004pU007pU004pU007 | | U004pU007pA004pA004pC004pU | |
| | | pG007pU007pA004pG004pU004 | | 004pA004pC004pA004pA007pA0 | |
| | | pU004pA004pA004pU004pU004 | | 04pA007pU004pC004pA004pG00 | |
| | | pU004pA004 | | 4pG004p001A004p001G004 | |
| 624 | 3229 | A004p001U004p001U004pU004 | 1030 | U004p001A007p001C004pA004p | 1271 |
| | | pA004pU004pU007pA004pA007 | | U004pC007pC004pC004pA004pG | |
| | | pG007pU007pC004pU004pG004 | | 004pA004pC004pU004pU007pA0 | |
| | | pG004pG004pA004pU004pG004 | | 04pA007pU004pA004pA004pA00 | |
| | | pU004pA004 | | 4pU004p001U004p001A004 | |
| 625 | 3230 | U004p001U004p001U004pA004 | 1031 | U004p001U007p001A004pC004p | 1272 |
| | | pU004pU004pA007pA004pG007 | | A004pU007pC004pC004pC004pA | |
| | | pU007pC007pU004pG004pG004 | | 004pG004pA004pC004pU007pU0 | |
| | | pG004pA004pU004pG004pU004 | | 04pA007pA004pU004pA004pA00 | |
| | | pA004pA004 | | 4pA004p001U004p001U004 | |
| 626 | 3256 | C004p001A004p001A004pG004 | 1032 | U004p001A007p001A004pC004p | 1273 |
| | | pA004pA004pG007pU004pA007 | | U004pU007pA004pG004pC004pU | |
| | | pA007pG007pA004pG004pC004 | | 004pC004pU004pU004pA007pC0 | |
| | | pU004pA004pA004pG004pU004 | | 04pU007pU004pC004pU004pU00 | |
| | | pU004pA004 | | 4pG004p001A004p001A004 | |
| 627 | 3460 | A004p001U004p001U004pU004 | 1033 | A004p001A007p001A004pU004p | 1274 |
| | | pA004pU004pC007pU004pC007 | | A004pG007pC004pC004pU004pG | |
| | | pC007pG007pC004pA004pG004 | | 004pC004pG004pG004pA007pG0 | |
| | | pG004pC004pU004pA004pU004 | | 04pA007pU004pA004pA004pA00 | |
| | | pU004pU004 | | 4pU004p001A004p001C004 | |
| 628 | 3465 | U004p001C004p001U004pC004 | 1034 | U004p001G007p001A004pA004p | 1275 |
| | | pC004pG004pC007pA004pG007 | | C004pA007pA004pA004pU004pA | |
| | | pG007pC007pU004pA004pU004 | | 004pG004pC004pC004pU007pG0 | |
| | | pU004pU004pG004pU004pU004 | | 04pC007pG004pG004pA004pG00 | |
| | | pC004pA004 | | 4pA004p001U004p001A004 | |
| 629 | 3466 | C004p001U004p001C004pC004 | 1035 | U004p001U007p001G004pA004p | 1276 |
| | | pG004pC004pA007pG004pG007 | | A004pC007pA004pA004pA004pU | |
| | | pc007pU007pA004pU004pU004 | | 004pA004pG004pC004pC007pU0 | |
| | | pU004pG004pU004pU004pC004 | | 04pG007pC004pG004pG004pA00 | |
| | | pA004pA004 | | 4pG004p001A004p001U004 | |
| 630 | 3482 | U004p001U004p001C004pA004 | 1036 | U004p001A007p001A004pA004p | 1277 |
| | | pG004pA004pG007pA004pG007 | | C004pA007pA004pA004pA004pG | |
| | | pG007pC007pC004pU004pU004 | | 004pG004pC004pC004pU007pC0 | |
| | | pU004pU004pG004pU004pU004 | | 04pU007pC004pU004pG004pA00 | |
| | | pU004pA004 | | 4pA004p001C004p001A004 | |
| 631 | 3484 | C004p001A004p001G004pA004 | 1037 | U004p001U007p001U004pA004p | 1278 |
| | | pG004pA004pG007pG004pC007 | | A004pA007pC004pA004pA004pA | |
| | | pC007pU007pU004pU004pU004 | | 004pA004pG004pG004pC007pC0 | |
| | | pG004pU004pU004pU004pA004 | | 04pU007pC004pU004pC004pU00 | |
| | | pA004pA004 | | 4pG004p001A004p001A004 | |
| 632 | 3487 | A004p001G004p001A004pG004 | 1038 | A004p001U007p001A004pU004p | 1279 |
| | | pG004pC004pC007pU004pU007 | | U004pU007pA004pA004pA004pC | |
| | | pU007pU007pG004pU004pU004 | | 004pA004pA004pA004pA007pG0 | |
| | | pU004pA004pA004pA004pU004 | | 04pG007pC004pC004pU004pC00 | |
| | | pA004pU004 | | 4pU004p001C004p001U004 | |
| 633 | 3532 | C004p001U004p001G004pG004 | 1039 | U004p001A007p001C004pA004p | 1280 |
| | | pA004pU004pU007pG004pG007 | | U004pG007pU004pU004pA004pU | |
| | | pC007pU007pA004pU004pA004 | | 004pA004pG004pC004pC007pA0 | |
| | | pA004pC004pA004pU004pG004 | | 04pA007pU004pC004pC004pA00 | |
| | | pU004pA004 | | 4pG004p001A004p001C004 | |
| 634 | 3533 | U004p001G004p001G004pA004 | 1040 | A004p001G007p001A004pC004p | 1281 |
| | | pU004pU004pG007pG004pC007 | | A004pU007pG004pU004pU004pA | |
| | | pU007pA007pU004pA004pA004 | | 004pU004pA004pG004pC007pC0 | |
| | | pC004pA004pU004pG004pU004 | | 04pA007pA004pU004pC004pC00 | |
| | | pC004pU004 | | 4pA004p001G004p001A004 | |
| 635 | 3537 | U004p001U004p001G004pG004 | 1041 | U004p001G007p001A004pA004p | 1282 |
| | | pC004pU004pA007pU004pA007 | | A004pG007pA004pC004pA004pU | |
| | | pA007pC007pA004pU004pG004 | | 004pG004pU004pU004pA007pU0 | |
| | | pU004pC004pU004pU004pU004 | | 04pA007pG004pC004pC004pA00 | |
| | | pC004pA004 | | 4pA004p001U004p001C004 | |
| 636 | 3654 | C004p001A004p001A004pG004 | 1042 | A004p001U007p001U004pU004p | 1283 |
| | | pA004pC004pU007pG004pG007 | | C004pU007pA004pA004pG004pG | |
| | | pG007pA007pC004pC004pU004 | | 004pU004pC004pC004pC007pA0 | |
| | | pU004pA004pG004pA004pA004 | | 04pG007pU004pC004pU004pU00 | |
| | | pA004pU004 | | 4pG004p001C004p001U004 | |
| 637 | 3655 | A004p001A004p001G004pA004 | 1043 | U004p001A007p001U004pU004p | 1284 |
| | | pC004pU004pG007pG004pG007 | | U004pC007pU004pA004pA004pG | |
| | | pA007pC007pC004pU004pU004 | | 004pG004pU004pC004pC007pC0 | |
| | | pA004pG004pA004pA004pA004 | | 04pA007pG004pU004pC004pU00 | |
| | | pU004pA004 | | 4pU004p001G004p001C004 | |
| 638 | 3714 | U004p001C004p001U004pA004 | 1044 | A004p001G007p001C004pA004p | 1285 |
| | | pA004pG004pC007pC004pA007 | | A004pU007pU004pA004pA004pA | |
| | | pA007pC007pU004pU004pU004 | | 004pG004pU004pU004pG007pG0 | |
| | | pA004pA004pU004pU004pG004 | | 04pC007pU004pU004pA004pG00 | |
| | | pC004pU004 | | 4pA004p001G004p001A004 | |
| 639 | 3773 | U004p001U004p001U004pG004 | 1045 | A004p001G007p001A004pU004p | 1286 |
| | | pU004pA004pA007pA004pC007 | | U004pU007pG004pA004pU004pA | |
| | | pU007pG007pU004pA004pU004 | | 004pC004pA004pG004pU007pU0 | |
| | | pC004pA004pA004pA004pU004 | | 04pU007pA004pC004pA004pA00 | |
| | | pC004pU004 | | 4pA004p001A004p001A004 | |
| 640 | 3784 | U004p001A004p001U004pC004 | 1046 | A004p001C007p001A004pA004p | 1287 |
| | | pA004pA004pA007pU004pC007 | | C004pA007pU004pA004pU004pA | |
| | | pU007pG007pU004pA004pU004 | | 004pC004pA004pG004pA007pU0 | |
| | | pA004pU004pG004pU004pU004 | | 04pU007pU004pG004pA004pU00 | |
| | | pG004pU004 | | 4pA004p001C004p001A004 | |
| 641 | 3814 | U004p001A004p001U004pG004 | 1047 | U004p001A007p001C004pU004p | 1288 |
| | | pC004pU004pA007pG004pU007 | | U004pC007pC004pA004pA004pU | |
| | | pU007pU007pA004pU004pU004 | | 004pA004pA004pA004pC007pU0 | |
| | | pG004pG004pA004pA004pG004 | | 04pA007pG004pC004pA004pU00 | |
| | | pU004pA004 | | 4pA004p001A004p001G004 | |
| 642 | 3825 | A004p001U004p001U004pG004 | 1048 | U004p001A007p001U004pU004p | 1289 |
| | | pG004pA004pA007pG004pU007 | | U004pC007pU004pU004pG004pA | |
| | | pG007pU007pU004pC004pA004 | | 004pA004pC004pA004pC007pU0 | |
| | | pA004pG004pA004pA004pA004 | | 04pU007pC004pC004pA004pA00 | |
| | | pU004pA004 | | 4pU004p001A004p001A004 | |
| 643 | 3827 | U004p001G004p001G004pA004 | 1049 | U004p001U007p001U004pA004p | 1290 |
| | | pA004pG004pU007pG004pU007 | | U004pU007pU004pC004pU004pU | |
| | | pU007pC007pA004pA004pG004 | | 004pG004pA004pA004pC007pA0 | |
| | | pA004pA004pA004pU004pA004 | | 04pC007pU004pU004pC004pC00 | |
| | | pA004pA004 | | 4pA004p001A004p001U004 | |
| 644 | 3850 | U004p001C004p001A004pA004 | 1050 | U004p001U007p001U004pU004p | 1291 |
| | | pC004pU004pU007pG004pU007 | | A004pU007pC004pA004pG004pU | |
| | | pG007pU007pA004pC004pU004 | | 004pA004pC004pA004pC007pA0 | |
| | | pG004pA004pU004pA004pA004 | | 04pA007pG004pU004pU004pG00 | |
| | | pA004pA004 | | 4pA004p001U004p001U004 | |
| 645 | 4097 | G004p001U004p001C004pA004 | 1051 | A004p001G007p001A004pU004p | 1292 |
| | | pG004pC004pA007pG004pA007 | | U004pC007pA004pA004pU004pA | |
| | | pG007pU007pU004pA004pU004 | | 004pA004pC004pU004pC007pU0 | |
| | | pU004pG004pA004pA004pU004 | | 04pG007pC004pU004pG004pA00 | |
| | | pC004pU004 | | 4pC004p001C004p001C004 | |
| 646 | 4120 | A004p001U004p001U004pU004 | 1052 | A004p001A007p001C004pU004p | 1293 |
| | | pU004pU004pU007pU004pU007 | | U004pG007pU004pA004pC004pA | |
| | | pA007pA007pU004pG004pU004 | | 004pU004pU004pA004pA007pA0 | |
| | | pA004pC004pA004pA004pG004 | | 04pA007pA004pA004pA004pA00 | |
| | | pU004pU004 | | 4pU004p001U004p001A004 | |

[0315] Table A below shows codes in the nucleotide sequences in Table 2 and the following Tables in the disclosure.

TABLE A

| | |
|---|---|
| p: phosphate group/phosphodiester linkage | |
| p001: phosphorothioate linker(PS) | |
| SS: sense strand | AS: antisense strand |
| B001: abasic nucleoside | |
| A000: unmodified adenosine (A) | G000: unmodified guanosine (G) |
| A002: deoxyriboadenosine (dA) | G002: deoxyriboguanosine (dG) |
| A004: adenosine/2′ OMe | G004: guanosine/2′ OMe |
| A005: adenosine/2′ MOE | G005: guanosine/2′ MOE |
| A007: adenosine/2′ F | G007: guanosine/2′ F |
| A1016: GNA with adenine | G1016: GNA with guanine |
| A042: TNA with adenine | G042: TNA with guanine |
| A1017: locked nucleotide with adenine | G1017: locked nucleotide with guanine |
| X033A1027: adenosine/5′(E)-VP-2′-OMe | X033G1027: guanosine/5′(E)-VP-2′-OMe |
| C000: unmodified cytidine (C) | U000: unmodified uridine (U) |
| C002: deoxyribocytidine (dC) | T000: ribothymidine |
| C004: cytidine/2′ OMe | T002: deoxyribothymidine (dT) |
| C005 or C005*: 5-methyl-cytidine/2′ MOE | U004: uridine/2′ OMe |
| C007: cytidine/2′ F | T005: ribothymidine (5-methyl uridine)/2′ MOE |
| C1016: GNA with cytosine | U007: uridine/2′ F |
| C042: TNA with cytosine | U1016: GNA with uracil |
| C1017: locked nucleotide with cytosine | U042: TNA with uracil |
| X033C1027: cytidine/5′(E)-VP-2′-OMe | U1017: locked nucleotide with uracil |
| | X033U1027: uridine/5′(E)-VP-2′-OMe |

[0316] The sequences and sequence lists including modified nucleosides (e.g., RNA, RNA modified at a 2′-OH sugar moiety, or RNA modified at a nucleobase) in the disclosure (e.g., Tables 5-8, 10, and 14) are indicated with codes defined in Table A unless otherwise indicated. Each code consists of a letter representing a type of the nucleobase, e.g., “A”, “G”, “C”, “U,” or “T” and a numeric code representing a type of modification on a sugar ring.

[0317] For example, if a nucleoside is coded as “T005”, it is meant by a RNA nucleoside including a 2′-MOE sugar moiety and a thymine (or methylated uracil) as “T” indicates a thymine (or methylated uracil) nucleobase and “005” indicates a 2′-MOE substituent at 2′-OH position on the sugar ring.

[0318] In particular example, if a nucleoside is coded as “C005*”, it is meant by a RNA nucleoside including a 5-methylated cytosine and a 2′-MOE sugar moiety as “C” indicates a type of specific nucleobase, i.e. 5-methylated cytosine, that can exist in combination with a 2′-MOE sugar moiety and “005” indicates a 2′-MOE substituent at 2′-OH position on the sugar ring.

[0319] The nucleosides in each sequence of the dsRNA are connected via phosphodiester group (“p” in Table A) or modification thereof (e.g., phosphorothioate linkage “p001” in Table A). In some embodiments, an example nucleotide may include a nucleoside and 3′-phosphodiester group. Example nucleotides may be presented in in Table A-1.

TABLE A-1

| Code for | | |
|---|---|---|
| nucleotide | 5′-end first nucleotide | Other position |
| A004p: 2′-O-methyl adenosine-3′- phosphate | [chemical structure] | [chemical structure] |
| U004p: 2′-O-methyl uridine-3′- phosphate | [chemical structure] | [chemical structure] |
| C004p: 2′-O-methyl cytidine-3′- phosphate | [chemical structure] | [chemical structure] |
| G004p: 2′-O-methyl guanosine-3′- phosphate | [chemical structure] | [chemical structure] |
| A004p001: 2′-O-methyl adenosine-3′- phosphorothioate | [chemical structure] | [chemical structure] |
| U004p001: 2′-O-methyl uridine-3′- phosphorothioate | [chemical structure] | [chemical structure] |
| C004p001: 2′-O-methyl cytidine-3′- phosphorothioate | [chemical structure] | [chemical structure] |
| G004p001: 2′-O-methyl guanosine-3′- phosphorothioate | [chemical structure] | [chemical structure] |
| A005p: 2′-O- methoxyethyl (MOE) adenosine-3′- phosphate | [chemical structure] | [chemical structure] |
| T005p: 2′-O-methoxyethyl (MOE) thymidine (or 5- methyl uridine)-3′- phosphate | [chemical structure] | [chemical structure] |
| C005*p: 2′-O-methoxyethyl (MOE) 5-methyl-cytidine- 3′-phosphate | [chemical structure] | [chemical structure] |
| G005p: 2′-O-methoxyethyl (MOE) guanosine-3′- phosphate | [chemical structure] | [chemical structure] |
| A005p001: 2′-O- methoxyethyl (MOE) adenosine-3′- phosphorothioate | [chemical structure] | [chemical structure] |
| T005p001: 2′-O-methoxyethyl (MOE) thymidine (or 5- methyl uridine)-3′- phosphorothioate | [chemical structure] | [chemical structure] |
| C005*p001: 2′-O-methoxyethyl (MOE) 5-methyl-cytidine- 3′- phosphorothioate | [chemical structure] | [chemical structure] |
| G005p001: 2′-O-methoxyethyl (MOE) guanosine-3′- phosphorothioate | [chemical structure] | [chemical structure] |
| A007p: 2′-fluoro adenosine-3′- phosphate | [chemical structure] | [chemical structure] |
| U007p: 2′-fluoro uridine-3′- phosphate | [chemical structure] | [chemical structure] |
| C007p: 2′-fluoro cytidine-3′- phosphate | [chemical structure] | [chemical structure] |
| G007p: 2′-fluoro guanosine-3′- phosphate | [chemical structure] | [chemical structure] |
| A007p001: 2′-fluoro adenosine-3′- phosphorothioate | [chemical structure] | [chemical structure] |
| U007p001: 2′-fluoro uridine-3′- phosphorothioate | [chemical structure] | [chemical structure] |
| C007p001: 2′-fluoro cytidine-3′- phosphorothioate | [chemical structure] | [chemical structure] |
| G007p001: 2′-fluoro guanosine-3′- phosphorothioate | [chemical structure] | [chemical structure] |
| T002p: 2′- deoxyribothymidine- 3′-phosphate | [chemical structure] | [chemical structure] |
| T002p001: 2′- deoxythymidine- 3′- phosphorothioate | [chemical structure] | [chemical structure] |
| A1016p: GNA with adenine-2′- phosphate | [chemical structure] | [chemical structure] |
| U1016p: GNA with uracil- 2′-phosphate | [chemical structure] | [chemical structure] |
| C1016p: GNA with cytosine-2′- phosphate | [chemical structure] | [chemical structure] |
| G1016p: GNA with guanine-2′- phosphate | [chemical structure] | [chemical structure] |
| A042p: TNA with adenine-2′- phosphate | [chemical structure] | [chemical structure] |
| U042p: TNA with uracil-2′- phosphate | [chemical structure] | [chemical structure] |
| C042p: TNA with cytosine-2′- phosphate | [chemical structure] | [chemical structure] |
| G042p: TNA with guanine-2′- phosphate | [chemical structure] | [chemical structure] |
| A042p001: TNA with adenine-2′- phosphorothioate | [chemical structure] | [chemical structure] |
| U042p001: TNA with uracil-2′- phosphorothioate | [chemical structure] | [chemical structure] |
| C042p001: TNA with cytosine-2′- phosphorothioate | [chemical structure] | [chemical structure] |
| G042p001: TNA with guanine-2′- phosphate | [chemical structure] | [chemical structure] |
| X033A1027p001: 5′-(E)- vinylphosphonate- 2′-O-methyl adenosine-3′- phosphorothioate | [chemical structure] | |
| X033U1027p001: 5′-(E)- vinylphosphonate- 2′-O-methyl uridine-3′- phosphorothioate | [chemical structure] | |
| X033C1027p001: 5′-(E)- vinylphosphonate- 2′-O-methyl cytidine-3′- phosphorothioate | [chemical structure] | |
| X033G1027p001: 5′-(E)- vinylphosphonate- 2′-O-methyl guanosine-3′- phosphorothioate | [chemical structure] | |

[0320] In some embodiments, the dsRNA includes a sense strand having 10 contiguous nucleotides differing by no more than 3 nucleotides from the nucleotide sequence selected from SEQ ID NOs: 812 to 1052. In some embodiments, the dsRNA includes an antisense strand having 10 contiguous nucleotides differing by no more than 3 nucleotides from the nucleotide sequence of SEQ ID NOs: 1053 to 1293. In some embodiments, the dsRNA includes a sense strand having 11 contiguous nucleotides differing by no more than 3 nucleotides from the nucleotide sequence selected from SEQ ID NOs: 812 to 1052. In some embodiments, the dsRNA includes an antisense strand having 11 contiguous nucleotides differing by no more than 3 nucleotides from the nucleotide sequence selected from SEQ ID NOs: 1053 to 1293. In some embodiments, the dsRNA includes a sense strand having 12 contiguous nucleotides differing by no more than 3 nucleotides from the nucleotide sequence selected from SEQ ID NOs: 812 to 1052. In some embodiments, the dsRNA includes an antisense strand having 12 contiguous nucleotides differing by no more than 3 nucleotides from the nucleotide sequence selected from SEQ ID NOs: 1053 to 1293. In some embodiments, the dsRNA includes a sense strand having 13 contiguous nucleotides differing by no more than 3 nucleotides from the nucleotide sequence selected from SEQ ID NOs: 812 to 1052. In some embodiments, the dsRNA includes an antisense strand having 13 contiguous nucleotides differing by no more than 3 nucleotides from the nucleotide sequence selected from SEQ ID NOs: 1053 to 1293. In some embodiments, the dsRNA includes a sense strand having 14 contiguous nucleotides differing by no more than 3 nucleotides from the nucleotide sequence selected from SEQ ID NOs: 812 to 1052. In some embodiments, the dsRNA includes an antisense strand having 14 contiguous nucleotides differing by no more than 3 nucleotides from the nucleotide sequence selected from SEQ ID NOs: 1053 to 1293. In some embodiments, the dsRNA includes a sense strand having 15 contiguous nucleotides differing by no more than 3 nucleotides from the nucleotide sequence selected from SEQ ID NOs: 812 to 1052. In some embodiments, the dsRNA includes an antisense strand having 15 contiguous nucleotides differing by no more than 3 nucleotides from the nucleotide sequence selected from SEQ ID NOs: 1053 to 1293. In some embodiments, the dsRNA includes a sense strand having 16 contiguous nucleotides differing by no more than 3 nucleotides from the nucleotide sequence selected from SEQ ID NOs: 812 to 1052. In some embodiments, the dsRNA includes an antisense strand having 16 contiguous nucleotides differing by no more than 3 nucleotides from the nucleotide sequence selected from SEQ ID NOs: 1053 to 1293. In some embodiments, the dsRNA includes a sense strand having 17 contiguous nucleotides differing by no more than 3 nucleotides from the nucleotide sequence selected from SEQ ID NOs: 812 to 1052. In some embodiments, the dsRNA includes an antisense strand having 17 contiguous nucleotides differing by no more than 3 nucleotides from the nucleotide sequence selected from SEQ ID NOs: 1053 to 1293. In some embodiments, the dsRNA includes a sense strand having 18 contiguous nucleotides differing by no more than 3 nucleotides from the nucleotide sequence selected from SEQ ID NOs: 812 to 1052. In some embodiments, the dsRNA includes an antisense strand having 18 contiguous nucleotides differing by no more than 3 nucleotides from the nucleotide sequence selected from SEQ ID NOs: 1053 to 1293. In some embodiments, the dsRNA includes a sense strand having 19 contiguous nucleotides differing by no more than 3 nucleotides from the nucleotide sequence selected from SEQ ID NOs: 812 to 1052. In some embodiments, the dsRNA includes an antisense strand having 19 contiguous nucleotides differing by no more than 3 nucleotides from the nucleotide sequence selected from SEQ ID NOs: 1053 to 1293. In some embodiments, the dsRNA includes a sense strand having 20 contiguous nucleotides differing by no more than 3 nucleotides from the nucleotide sequence selected from SEQ ID NOs: 812 to 1052. In some embodiments, the dsRNA includes an antisense strand having 20 contiguous nucleotides differing by no more than 3 nucleotides from the nucleotide sequence selected from SEQ ID NOs: 1053 to 1293. In some embodiments, the dsRNA includes a sense strand having 21 contiguous nucleotides differing by no more than 3 nucleotides from the nucleotide sequence selected from SEQ ID NOs: 812 to 1052. In some embodiments, the dsRNA includes an antisense strand having 21 contiguous nucleotides differing by no more than 3 nucleotides from the nucleotide sequence selected from SEQ ID NOs: 1053 to 1293.

[0321] In some embodiments, the dsRNA includes a sense strand having 10 contiguous nucleotides differing by no more than 2 nucleotides from the nucleotide sequence selected from SEQ ID NOs: 812 to 1052. In some embodiments, the dsRNA includes an antisense strand having 10 contiguous nucleotides differing by no more than 2 nucleotides from the nucleotide sequence selected from SEQ ID NOs: 1053 to 1293. In some embodiments, the dsRNA includes a sense strand having 11 contiguous nucleotides differing by no more than 2 nucleotides from the nucleotide sequence selected from SEQ ID NOs: 812 to 1052. In some embodiments, the dsRNA includes an antisense strand having 11 contiguous nucleotides differing by no more than 2 nucleotides from the nucleotide sequence selected from SEQ ID NOs: 1053 to 1293. In some embodiments, the dsRNA includes a sense strand having 12 contiguous nucleotides differing by no more than 2 nucleotides from the nucleotide sequence selected from SEQ ID NOs: 812 to 1052. In some embodiments, the dsRNA includes an antisense strand having 12 contiguous nucleotides differing by no more than 2 nucleotides from the nucleotide sequence selected from SEQ ID NOs: 1053 to 1293. In some embodiments, the dsRNA includes a sense strand having 13 contiguous nucleotides differing by no more than 2 nucleotides from the nucleotide sequence selected from SEQ ID NOs: 812 to 1052. In some embodiments, the dsRNA includes an antisense strand having 13 contiguous nucleotides differing by no more than 2 nucleotides from the nucleotide sequence selected from SEQ ID NOs: 1053 to 1293. In some embodiments, the dsRNA includes a sense strand having 14 contiguous nucleotides differing by no more than 2 nucleotides from the nucleotide sequence selected from SEQ ID NOs: 812 to 1052. In some embodiments, the dsRNA includes an antisense strand having 14 contiguous nucleotides differing by no more than 2 nucleotides from the nucleotide sequence selected from SEQ ID NOs: 1053 to 1293. In some embodiments, the dsRNA includes a sense strand having 15 contiguous nucleotides differing by no more than 2 nucleotides from the nucleotide sequence selected from SEQ ID NOs: 812 to 1052. In some embodiments, the dsRNA includes an antisense strand having 15 contiguous nucleotides differing by no more than 2 nucleotides from the nucleotide sequence selected from SEQ ID NOs: 1053 to 1293. In some embodiments, the dsRNA includes a sense strand having 16 contiguous nucleotides differing by no more than 2 nucleotides from the nucleotide sequence selected from SEQ ID NOs: 812 to 1052. In some embodiments, the dsRNA includes an antisense strand having 16 contiguous nucleotides differing by no more than 2 nucleotides from the nucleotide sequence selected from SEQ ID NOs: 1053 to 1293. In some embodiments, the dsRNA includes a sense strand having 17 contiguous nucleotides differing by no more than 2 nucleotides from the nucleotide sequence selected from SEQ ID NOs: 812 to 1052. In some embodiments, the dsRNA includes an antisense strand having 17 contiguous nucleotides differing by no more than 2 nucleotides from the nucleotide sequence selected from SEQ ID NOs: 1053 to 1293. In some embodiments, the dsRNA includes a sense strand having 18 contiguous nucleotides differing by no more than 2 nucleotides from the nucleotide sequence selected from SEQ ID NOs: 812 to 1052. In some embodiments, the dsRNA includes an antisense strand having 18 contiguous nucleotides differing by no more than 2 nucleotides from the nucleotide sequence selected from SEQ ID NOs: 1053 to 1293. In some embodiments, the dsRNA includes a sense strand having 19 contiguous nucleotides differing by no more than 2 nucleotides from the nucleotide sequence selected from SEQ ID NOs: 812 to 1052. In some embodiments, the dsRNA includes an antisense strand having 19 contiguous nucleotides differing by no more than 2 nucleotides from the nucleotide sequence selected from SEQ ID NOs: 1053 to 1293. In some embodiments, the dsRNA includes a sense strand having 20 contiguous nucleotides differing by no more than 2 nucleotides from the nucleotide sequence selected from SEQ ID NOs: 812 to 1052. In some embodiments, the dsRNA includes an antisense strand having 20 contiguous nucleotides differing by no more than 2 nucleotides from the nucleotide sequence selected from SEQ ID NOs: 1053 to 1293. In some embodiments, the dsRNA includes a sense strand having 21 contiguous nucleotides differing by no more than 2 nucleotides from the nucleotide sequence selected from SEQ ID NOs: 812 to 1052. In some embodiments, the dsRNA includes an antisense strand having 21 contiguous nucleotides differing by no more than 2 nucleotides from the nucleotide sequence selected from SEQ ID NOs: 1053 to 1293.

[0322] In some embodiments, the dsRNA includes a sense strand having 10 contiguous nucleotides differing by no more than 1 nucleotide from the nucleotide sequence selected from SEQ ID NOs: 812 to 1052. In some embodiments, the dsRNA includes an antisense strand having 10 contiguous nucleotides differing by no more than 1 nucleotide from the nucleotide sequence selected from SEQ ID NOs: 1053 to 1293. In some embodiments, the dsRNA includes a sense strand having 11 contiguous nucleotides differing by no more than 1 nucleotide from the nucleotide sequence selected from SEQ ID NOs: 812 to 1052. In some embodiments, the dsRNA includes an antisense strand having 11 contiguous nucleotides differing by no more than 1 nucleotide from the nucleotide sequence selected from SEQ ID NOs: 1053 to 1293. In some embodiments, the dsRNA includes a sense strand having 12 contiguous nucleotides differing by no more than 1 nucleotide from the nucleotide sequence selected from SEQ ID NOs: 812 to 1052. In some embodiments, the dsRNA includes an antisense strand having 12 contiguous nucleotides differing by no more than 1 nucleotide from the nucleotide sequence selected from SEQ ID NOs: 1053 to 1293. In some embodiments, the dsRNA includes a sense strand having 13 contiguous nucleotides differing by no more than 1 nucleotide from the nucleotide sequence selected from SEQ ID NOs: 812 to 1052. In some embodiments, the dsRNA includes an antisense strand having 13 contiguous nucleotides differing by no more than 1 nucleotide from the nucleotide sequence selected from SEQ ID NOs: 1053 to 1293. In some embodiments, the dsRNA includes a sense strand having 14 contiguous nucleotides differing by no more than 1 nucleotide from the nucleotide sequence selected from SEQ ID NOs: 812 to 1052. In some embodiments, the dsRNA includes an antisense strand having 14 contiguous nucleotides differing by no more than 1 nucleotide from the nucleotide sequence selected from SEQ ID NOs: 1053 to 1293. In some embodiments, the dsRNA includes a sense strand having 15 contiguous nucleotides differing by no more than 1 nucleotide from the nucleotide sequence selected from SEQ ID NOs: 812 to 1052. In some embodiments, the dsRNA includes an antisense strand having 15 contiguous nucleotides differing by no more than 1 nucleotide from the nucleotide sequence selected from SEQ ID NOs: 1053 to 1293. In some embodiments, the dsRNA includes a sense strand having 16 contiguous nucleotides differing by no more than 1 nucleotide from the nucleotide sequence selected from SEQ ID NOs: 812 to 1052. In some embodiments, the dsRNA includes an antisense strand having 16 contiguous nucleotides differing by no more than 1 nucleotide from the nucleotide sequence selected from SEQ ID NOs: 1053 to 1293. In some embodiments, the dsRNA includes a sense strand having 17 contiguous nucleotides differing by no more than 1 nucleotide from the nucleotide sequence selected from SEQ ID NOs: 812 to 1052. In some embodiments, the dsRNA includes an antisense strand having 17 contiguous nucleotides differing by no more than 1 nucleotide from the nucleotide sequence selected from SEQ ID NOs: 1053 to 1293. In some embodiments, the dsRNA includes a sense strand having 18 contiguous nucleotides differing by no more than 1 nucleotide from the nucleotide sequence selected from SEQ ID NOs: 812 to 1052. In some embodiments, the dsRNA includes an antisense strand having 18 contiguous nucleotides differing by no more than 1 nucleotide from the nucleotide sequence selected from SEQ ID NOs: 1053 to 1293. In some embodiments, the dsRNA includes a sense strand having 19 contiguous nucleotides differing by no more than 1 nucleotide from the nucleotide sequence selected from SEQ ID NOs: 812 to 1052. In some embodiments, the dsRNA includes an antisense strand having 19 contiguous nucleotides differing by no more than 1 nucleotide from the nucleotide sequence selected from SEQ ID NOs: 1053 to 1293. In some embodiments, the dsRNA includes a sense strand having 20 contiguous nucleotides differing by no more than 1 nucleotide from the nucleotide sequence selected from SEQ ID NOs: 812 to 1052. In some embodiments, the dsRNA includes an antisense strand having 20 contiguous nucleotides differing by no more than 1 nucleotide from the nucleotide sequence selected from SEQ ID NOs: 1053 to 1293. In some embodiments, the dsRNA includes a sense strand having 21 contiguous nucleotides differing by no more than 1 nucleotide from the nucleotide sequence selected from SEQ ID NOs: 812 to 1052. In some embodiments, the dsRNA includes an antisense strand having 21 contiguous nucleotides differing by no more than 1 nucleotide from the nucleotide sequence selected from SEQ ID NOs: 1053 to 1293. In some embodiments, the dsRNA includes an antisense strand having 22 contiguous nucleotides differing by no more than 1 nucleotide from the nucleotide sequence selected from SEQ ID NOs: 1053 to 1293. In some embodiments, the dsRNA includes an antisense strand having 23 contiguous nucleotides differing by no more than 1 nucleotide from the nucleotide sequence selected from SEQ ID NOs: 1053 to 1293.

[0323] In some embodiments, the dsRNA includes (i) a sense strand having 15 contiguous nucleotides differing by no more than one, two or three nucleotides from the nucleotide sequence selected from SEQ ID NOs: 812 to 1052 and (ii) an antisense strand forming a duplex with the sense strand of (i) and having 15 contiguous nucleotides differing by no more than one, two or three nucleotides from the nucleotide sequence selected from SEQ ID NOs: 1053 to 1293. In some embodiments, the dsRNA includes (i) a sense strand having 16 contiguous nucleotides differing by no more than one, two or three from the nucleotide sequence selected from SEQ ID NOs: 812 to 1052 and (ii) an antisense strand forming a duplex with the sense strand of (i) and having 16 contiguous nucleotides differing by no more than one, two or three nucleotides from the nucleotide sequence selected from SEQ ID NOs: 1053 to 1293. In some embodiments, the dsRNA includes (i) a sense strand having 17 contiguous nucleotides differing by no more than one, two or three nucleotides from the nucleotide sequence selected from SEQ ID NOs: 812 to 1052 and (ii) an antisense strand forming a duplex with the sense strand of (i) and having 17 contiguous nucleotides differing by no more than one, two or three nucleotides from the nucleotide sequence selected from SEQ ID NOs: 1053 to 1293. In some embodiments, the dsRNA includes (i) a sense strand having 18 contiguous nucleotides differing by no more than one, two or three nucleotides from the nucleotide sequence selected from SEQ ID NOs: 812 to 1052 and (ii) an antisense strand forming a duplex with the sense strand of (i) and having 18 contiguous nucleotides differing by no more than one, two or three nucleotides from the nucleotide sequence selected from SEQ ID NOs: 1053 to 1293. In some embodiments, the dsRNA includes (i) a sense strand having 19 contiguous nucleotides differing by no more than one, two or three nucleotides from the nucleotide sequence selected from SEQ ID NOs: 812 to 1052 and (ii) an antisense strand forming a duplex with the sense strand of (i) and having 19 contiguous nucleotides differing by no more than one, two or three nucleotides from the nucleotide sequence selected from SEQ ID NOs: 1053 to 1293. In some embodiments, the dsRNA includes (i) a sense strand having 20 contiguous nucleotides differing by no more than one, two or three nucleotides from the nucleotide sequence selected from SEQ ID NOs: 812 to 1052 and (ii) an antisense strand forming a duplex with the sense strand of (i) and having 20 contiguous nucleotides differing by no more than one, two or three nucleotides from the nucleotide sequence selected from SEQ ID NOs: 1053 to 1293. In some embodiments, the dsRNA includes (i) a sense strand having 21 contiguous nucleotides differing by no more than one, two or three nucleotides from the nucleotide sequence selected from SEQ ID NOs: 812 to 1052 and (ii) an antisense strand forming a duplex with the sense strand of (i) and having 21 contiguous nucleotides differing by no more than one, two or three nucleotides from the nucleotide sequence selected from SEQ ID NOs: 1053 to 1293.

[0324] In certain aspects, when a sense strand or an antisense strand of a dsRNA in above paragraphs is differing by a certain number of nucleotides (e.g., one, two or three nucleotides) from a specific sequence (e.g., SEQ ID NOs: 812 to 1293), it is meant by that the sense strand or the antisense strand includes one, two or three nucleotides, having different nucleobases and/or different modifications compared to the nucleobases and/or the modifications of the nucleotides at the corresponding positions of the specific sequence (e.g., SEQ ID NOs: 812 to 1293). In some embodiments, when a sense strand or an antisense strand is differing by a certain number of nucleotides (e.g., one, two or three nucleotides) from a specific sequence (e.g., SEQ ID NOs: 812 to 1293), the sense strand or the antisense strand includes one, two, or three nucleotides, having different nucleobases compared to the nucleobases of the nucleotides at the corresponding positions of the specific sequence (e.g., SEQ ID NOs: 812 to 1293). In some embodiments, when a sense strand or an antisense strand is differing by a certain number of nucleotides (e.g., one, two or three nucleotides) from a specific sequence (e.g., SEQ ID NOs: 812 to 1293), the sense strand or the antisense strand includes one, two, or three nucleotides, having different modifications compared to the modifications of the nucleotides at the corresponding positions of the specific sequence (e.g., SEQ ID NOs: 812 to 1293). In some embodiments, when a sense strand or an antisense strand is differing by a certain number of nucleotides (e.g., one, two or three nucleotides) from a specific sequence (e.g., SEQ ID NOs: 812 to 1293), the sense strand or the antisense strand includes one, two, or three nucleotides having different nucleobases and different modifications compared to the nucleobases and the modifications of the nucleotides at the corresponding positions of the specific sequence (e.g., SEQ ID NOs: 812 to 1293).

[0325] In certain aspects, when a sense strand or an antisense strand of a dsRNA in above paragraphs is differing by a certain number of nucleotides (e.g., one, two or three nucleotides) from a specific sequence (e.g., SEQ ID NOs: 812 to 1293), it is meant by that the sense strand or the antisense strand includes one, two or three nucleotides, having different nucleobases, different modifications, and/or different phosphate linkages (e.g., phosphorothioate (PS)), compared to the nucleobases, the modifications, and/or the phosphate linkages of the nucleotides at the corresponding positions of the specific sequence (e.g., SEQ ID NOs: 812 to 1293). In some embodiments, when a sense strand or an antisense strand is differing by a certain number of nucleotides (e.g., one, two or three nucleotides) from a specific sequence (e.g., SEQ ID NOs: 812 to 1293), the sense strand or the antisense strand includes one, two, or three nucleotides, having different phosphate linkages compared to the phosphate linkages of the nucleotides at the corresponding positions of the specific sequence (e.g., SEQ ID NOs: 812 to 1293). In some embodiments, when a sense strand or an antisense strand is differing by a certain number of nucleotides (e.g., one, two or three nucleotides) from a specific sequence (e.g., SEQ ID NOs: 812 to 1293), the sense strand or the antisense strand includes one, two, or three nucleotides, having different nucleobases and different phosphate linkages compared to the nucleobases and the phosphate linkages of the nucleotides at the corresponding positions of the specific sequence (e.g., SEQ ID NOs: 812 to 1293). In some embodiments, when a sense strand or an antisense strand is differing by a certain number of nucleotides (e.g., one, two or three nucleotides) from a specific sequence (e.g., SEQ ID NOs: 812 to 1293), the sense strand or the antisense strand includes one, two, or three nucleotides, having different modifications and different phosphate linkages compared to the modifications and the phosphate linkages of the nucleotides at the corresponding positions of the specific sequence (e.g., SEQ ID NOs: 812 to 1293). In some embodiments, when a sense strand or an antisense strand is differing by a certain number of nucleotides (e.g., one, two or three nucleotides) from a specific sequence (e.g., SEQ ID NOs: 812 to 1293), the sense strand or the antisense strand includes one, two, or three nucleotides having different nucleobases, different modifications, and different phosphate linkages compared to the nucleobases, the modifications, and the phosphate linkages of the nucleotides at the corresponding positions of the specific sequence (e.g., SEQ ID NOs: 812 to 1293).

[0326] In certain aspects, the first nucleotide from the 5′ end of each strand (e.g., sense strand and antisense strand) may include an additional phosphate group or a variant thereof (e.g., phosphorothioate, phosphorodithioate, methylphosphonate, methylene phosphonate, or vinylphosphonate (VP)) attached or linked to the 5′ terminal group of the first nucleotide.

[0327] In some embodiments, the first nucleotide from the 5′ end of each strand (e.g., sense strand and antisense strand) includes a 5′-vinylphosphonate (5′-VP) group that is a chemical moiety having the structure of

[chemical structure]

or salts thereof, wherein [symbol] represents the point of attachment to the 5′ carbon of the pentafuranosyl sugar. In some embodiments, the first nucleotide from the 5′ end of each strand (e.g., sense strand and antisense strand) may include (E)-vinylphosphonate (VP) having a structure of

[chemical structure]

wherein [symbol] represents the point of attachment to the 4′ carbon of the pentafuranosyl sugar. In some embodiments, the first nucleotide from the 5′ end of each strand (e.g., sense strand and antisense strand) may include (Z)-vinylphosphonate having a structure of

[chemical structure]

wherein [symbol] represents the point of attachment to the 4′ carbon of the pentafuranosyl sugar.

[0328] In certain aspects, one or more of the modified nucleotides contain a 2′ modification (e.g., 2′-OMe, 2′-F, 2′-MOE, 2′-deoxy, etc.) and an internucleoside linkage modification (e.g., phosphorothioate or (E)-vinylphosphonate). In some embodiments, one or more of the modified nucleotides contain 2′-OMe modification and phosphorothioate group. In some embodiments, one or more of the modified nucleotides contain 2′-OMe modification and (E)-vinylphosphonate group. In some embodiments, one or more of the modified nucleotides contain 2′-F modification and phosphorothioate group. In some embodiments, one or more of the modified nucleotides contain 2′-F and (E)-vinylphosphonate group. In some embodiments, one or more of the modified nucleotides contain 2′-MOE modification and phosphorothioate group. In some embodiments, one or more of the modified nucleotides contain 2′-MOE modification and (E)-vinylphosphonate group. In some embodiments, one or more of the modified nucleotides contain 2′-deoxy modification and phosphorothioate group. In some embodiments, one or more of the modified nucleotides contain 2′-OMe modification and (E)-vinylphosphonate group. In some embodiments, one or more of the modified nucleotides are GNA containing (E)-vinylphosphonate group. In some embodiments, one or more of the modified nucleotides are GNA containing a phosphorothioate group.

[0329] In certain aspects, the modified nucleotides contain one or more modifications on a modified nucleobase. In some embodiments, one or more of the modified nucleotides may include thymine (“T”) nucleobase (“ribothymidine” or “5-methyluridine”) in the ribonucleotide (e.g., including 2′-OH). In some embodiments, one or more of the modified nucleotides may include methylcytosine nucleobase (e.g., 5-methylcytidine or N4-methylcytidine). In certain aspects, one or more of the modified nucleotides may contain no nucleobase or be abasic.

### Sense Strand (SS)

[0330] In certain aspects, a sense strand of the dsRNA agent(s) as described herein are substantially (e.g., greater than about 80%, 85%, 90%, or 95% of the total nucleotides) made of modified nucleotides. In another certain aspect, the sense strand is entirely made of modified nucleotides.

[0331] In certain aspects, a sense strand of the dsRNA agent(s) as described herein includes two or more 2′-MOE modifications. In some embodiments, the sense strand includes two, four, six or eight 2′-MOE modifications. In some embodiments, the sense strand includes two 2′-MOE modifications. In some embodiments, the sense strand includes four 2′-MOE modifications. In some embodiments, the sense strand includes six 2′-MOE modifications. In some embodiments, the sense strand includes eight 2′-MOE modifications.

[0332] In some embodiments, the 2′-MOE modified nucleotides in the sense strand as described herein include a structure of

[chemical structure]

or a pharmaceutically acceptable salt thereof, wherein [symbol] is an attachment point to a linkage (e.g., phosphate or phosphorothioate group) or the adjacent nucleotides and “Base” is a nucleobase.

[0333] In some embodiments, the 2′-MOE modified nucleotides in the sense strand as described herein include a structure of

[chemical structure]

or a pharmaceutically acceptable salt thereof, wherein [symbol] is an attachment point to a terminal group (e.g., H, OH, or salt) or the adjacent nucleotides and “Base” is a nucleobase. In some embodiments, the 2′-MOE modified nucleotides in the sense strand as described herein include a structure of

[chemical structure]

or a pharmaceutically acceptable salt thereof.

[0334] In some embodiments, the 2′-MOE modified nucleotides include a structure of

[chemical structure]

or a pharmaceutically acceptable salt thereof, wherein [symbol] is an attachment point to a terminal group (e.g., H, OH, or salt) or the adjacent nucleotides. In some embodiments, the 2′-MOE modified nucleotides include a structure of

[chemical structure]

or a pharmaceutically acceptable salt thereof. In some embodiments, the 2′-MOE modified nucleotides include a structure of

[chemical structure]

or a pharmaceutically acceptable salt thereof.

[0335] In some embodiments, the 2′-MOE modified nucleotides include a nucleotide having a structure of

[chemical structure]

or a pharmaceutically acceptable salt thereof, wherein [symbol] is an attachment point to a terminal group (e.g., H, OH, or salt) or the adjacent nucleotides. In some embodiments, the 2′-MOE modified nucleotides include a nucleotide having a structure of

[chemical structure]

or a pharmaceutically acceptable salt thereof. In some embodiments, the 2′-MOE modified nucleotides include a nucleotide having a structure of

[chemical structure]

or a pharmaceutically acceptable salt thereof. In some embodiments, the 2′-MOE modified nucleotides include a nucleotide having a structure of

[chemical structure]

or a pharmaceutically acceptable salt thereof.

[0336] In some embodiments, the 2′-MOE modified nucleotides in the sense strand as described herein include a nucleotide having a structure of

[chemical structure]

or a pharmaceutically acceptable salt thereof, wherein [symbol] is an attachment point to a terminal group (e.g., H, OH, or salt) or the adjacent nucleotides. In some embodiments, the 2′-MOE modified nucleotides in the sense strand as described herein include a nucleotide having a structure of

[chemical structure]

or a pharmaceutically acceptable salt thereof.

[0337] In some embodiments, the 2′-MOE modified nucleotides include a nucleotide having a structure of

[chemical structure]

or a pharmaceutically acceptable salt thereof, wherein [symbol] is an attachment point to a terminal group (e.g., H, OH, or salt) or the adjacent nucleotides. In some embodiments, the 2′-MOE modified nucleotides include a nucleotide having a structure of

[chemical structure]

or a pharmaceutically acceptable salt thereof.

[0338] In certain aspects, at least one of the 2′-MOE modified nucleotides in the sense strand as described herein has a structure of

[chemical structure]

or a pharmaceutically acceptable salt thereof, wherein [symbol] is an attachment point to a terminal group (e.g., H, OH, or salt) or the adjacent nucleotides. In some embodiments, at least one of the 2′-MOE modified nucleotides in the sense strand as described herein has a structure of

[chemical structure]

or a pharmaceutically acceptable salt thereof.

[0339] In some embodiments, the first nucleotide from the 5′ end of the sense strand includes a structure of

[chemical structure]

or a pharmaceutically acceptable salt thereof. In some embodiments, the first nucleotide from the 5′ end of the sense strand includes a structure of

[chemical structure]

or a pharmaceutically acceptable salt thereof.

[0340] In some embodiments, the first nucleotide from the 3′ end of the sense strand includes a structure of

[chemical structure]

or a pharmaceutically acceptable salt thereof. In some embodiments, the first nucleotide from the 3′ end of the sense strand includes a structure of

[chemical structure]

or a pharmaceutically acceptable salt thereof, wherein [symbol] is an attachment point to a ligand. In some embodiments, the first nucleotide from the 3′ end of the sense strand includes a structure of

[chemical structure]

or a pharmaceutically acceptable salt thereof.

[0341] In certain aspects, at least one of the 2′-MOE modified nucleotides in the sense strand as described herein has a structure of

[chemical structure]

or a pharmaceutically acceptable salt thereof, wherein [symbol] is an attachment point to a terminal group (e.g., H, OH, or salt) or the adjacent nucleotides. In some embodiments, at least one of the 2′-MOE modified nucleotides in the sense strand as described herein has a structure of

[chemical structure]

or a pharmaceutically acceptable salt thereof.

[0342] In some embodiments, the first nucleotide from the 5′ end of the sense strand includes a structure of

[chemical structure]

or a pharmaceutically acceptable salt thereof. In some embodiments, the first nucleotide from the 5′ end of the sense strand includes a structure of

[chemical structure]

or a pharmaceutically acceptable salt thereof.

[0343] In some embodiments, the first nucleotide from the 3′ end of the sense strand includes a structure of

[chemical structure]

or a pharmaceutically acceptable salt thereof. In some embodiments, the first nucleotide from the 3′ end of the sense strand includes a structure of

[chemical structure]

[chemical structure]

or a pharmaceutically acceptable salt thereof, wherein [symbol] is an attachment point to a ligand. In some embodiments, the first nucleotide from the 3′ end of the sense strand includes a structure of

[chemical structure]

or a pharmaceutically acceptable salt thereof.

[0344] In certain aspects, at least one of the 2′-MOE modified nucleotides in the sense strand as described herein has a structure of

[chemical structure]

or a pharmaceutically acceptable salt thereof, wherein [symbol] is an attachment point to a terminal group (e.g., H, OH, or salt) or the adjacent nucleotides. In some embodiments, at least one of the 2′-MOE modified nucleotides in the sense strand as described herein has a structure of

[chemical structure]

or a pharmaceutically acceptable salt thereof.

[0345] In some embodiments, the first nucleotide from the 5′ end of the sense strand includes a structure of

[chemical structure]

or a pharmaceutically acceptable salt thereof. In some embodiments, the first nucleotide from the 5′ end of the sense strand includes a structure of

[chemical structure]

or a pharmaceutically acceptable salt thereof.

[0346] In some embodiments, the first nucleotide from the 3′ end of the sense strand has a structure of

[chemical structure]

or a pharmaceutically acceptable salt thereof. In some embodiments, the first nucleotide from the 3′ end of the sense strand has a structure of

[chemical structure]

[chemical structure]

or a pharmaceutically acceptable salt thereof, wherein [symbol] is an attachment point to a ligand. In some embodiments, the first nucleotide from the 3′ end of the sense strand has a structure of

[chemical structure]

or a pharmaceutically acceptable salt thereof.

[0347] In certain aspects, at least one of the 2′-MOE modified nucleotides in the sense strand as described herein has a structure of

[chemical structure]

or a pharmaceutically acceptable salt thereof, wherein [symbol] is an attachment point to a terminal group (e.g., H, OH, or salt) or the adjacent nucleotides. In some embodiments, at least one of the 2′-MOE modified nucleotides in the sense strand as described herein has a structure of

[chemical structure]

or a pharmaceutically acceptable salt thereof.

[0348] In some embodiments, the first nucleotide from the 5′ end of the sense strand includes a structure of

[chemical structure]

or a pharmaceutically acceptable salt thereof. In some embodiments, the first nucleotide from the 5′ end of the sense strand includes a structure of

[chemical structure]

or a pharmaceutically acceptable salt thereof.

[0349] In some embodiments, the first nucleotide from the 3′ end of the sense strand has a structure of

[chemical structure]

or a pharmaceutically acceptable salt thereof. In some embodiments, the first nucleotide from the 3′ end of the sense strand has a structure of

[chemical structure]

or a pharmaceutically acceptable salt thereof, wherein [symbol] is an attachment point to a ligand. In some embodiments, the first nucleotide from the 3′ end of the sense strand has a structure of

[chemical structure]

or a pharmaceutically acceptable salt thereof.

[0350] In certain aspects, the 2′-MOE modified nucleotides locate at both 5′ and 3′ ends of a sense strand so as to form a structural confinement (“2′-MOE clamp”) at the sense strand termini. In some embodiments, the 2′-MOE clamps may be symmetric and having the same number of 2′-MOE modified nucleotides at both 5′ and 3′ ends of the sense strand. For example, the sense strand includes one 2′-MOE modified nucleotide at 5′ end and one 2′-MOE modified nucleotide at 3′ end; two 2′-MOE modified nucleotides at 5′ end and two 2′-MOE modified nucleotides at 3′ end; or three 2′-MOE modified nucleotides at 5′ end and three 2′-MOE modified nucleotides at 3′ end. In some embodiments, the 2′-MOE clamps may be asymmetric and having different numbers of 2′-MOE nucleotides at 5′ and 3′ ends of the sense strand. For example, the sense strand includes one 2′-MOE modified nucleotide at 5′ end only; one 2′-MOE modified nucleotide at 3′ end only; two 2′-MOE modified nucleotides at 5′ end only; two 2′-MOE modified nucleotides at 3′ end only; one 2′-MOE modified nucleotide at 5′ end and two 2′-MOE modified nucleotides at 3′ end; or two 2′-MOE modified nucleotides at 5′ end and one 2′-MOE modified nucleotide at 3′ end.

[0351] In certain aspects, the sense strand includes one 2′-MOE modified nucleotide at 5′ end and one 2′-MOE modified nucleotide at 3′ end. In some embodiments, the sense strand includes only one 2′-MOE modified nucleotide at 5′ end and only one 2′-MOE modified nucleotide at 3′ end. In some embodiments, the sense strand includes only one 2′-MOE modified nucleotide at 5′ end. In some embodiments, the sense strand includes only one 2′-MOE modified nucleotide at 3′ end.

[0352] In certain aspects, the sense strand includes at least two contiguous 2′-MOE modified nucleotides at 5′ end and at least two 2′-MOE modified nucleotides at 3′ end. In some embodiments, the sense strand includes only two 2′-MOE modified nucleotides at 5′ end and only two 2′-MOE modified nucleotides at 3′ end. In some embodiments, the sense strand includes only two 2′-MOE modified nucleotides at 5′ end. In some embodiments, the sense strand includes only two 2′-MOE modified nucleotides at 3′ end.

[0353] In certain aspects, the sense strand is 21 nucleotides in length. In some embodiments, the sense strand includes one, two, three, or four 2′-MOE modified nucleotides positioned at the 1st, 2nd, 20th, and/or 21^{st} nucleotides from the 5′ end of the sense strand. In some embodiments, the sense strand includes two 2′-MOE modified nucleotides positioned at the 1st, 2nd, 20th, or 21^{st} nucleotides from the 5′ end of the sense strand. In some embodiments, the sense strand includes three 2′-MOE modified nucleotides positioned at the 1st, 2nd, 20th, or 21st nucleotides from the 5′ end of the sense strand. In some embodiments, the sense strand includes 2′-MOE modified nucleotides positioned at the 1st, 2nd, 20th, and 21^{st} nucleotides from the 5′ end of the sense strand. In some embodiments, the sense strand does not include a 2′-MOE modified nucleotide at the 3rd to 19th nucleotides from 5′ end of the sense strands.

[0354] Alternatively, in certain aspects, a sense strand of the dsRNA as described herein includes two or more TNAs. In some embodiments, the sense strand includes two, four, six or eight TNAs. In some embodiments, the sense strand includes two TNAs. In some embodiments, the sense strand includes four TNAs. In some embodiments, the sense strand includes six TNAs. In some embodiments, the sense strand includes eight TNAs.

[0355] In certain aspects, the sense strand includes at least two contiguous TNAs at 5′ end and at least two TNAs at 3′ end. In some embodiments, the sense strand includes only two TNAs at 5′ end and only two TNAs at 3′ end. In some embodiments, the sense strand includes only two TNAs at 5′ end. In some embodiments, the sense strand includes only two TNAs at 3′ end.

[0356] In some embodiments, the TNAs in the sense strand as described herein include a structure of

[chemical structure]

or a pharmaceutically acceptable salt thereof, wherein [symbol] is an attachment point to a linkage (e.g., phosphate or phosphorothioate group) or the adjacent nucleotides and “Base” is a nucleobase.

[0357] In some embodiments, the TNAs in the sense strand as described herein include a structure of

[chemical structure]

or a pharmaceutically acceptable salt thereof wherein [symbol] is an attachment point to a terminal group (e.g., H, OH, or salt) or the adjacent nucleotides and “Base” is a nucleobase. In some embodiments, the TNAs in the dsRNA as described herein include a structure of

[chemical structure]

or a pharmaceutically acceptable salt thereof.

[0358] In some embodiments, the TNAs include a structure of

[chemical structure]

or a pharmaceutically acceptable salt thereof, wherein [symbol] is an attachment point to a terminal group (e.g., H, OH, or salt) or the adjacent nucleotides. In some embodiments, the TNAs include a structure of

[chemical structure]

or a pharmaceutically acceptable salt thereof.

[0359] In some embodiments, the TNAs include a nucleotide having a structure of

[chemical structure]

or a pharmaceutically acceptable salt thereof, wherein [symbol] is an attachment point to a terminal group (e.g., H, OH, or salt) or the adjacent nucleotides. In some embodiments, the TNAs include a nucleotide having a structure of

[chemical structure]

or a pharmaceutically acceptable salt thereof

[0360] In some embodiments, the TNAs in the dsRNA as described herein include a nucleotide having a structure of

[chemical structure]

or a pharmaceutically acceptable salt thereof, wherein [symbol] is an attachment point to a terminal group (e.g., H, OH, or salt) or the adjacent nucleotides. In some embodiments, the TNAs in the dsRNA as described herein include a nucleotide having a structure of

[chemical structure]

or a pharmaceutically acceptable salt thereof.

[0361] In some embodiments, the TNAs include a nucleotide having a structure of

[chemical structure]

or a pharmaceutically acceptable salt thereof, wherein [symbol] is an attachment point to a terminal group (e.g., H, OH, or salt) or the adjacent nucleotides. In some embodiments, the TNAs include a nucleotide having a structure of

[chemical structure]

or a pharmaceutically acceptable salt thereof.

[0362] In certain aspects, at least one of the TNAs in the sense strand as described herein has a structure of

[chemical structure]

or a pharmaceutically acceptable salt thereof, wherein [symbol] is an attachment point to a terminal group (e.g., H, OH, or salt) or the adjacent nucleotides. In some embodiments, at least one of the TNAs in the sense strand as described herein has a structure of

[chemical structure]

or a pharmaceutically acceptable salt thereof.

[0363] In some embodiments, the first nucleotide from the 5′ end of the sense strand includes a structure of

[chemical structure]

or a pharmaceutically acceptable salt thereof. In some embodiments, the first nucleotide from the 5′ end of the sense strand includes a structure of

[chemical structure]

or a pharmaceutically acceptable salt thereof.

[0364] In some embodiments, the first nucleotide from the 3′ end of the sense strand includes a structure of

[chemical structure]

or a pharmaceutically acceptable salt thereof. In some embodiments, the first nucleotide from the 3′ end of the sense strand includes a structure of,

[chemical structure]

or a pharmaceutically acceptable salt thereof and [symbol] is an attachment point to a ligand. In some embodiments, the first nucleotide from the 3′ end of the sense strand includes a structure of

[chemical structure]

or a pharmaceutically acceptable salt thereof.

[0365] In certain aspects, at least one of the TNAs in the sense strand as described herein has a structure of

[chemical structure]

or a pharmaceutically acceptable salt thereof, wherein [symbol] is an attachment point to a terminal group (e.g., H, OH, or salt) or the adjacent nucleotides. In some embodiments, at least one of the TNAs in the sense strand as described herein has a structure of

[chemical structure]

or a pharmaceutically acceptable salt thereof.

[0366] In some embodiments, the first nucleotide from the 5′ end of the sense strand includes a structure of

[chemical structure]

or a pharmaceutically acceptable salt thereof. In some embodiments, the first nucleotide from the 5′ end of the sense strand includes a structure of

[chemical structure]

or a pharmaceutically acceptable salt thereof.

[0367] In some embodiments, the first nucleotide from the 3′ end of the sense strand includes a structure of

[chemical structure]

or a pharmaceutically acceptable salt thereof. In some embodiments, the first nucleotide from the 3′ end of the sense strand includes a structure of

[chemical structure]

or a pharmaceutically acceptable salt thereof and [symbol] is an attachment point to a ligand. In some embodiments, the first nucleotide from the 3′ end of the sense strand includes a structure of

[chemical structure]

or a pharmaceutically acceptable salt thereof.

[0368] In certain aspects, at least one of the TNAs in the sense strand as described herein has a structure of

[chemical structure]

or a pharmaceutically acceptable salt thereof, wherein [symbol] is an attachment point to a terminal group (e.g., H, OH, or salt) or the adjacent nucleotides. In some embodiments, at least one of the TNAs in the sense strand as described herein has a structure of

[chemical structure]

or a pharmaceutically acceptable salt thereof.

[0369] In some embodiments, the first nucleotide from the 5′ end of the sense strand includes a structure of

[chemical structure]

or a pharmaceutically acceptable salt thereof. In some embodiments, the first nucleotide from the 5′ end of the sense strand includes a structure of

[chemical structure]

or a pharmaceutically acceptable salt thereof.

[0370] In some embodiments, the first nucleotide from the 3′ end of the sense strand includes a structure of

[chemical structure]

or a pharmaceutically acceptable salt thereof. In some embodiments, the first nucleotide from the 3′ end of the sense strand includes a structure of

[chemical structure]

or a pharmaceutically acceptable salt thereof and [symbol] is an attachment point to a ligand. In some embodiments, the first nucleotide from the 3′ end of the sense strand includes a structure of

[chemical structure]

or a pharmaceutically acceptable salt thereof.

[0371] In certain aspects, at least one of the TNAs in the sense strand as described herein has a structure of

[chemical structure]

or a pharmaceutically acceptable salt thereof, wherein [symbol] is an attachment point to a terminal group (e.g., H, OH, or salt) or the adjacent nucleotides. In some embodiments, at least one of the TNAs in the sense strand as described herein has a structure of

[chemical structure]

or a pharmaceutically acceptable salt thereof.

[0372] In some embodiments, the first nucleotide from the 5′ end of the sense strand includes a structure of

[chemical structure]

or a pharmaceutically acceptable salt thereof. In some embodiments, the first nucleotide from the 5′ end of the sense strand includes a structure of

[chemical structure]

or a pharmaceutically acceptable salt thereof.

[0373] In some embodiments, the first nucleotide from the 3′ end of the sense strand includes a structure of

[chemical structure]

or a pharmaceutically acceptable salt thereof. In some embodiments, the first nucleotide from the 3′ end of the sense strand includes a structure of

[chemical structure]

or a pharmaceutically acceptable salt thereof and [symbol] is an attachment point to a ligand. In some embodiments, the first nucleotide from the 3′ end of the sense strand includes a structure of

[chemical structure]

or a pharmaceutically acceptable salt thereof.

[0374] In certain aspects, the TNAs locate at both 5′ and 3′ ends of a sense strand so as to form a structural confinement (“TNA clamp”) at the sense strand termini. In some embodiments, the TNA clamps may be symmetric and having the same number of TNAs at both 5′ and 3′ ends of the sense strand. For example, the sense strand includes one TNA at 5′ end and one TNA at 3′ end; two TNAs at 5′ end and two TNAs at 3′ end; or three TNAs at 5′ end and three TNAs at 3′ end. In some embodiments, the TNA clamps may be asymmetric and having different numbers of TNAs at 5′ and 3′ ends of the sense strand. For example, the sense strand includes one TNA at 5′ end only; one TNA at 3′ end only; two TNAs at 5′ end only; two TNAs at 3′ end only; one TNA at 5′ end and two TNAs at 3′ end; or two TNAs at 5′ end and one TNA at 3′ end.

[0375] In certain aspects, the sense strand includes one TNA at 5′ end and one TNA at 3′ end. In some embodiments, the sense strand includes only one TNA at 5′ end and only one TNA at 3′ end. In some embodiments, the sense strand includes only one TNA at 5′ end. In some embodiments, the sense strand includes only one TNA at 3′ end.

[0376] In certain aspects, the sense strand includes at least two contiguous TNAs at 5′ end and at least two TNAs at 3′ end. In some embodiments, the sense strand includes only two TNAs at 5′ end and only two TNAs at 3′ end. In some embodiments, the sense strand includes only two TNAs at 5′ end. In some embodiments, the sense strand includes only two TNAs at 3′ end.

[0377] In certain aspects, the sense strand is 21 nucleotides in length. In some embodiments, the sense strand includes one, two, three, or four TNAs positioned at the 1st, 2nd, 20th, and/or 21st nucleotides from the 5′ end of the sense strand. In some embodiments, the sense strand includes two TNAs positioned at the 1st, 2nd, 20th, or 21st nucleotides from the 5′ end of the sense strand. In some embodiments, the sense strand includes three TNAs positioned at the 1st, 2nd, 20th, or 21st nucleotides from the 5′ end of the sense strand. In some embodiments, the sense strand includes TNAs positioned at the 1st, 2nd, 20th, and 21st nucleotides from the 5′ end of the sense strand.

[0378] In certain aspects, the sense strand of the dsRNA as described herein includes two or more 2′-F modifications. In some embodiments, the sense strand of the dsRNA includes two, three, four, five, six, seven, or eight 2′-F modified nucleotides. In some embodiments, the sense strand includes two 2′-F modified nucleotides. In some embodiments, the sense strand includes three 2′-F modified nucleotides. In some embodiments, the sense strand includes four 2′-F modified nucleotides. In some embodiments, the sense strand includes five 2′-F modified nucleotides. In some embodiments, the sense strand includes six 2′-F modified nucleotides. In some embodiments, the sense strand includes seven 2′-F modified nucleotides. In some embodiments, the sense strand includes eight 2′-F modified nucleotides. In some embodiments, two contiguous 2′-F modified nucleotides locate in the sense strand. In some embodiments, three contiguous 2′-F modified nucleotides locate in the sense strand. In some embodiments, four contiguous 2′-F modified nucleotides locate in the sense strand.

[0379] In certain aspects, the sense strand is 21 nucleotides in length. In some embodiments, 2′-F modified nucleotides locate at 5th, 7th, 8th, and/or 9th positions from the 5′ end of the sense strand. In some embodiments, 2′-F modified nucleotides locate at 6th, 8th, 9th, and/or 10th positions from the 5′ end of the sense strand. In some embodiments, 2′-F modified nucleotides locate at 7th, 9th, 10th, and/or 11th positions from the 5′ end of the sense strand. In some embodiments, 2′-F modified nucleotides locate at 8th, 10th, 11th, and/or 12th positions from the 5′ end of the sense strand. In some embodiments, 2′-F modified nucleotides locate at 9th, 11th, 12th, and/or 13th positions from the 5′ end of the sense strand.

[0380] In some embodiments, the sense strand includes 2′-OMe modified nucleotides in the remaining positions in the sense strand.

[0381] In certain aspects, the sense strand includes one to six (e.g., 1, 2, 3, 4, 5 or 6) phosphorothioate (PS) linkages between nucleosides. In some embodiments, the sense strand includes one, two, three, or four phosphorothioate (PS) linkages between nucleosides.

[0382] In certain aspects, the sense strand is 21 nucleotides in length. In some embodiments, the sense strand includes two 3′-PS modified nucleotides at the 1st, 2nd, 19th and/or 20th positions from 5′-end of the sense strand. In some embodiments, the sense strand includes three 3′-PS modified nucleotides at the 1st, 2nd, 19th and/or 20th positions from 5′-end of the sense strand. In some embodiments, the sense strand includes 3′-PS modified nucleotides at the 1st, 2nd, 19th and 20th positions from 5′-end of the sense strand.

[0383] In certain aspects, the sense strand is 21 nucleotides in length. In some embodiments, the sense strand includes 3′-PS modified nucleotides at the 1st and 2nd positions from 5′-end of the sense strand. In some embodiments, the sense strand includes a 3′-PS modified nucleotide at the 1st position from 5′-end of the sense strand. In some embodiments, the sense strand includes 3′-PS modified nucleotides at the 1st and 20th positions from 5′-end of the sense strand.

[0384] In certain aspects, the sense strand includes two to eight phosphorothioate (PS) groups or linkages between nucleosides. In certain aspects, the sense strand is 21 nucleotides in length. In some embodiments, the sense strand includes two 3′-PS modified nucleotides positioned at the 1st, 2nd, 3rd, 4th, 17th, 18th, 19th and/or 20th nucleotides from 5′-end of the sense strand. In some embodiments, the sense strand includes four 3′-PS modified nucleotides positioned at the 1st, 2nd, 3rd, 4th, 17th, 18th, 19th and/or 20th nucleotides from 5′-end of the sense strand. In some embodiments, the sense strand includes six 3′-PS modified nucleotides positioned at the 1st, 2nd, 3rd, 4th, 17th, 18th, 19th and/or 20th nucleotides from 5′-end of the sense strand. In some embodiments, the sense strand includes 3′-PS modified nucleotides positioned at the 1st, 2nd, 3rd, 4th, 17th, 18th, 19th and 20th nucleotides from 5′-end of the sense strand.

[0385] In certain aspects, the sense strand is 21 nucleotides in length. In some embodiments, at least one of the 3′-PS groups at the 1st, 2nd, 3rd, 4th, 17th, 18th, 19th and/or 20th nucleotides from 5′-end of the sense strand is a stereopure Rp isomer. In some embodiments, at least one of the 3′-PS groups at the 1st, 2nd, 19th and/or 20th nucleotides from 5′-end of the sense strand is a stereopure Rp isomer. In some embodiments, at least one of the 3′-PS groups at the 1st and/or 20th nucleotides from 5′-end of the sense strand is a stereopure Rp isomer. In some embodiments, the 3′-PS group at the 1^{st} nucleotide from 5′-end of the sense strand is a stereopure Rp isomer. In some embodiments, the 3′-PS group at the 2nd nucleotide from 5′-end of the sense strand is a stereopure Rp isomer. In some embodiments, the 3′-PS group at the 19th nucleotide from 5′-end of the sense strand is a stereopure Rp isomer. In some embodiments, the 3′-PS group at the 20th nucleotide from 5′-end of the sense strand is a stereopure Rp isomer. In some embodiments, the 3′-PS groups at the 1st and 20th nucleotides from 5′-end of the sense strand are stereopure Rp isomers. In some embodiments, the 3′-PS groups at the 1st, 2nd, 19^{th} and 20th nucleotides from 5′-end of the sense strand are stereopure Rp isomers.

[0386] In certain aspects, the sense strand is 21 nucleotides in length. In some embodiments, at least one of the 3′-PS groups at the 1st, 2nd, 3rd, 4th, 17th, 18th, 19th and/or 20th nucleotides from 5′-end of the sense strand is a stereopure Sp isomer. In some embodiments, at least one of the 3′-PS groups at the 1st, 2nd, 19th and/or 20th nucleotides from 5′-end of the sense strand is a stereopure Sp isomer. In some embodiments, at least one of the 3′-PS groups at the 1st and/or 20th nucleotides from 5′-end of the sense strand is a stereopure Sp isomer. In some embodiments, the 3′-PS group at the 1st nucleotide from 5′-end of the sense strand is a stereopure Sp isomer. In some embodiments, the 3′-PS group at the 2nd nucleotide from 5′-end of the sense strand is a stereopure Sp isomer. In some embodiments, the 3′-PS group at the 19th nucleotide from 5′-end of the sense strand is a stereopure Sp isomer. In some embodiments, the 3′-PS group at the 20nd nucleotide from 5′-end of the sense strand is a stereopure Sp isomer. In some embodiments, the 3′-PS groups at the 1st and 20th nucleotides from 5′-end of the sense strand are stereopure Sp isomers. In some embodiments, the 3′-PS groups at the 1st, 2nd, 19th, and 20th nucleotides from 5′-end of the sense strand are stereopure Sp isomers.

[0387] In certain aspects, a sense strand of the dsRNA as described herein includes one or more of 2′-MOE modified nucleotides, one or more of 2′-F modified nucleotides, and one or more of 2′-OMe modified nucleotides. In certain aspects, a sense strand of the dsRNA as described herein consists of 2′-MOE modified nucleotides, 2′-F modified nucleotides and 2′-OMe modified nucleotides.

[0388] In certain aspects, a sense strand of the dsRNA as described herein may have a Formula (I),

5′-X₁-X₂-X₃-X₄-X₅-X₆-X₇-X₈-X₉-X₁₀-X₁₁-X₁₂-X₁₃-X₁₄-
X₁₅-X₁₆-X₁₇-X₁₈-X₁₉-X₂₀-X₂₁-3′ (I)

[0389] wherein:
[0390] each X₁ to X₂₁ is independently a nucleotide,
[0391] each X₁, X₂, X₂₀, and X₂₁ is a 2′-MOE modified nucleotide;
[0392] each X₃ to X₁₉ is independently selected from a deoxyribonucleotide, 2′-MOE modified nucleotide, 2′-F modified nucleotide, and 2′-OMe modified nucleotide.

[0393] In some embodiments, the first nucleotide from the 5′ end of the sense strand (X₁) is a 2′-MOE modified nucleotide with a nucleobase T. In some embodiments, the second nucleotide from the 5′ end of the sense strand (X₂) is a 2′-MOE modified nucleotide with a nucleobase T, G, or methylated cytosine (e.g., 5-methylcytosine or N⁴-methylcytosine). In some embodiments, the second nucleotide from the 5′ end of the sense strand (X₂) is a 2′-MOE modified nucleotide with a nucleobase T. In some embodiments, the second nucleotide from the 5′ end of the sense strand (X₂) is a 2′-MOE modified nucleotide with a nucleobase G. In some embodiments, the second nucleotide from the 5′ end of the sense strand (X₂) is a 2′-MOE modified nucleotide with a nucleobase methylated cytosine (e.g., 5-methylcytosine or N⁴-methylcytosine).

[0394] In some embodiments, the first nucleotide from the 3′ end of the sense strand (X₂₁) is a 2′-MOE modified nucleotide with a nucleobase A or T. In some embodiments, the first nucleotide from the 3′ end of the sense strand (X₂₁) is a 2′-MOE modified nucleotide with a nucleobase A. In some embodiments, the first nucleotide from the 3′ end of the sense strand (X₂₁) is a 2′-MOE modified nucleotide with a nucleobase T. In some embodiments, the second nucleotide from the 3′ end of the sense strand (X₂₀) is a 2′-MOE modified nucleotide with a nucleobase A.

[0395] In certain aspects, X₃ to X₁₉ do not include a 2′-MOE modified nucleotide. In some embodiments, each X₃ to X₁₉ is independently selected from 2′-F modified nucleotides and 2′-OMe modified nucleotides.

[0396] In some embodiments, at least one of X₃ to X₁₉ is not a deoxyribonucleotide. In some embodiments, X₃ to X₁₉ does not include a deoxyribonucleotide.

[0397] In some embodiments, each X_{f}, X_{f+2}, X_{f+3}, and X_{f+4} is 2′-F modified nucleotide when f is an integer from 3 to 17. In some embodiments, f is 5. In some embodiments, f is 6. In some embodiments, f is 7. In some embodiments, f is 8. In some embodiments, f is 9. In some embodiments, X₅, X₇, X₈, and X₉ are 2′-F modified nucleotides. In some embodiments, X₆, X₈, X₉, and X₁₀ are 2′-F modified nucleotides. In some embodiments, X₇, X₉, X₁₀, and X₁₁ are 2′-F modified nucleotides. In some embodiments, X₈, X₁₀, X₁₁, and X₁₂ are 2′-F modified nucleotides. In some embodiments, X₉, X₁₁, X₁₂, and X₁₃ are 2′-F modified nucleotides.

[0398] In some embodiments, the sense strand includes 2′-OMe modified nucleotides in the remaining positions in the sense strand.

[0399] In some embodiments, at least two nucleotides from X₁, X₂, X₁₉, and X₂₀ contain a 3′-PS group, respectively. In some embodiments, two nucleotides from X₁, X₂, X₁₉, and X₂₀ contain a 3′-PS group, respectively. In some embodiments, three nucleotides from X₁, X₂, X₁₉, and X₂₀ contain a 3′-PS group, respectively. In some embodiments, each X₁, X₂, X₁₉, and X₂₀ contains a 3′-PS group. In some embodiments, each X₁ and X₂ contains a 3′-PS group.

[0400] In some embodiments, at least four from X₁, X₂, X₃, X₄, X₁₇, X₁₈, X₁₉, and/or X₂₀ contain 3′-PS groups. In some embodiments, four from X₁, X₂, X₃, X₄, X₁₇, X₁₈, X₁₉, and/or X₂₀ contain a 3′-PS group, respectively. In some embodiments, six from X₁, X₂, X₃, X₄, X₁₇, X₁₈, X₁₉, and/or X₂₀ contain a 3′-PS group, respectively. In some embodiments, X₁, X₂, X₃, X₄, X₁₇, X₁₈, X₁₉, and X₂₀ contain a 3′-PS group, respectively.

[0401] In some embodiments, in X₃ to X₁₈, two to six nucleotides contain 3′-PS groups. In some embodiments, in X₃ to X₁₈, two nucleotides contain a 3′-PS group, respectively, respectively. In some embodiments, in X₃ to X₁₈, three nucleotides contain a 3′-PS group, respectively. In some embodiments, in X₃ to X₁₈, four nucleotides contain a 3′-PS group, respectively. In some embodiments, in X₃ to X₁₈, five nucleotides contain a 3′-PS group, respectively. In some embodiments, in X₃ to X₁₈, six nucleotides contain a 3′-PS group, respectively.

[0402] In certain aspects, the sense strand includes 2′-MOE modified nucleotides positioned at the 1^{st}, 2^{nd}, 20^{th}, and 21^{st} nucleotides from the 5′-end of the sense strand.

[0403] In some embodiments, the sense strand having 21 nucleotides in length includes:
[0404] (i) 2′-MOE modifications at the 1^{st}, 2^{nd}, 20^{th} and/or 21^{st} nucleotides from the 5′-end of the sense strand; and
[0405] (ii) 3′-PS modifications at the 1^{st}, 2^{nd}, 19^{th}, and/or 20^{th} nucleotides from 5′-end of the sense strand.

[0406] In some embodiments, the sense strand having 21 nucleotides in length includes:
[0407] (i) 2′-MOE modifications at the 1st, 2^{nd}, 20^{th} and/or 21^{st} nucleotides from the 5′-end of the sense strand; and 2′-F modifications at 8^{th}, 10^{th}, 11^{th}, and 12^{th} nucleotides from the 5′ end of the sense strand.

[0408] In some embodiments, the sense strand having 21 nucleotides in length includes:
[0409] (i) 2′-MOE modifications at the 1^{st}, 2^{nd}, 20^{th} and/or 21^{st} nucleotides from the 5′-end of the sense strand; 2′-F modifications at 7^{th}, 9^{th}, 10^{th}, and 11^{th} nucleotides from the 5′ end of the sense strand; and 2′-OMe modifications in the remaining nucleotides.

[0410] In some embodiments, the sense strand having 21 nucleotides in length includes:
[0411] (i) 2′-MOE modifications at the 1^{st}, 2^{nd}, 20^{th} and/or 21^{st} nucleotides from the 5′-end of the sense strand; and 2′-F modifications at 7^{th}, 9^{th}, 10^{th}, and 11^{th} nucleotides from the 5′ end of the sense strand, and
[0412] (ii) 3′-PS modifications at the 1^{st} and 2^{nd} nucleotides from 5′-end of the sense strand.

[0413] In some embodiments, the sense strand having 21 nucleotides in length includes:
[0414] (i) 2′-MOE modifications at the 1^{st}, 2^{nd}, 20^{th}, and 21^{st} nucleotides from the 5′-end of the sense strand; 2′-F modifications at 7^{th}, 9^{th}, 10^{th}, and/or 11^{th} nucleotides from the 5′ end of the sense strand; and 2′-OMe modifications in the remaining nucleotides, and
[0415] (ii) 3′-PS modifications at the 1^{st} and 2^{nd} nucleotides from 5′-end of the sense strand.

[0416] In some embodiments, the sense strand having 21 nucleotides in length includes:
[0417] (i) 2′-MOE modifications at the 1^{st}, 2^{nd}, 20^{th} and/or 21^{st} nucleotides from the 5′-end of the sense strand; and 2′-F modifications at 7^{th}, 9^{th}, 10^{th}, and 11^{th} nucleotides from the 5′ end of the sense strand, and
[0418] (ii) 3′-PS modifications at the 1^{st}, 2^{nd}, 19^{th}, and 20^{th} nucleotides from 5′ end of the sense strand.

[0419] In some embodiments, the sense strand having 21 nucleotides in length includes:
[0420] (i) 2′-MOE modifications at the 1^{st}, 2^{nd}, 20^{th}, and 21^{st} nucleotides from the 5′-end of the sense strand; 2′-F modifications at 7^{th}, 9^{th}, 10^{th}, and/or 11^{th} nucleotides from the 5′ end of the sense strand; and 2′-OMe modifications in the remaining nucleotides, and
[0421] (ii) 3′-PS modifications at the 1^{st}, 2^{nd}, 19^{th}, and 20^{th} nucleotides from 5′ end of the sense strand.

[0422] In certain aspects, a sense strand of the dsRNA as described herein may have a Formula (I′),

5′-Y_{1′}-Y_{2′}-Y₃-Y₄-Y₅-Y₆-Y₇-Y₈-Y₉-Y₁₀-Y₁₁-Y₁₂-Y₁₃-
Y₁₄-Y₁₅-Y₁₆-Y₁₇-Y₁₈-Y₁₉-Y₂₀-Y₂₁-3′ (I′)

[0423] wherein:
[0424] each Y₁, Y₂, Y₂₀, and Y₂₁ is independently a TNA; and
[0425] each Y₃ to Y₁₉ is independently selected from 2′-deoxy modified nucleotide, 2′-MOE modified nucleotide, 2′-F modified nucleotide, and 2′-OMe modified nucleotide.

[0426] In certain aspects, in Formula (I′), Y₃ to Y₁₉ do not include a 2′-MOE modified nucleotide. In some embodiments, each Y₃ to Y₁₉ is selected from deoxyribonucleotide, 2′-F modified nucleotides and 2′-OMe modified nucleotides. In some embodiments, at least one of Y₃ to Y₁₉ is not a deoxyribonucleotide.

[0427] In some embodiments, each Y_{f}, Y_{f+2}, and Y_{f+3} is 2′-F modified nucleotide and Y_{f+4} is 2′-deoxy modified nucleotide when f is an integer from 3 to 17. In some embodiments, f is 5. In some embodiments, f is 6. In some embodiments, f is 7. In some embodiments, f is 8. In some embodiments, f is 9. In some embodiments, Y₅, Y₇, and Y₈ are 2′-F modified nucleotides, and Y₉ is 2′-deoxy modified nucleotide (e.g., dT). In some embodiments, Y₆, Y₈, and Y₉ are 2′-F modified nucleotides and Y₁₀ is 2′-deoxy modified nucleotide (e.g., dT). In some embodiments, Y₇, Y₉, and Y₁₀ are 2′-F modified nucleotides, and Y₁₁ is 2′-deoxy modified nucleotide (e.g., dT). In some embodiments, Y₅, Y₁₀, and Y₁₁ are 2′-F modified nucleotides, and Y₁₂ is 2′-deoxy modified nucleotide (e.g., dT). In some embodiments, Y₉, Y₁₁, and Y₁₂ are 2′-F modified nucleotides, and Y₁₃ is 2′-deoxy modified nucleotide (e.g., dT).

[0428] In some embodiments, the sense strand includes 2′-OMe modified nucleotides in the remaining positions in the sense strand.

[0429] In some embodiments, at least two nucleotides from Y₁, Y₂, Y₁₉, and Y₂₀ contain a 3′-PS group, respectively. In some embodiments, two from Y₁, Y₂, Y₁₉, and Y₂₀ contains 3′-PS group. In some embodiments, three nucleotides from Y₁, Y₂, Y₁₉, and Y₂₀ contain a 3′-PS group, respectively. In some embodiments, each Y₁, Y₂, Y₁₉, and Y₂₀ contains a 3′-PS group. In some embodiments, each Y₁ and Y₂ contains a 3′-PS group.

[0430] In some embodiments, at least four from Y₁, Y₂, Y₃, Y₄, Y₁₇, Y₁₈, Y₁₉, and/or Y₂₀ contain 3′-PS groups. In some embodiments, four from Y₁, Y₂, Y₃, Y₄, Y₁₇, Y₁₈, Y₁₉, and/or Y₂₀ contain a 3′-PS group, respectively. In some embodiments, six from Y₁, Y₂, Y₃, Y₄, Y₁₇, Y₁₈, Y₁₉, and/or Y₂₀ contain a 3′-PS group, respectively. In some embodiments, Y₁, Y₂, Y₃, Y₄, Y₁₇, Y₁₈, Y₁₉, and Y₂₀ contain a 3′-PS group, respectively.

[0431] In some embodiments, in Y₃ to Y₁₈, two to six nucleotides contain 3′-PS groups. In some embodiments, in Y₃ to Y₁₈, two nucleotides contain a 3′-PS group, respectively. In some embodiments, in Y₃ to Y₁₈, three nucleotides contain a 3′-PS group, respectively. In some embodiments, in Y₃ to Y₁₈, four nucleotides contain a 3′-PS group, respectively. In some embodiments, in Y₃ to Y₁₈, five nucleotides contain a 3′-PS group, respectively. In some embodiments, in Y₃ to Y₁₈, six nucleotides contain a 3′-PS group, respectively.

[0432] In certain aspects, the sense strand includes TNAs positioned at the 1st, 2nd, 20th, and 21^{st} nucleotides from the 5′ end of the sense strand.

[0433] In some embodiments, the sense strand having 21 nucleotides in length includes:
[0434] (i) TNAs at the 1st, 2nd, 20th and/or 21st nucleotides from the 5′ end of the sense strand; and
[0435] (ii) 3′-PS modifications at the 1st, 2nd, 19th, and/or 20th nucleotides from 5′ end of the sense strand.

[0436] In some embodiments, the sense strand having 21 nucleotides in length includes:
[0437] (i) TNAs at the 1st, 2nd, 20th and/or 21st nucleotides from the 5′ end of the sense strand; 2′-F modifications at 7th, 9th, 10th, and 11th nucleotides from the 5′ end of the sense strand; and 2′-OMe modifications in the remaining nucleotides.

[0438] In some embodiments, the sense strand having 21 nucleotides in length includes:
[0439] (i) TNAs at the 1st, 2nd, 20th and/or 21st nucleotides from the 5′ end of the sense strand; 2′-F modifications at 7th, 9th, 10th and 11th nucleotides from the 5′ end of the sense strand; and 2′-OMe modifications in the remaining nucleotides; and
[0440] (ii) 3′-PS modifications at the 1st and 2nd nucleotides from 5′ end of the sense strand.

[0441] In some embodiments, the sense strand having 21 nucleotides in length includes:
[0442] (i) TNAs at the 1st, 2nd, 20th and/or 21st nucleotides from the 5′ end of the sense strand; 2′-F modifications at 7th, 9th, 10th and 11th nucleotides from the 5′ end of the sense strand; and 2′-OMe modifications in the remaining nucleotides; and
[0443] (ii) 3′-PS modifications at the 1st, 2nd, 19th, and 20th nucleotides from 5′ end of the sense strand.

[0444] In some embodiments, the sense strand having 21 nucleotides in length includes:
[0445] (i) TNAs at the 1st, 2nd, 20th and 21st nucleotides from the 5′ end of the sense strand; 2′-F modifications at 7th, 9th, 10th and 11th nucleotides from the 5′ end of the sense strand; and 2′-OMe modifications in the remaining nucleotides; and
[0446] (ii) 3′-PS modifications at the 1st and 2nd nucleotides from 5′ end of the sense strand.

[0447] In some embodiments, the sense strand having 21 nucleotides in length includes:
[0448] (i) TNAs at the 1st, 2nd, 20th and 21st nucleotides from the 5′ end of the sense strand; 2′-F modifications at 7th, 9th, 10th and 11th nucleotides from the 5′ end of the sense strand; and 2′-OMe modifications in the remaining nucleotides; and
[0449] (ii) 3′-PS modifications at the 1st, 2nd, 19th, and 20th nucleotides from 5′ end of the sense strand.

[0450] Example modification patterns of sense strands are shown in Table B.

TABLE B

| | 2′-MOE | | | 2′-OMe | |
|---|---|---|---|---|---|
| 21-mer SS | modified | | 2′F modified | modified | |
| modification | nucleotide | TNA | nucleotide | nucleotide | |
| pattern No. | position | position | position | position | 3′-PS linkage |
| SS1 | | | 7, 9, 10, 11 | 1, 2, 3, 4, 5, | 1, 2 |
| | | | | 6, 8, 12, 13, | |
| | | | | 14, 15, 16, | |
| | | | | 17, 18, 19, | |
| | | | | 20, 21 | |
| SS2 | 1, 2, 20, 21 | | 7, 9, 10, 11 | 3, 4, 5, 6, 8, | 1, 2 |
| | | | | 12, 13, 14, | |
| | | | | 15, 16, 17, | |
| | | | | 18, 19 | |
| SS3 | 1, 2, 20, 21 | | 7, 9, 10, 11 | 3, 4, 5, 6, 8, | 1, 2, 19, 20 |
| | | | | 12, 13, 14, | |
| | | | | 15, 16, 17, | |
| | | | | 18, 19 | |
| SS4 | | 1, 2, 20, 21 | 7, 9, 10, 11 | 3, 4, 5, 6, 8, | 1, 2 |
| | | | | 12, 13, 14, | |
| | | | | 15, 16, 17, | |
| | | | | 18, 19 | |
| SS5 | | 1, 2, 20, 21 | 7, 9, 10, 11 | 3, 4, 5, 6, 8, | 1, 2, 19, 20 |
| | | | | 12, 13, 14, | |
| | | | | 15, 16, 17, | |
| | | | | 18, 19 | |

[0451] In some embodiments, the sense strand having 21 nucleotides in length has the modification pattern of SS1. In some embodiments, the sense strand having 21 nucleotides in length does not have the modification pattern of SS1. In some embodiments, the sense strand having 21 nucleotides in length has the modification pattern of SS2. In some embodiments, the sense strand having 21 nucleotides in length has the modification pattern of SS3. In some embodiments, the sense strand having 21 nucleotides in length has the modification pattern of SS4. In some embodiments, the sense strand having 21 nucleotides in length has the modification pattern of SS5.

### Antisense Strand (AS)

[0452] In certain aspects, an antisense strand of the dsRNA as described herein are substantially (e.g., greater than about 80%, 85%, 90%, or 95% of the total nucleotides) made of modified nucleotides. In another certain aspect, the antisense strand is entirely made of modified nucleotides.

[0453] In certain aspects, the first nucleotide from the 5′ end of the antisense strand may contain an additional phosphate group or a variant thereof (e.g., phosphorothioate, phosphorodithioate, methylphosphonate, methylene phosphonate, or vinylphosphonate (VP)) attached or linked to the 5′ terminal group of the first nucleotide) attached or linked to the 5′ terminal group of the first nucleotide.

[0454] In certain aspects, the antisense strand includes 5′-vinylphosphonate (5′-VP) group at the first nucleotide from the 5′ end in the antisense strand. The “5′-VP” is a chemical moiety having the structure of

[chemical structure]

or a pharmaceutically acceptable salt thereof, where the wavy line represent the point of attachment to the 5′ carbon of the pentofuranosyl sugar of a nucleotide.

[0455] In some embodiments, the first nucleotide from the 5′ end in the antisense strand includes (E)-vinylphosphonate (VP) having a structure of

[chemical structure]

or a pharmaceutically acceptable salt thereof, wherein the wavy line presents the point of attachment to the 4′ carbon of the pentofuranosyl sugar of a nucleotide. In some embodiments, the first nucleotide from the 5′ end in the antisense strand includes (Z)-vinylphosphonate having a structure of

[chemical structure]

or a pharmaceutically acceptable salt thereof, wherein the wavy line presents the point of attachment to the 4′ carbon of the pentofuranosyl sugar of a nucleotide.

[0456] In some embodiments, the first nucleotide from the 5′ end of the antisense strand has a structure of

[chemical structure]

or a pharmaceutically acceptable salt thereof. In some embodiments, the first nucleotide from the 5′ end of the antisense strand has a structure of

[chemical structure]

or a pharmaceutically acceptable salt thereof. In some embodiments, the first nucleotide from the 5′ end of the antisense strand has a structure of

[chemical structure]

or a pharmaceutically acceptable salt thereof. In some embodiments, the first nucleotide from the 5′ end of the antisense strand has a structure of

[chemical structure]

or a pharmaceutically acceptable salt thereof.

[0457] In some embodiments, the first nucleotide from the 5′ end of the antisense strand has a structure of

[chemical structure]

or a pharmaceutically acceptable salt thereof, wherein [symbol] is an attachment point to the adjacent nucleotides. In some embodiments, the first nucleotide from the 5′ end of the antisense strand has a structure of

[chemical structure]

or a pharmaceutically acceptable salt thereof. In some embodiments, the first nucleotide from the 5′ end of the antisense strand has a structure of

[chemical structure]

or a pharmaceutically acceptable salt thereof, wherein [symbol] is an attachment point to the adjacent nucleotides. In some embodiments, the first nucleotide from the 5′ end of the antisense strand has a structure of

[chemical structure]

or a pharmaceutically acceptable salt thereof.

[0458] In certain aspects, the antisense strand of the dsRNA as described herein includes two or more 2′-F modifications. In some embodiments, the antisense strand of the dsRNA includes two, three, four, five, six, seven, or eight 2′-F modified nucleotides. In some embodiments, the antisense strand includes two 2′-F modified nucleotides. In some embodiments, the antisense strand includes three 2′-F modified nucleotides. In some embodiments, the antisense strand includes four 2′-F modified nucleotides. In some embodiments, the antisense strand includes five 2′-F modified nucleotides. In some embodiments, the antisense strand includes six 2′-F modified nucleotides. In some embodiments, the antisense strand includes seven 2′-F modified nucleotides. In some embodiments, the antisense strand includes eight 2′-F modified nucleotides. In some embodiments, two contiguous 2′-F modified nucleotides locate in the antisense strand. In some embodiments, three contiguous 2′-F modified nucleotides locate in the antisense strand. In some embodiments, four contiguous 2′-F modified nucleotides locate in the antisense strand.

[0459] In certain aspects, the antisense strand is 23 nucleotides in length. In some embodiments, the antisense includes comprises two, three, or four 2′-F modifications positioned at the 2nd, 6th, 14th, and/or 16th nucleotide from 5′ end of the antisense strand. In some embodiments, the antisense includes two 2′-F modifications positioned at the 2nd, 6th, 14th, and/or 16th nucleotide from 5′ end of the antisense strand. In some embodiments, the antisense includes three 2′-F modifications positioned at the 2nd, 6th, 14th, and/or 16th nucleotide from 5′ end of the antisense strand. In some embodiments, the antisense includes 2′-F modifications positioned at the 2nd, 6th, 14th, and 16th nucleotide from 5′ end of the antisense strand.

[0460] In certain aspects, an antisense strand of the dsRNA as described herein does not include a 2′-MOE modification. Alternatively, in certain aspects, the antisense strand includes one to four 2′-MOE modified nucleotides. In some embodiments, the antisense strand includes one 2′-MOE modified nucleotide. In some embodiments, the antisense strand includes two 2′-MOE modified nucleotides. In some embodiments, the antisense strand includes three 2′-MOE modified nucleotides. In some embodiments, the antisense strand includes four 2′-MOE modified nucleotides.

[0461] In certain aspects, the antisense strand is 23 nucleotides in length. In some embodiments, the antisense strand includes one to four 2′-MOE modification at the 1st, 9th, 10th, and 23rd nucleotides from the 5′-end of the antisense strand. In some embodiments, the antisense strand includes one 2′-MOE modification at the 1st, 9th, 10th, or 23rd nucleotides from the 5′-end of the antisense strand. In some embodiments, the antisense strand includes two 2′-MOE modifications at the 1st, 9th, 10th, and/or 23rd nucleotides from the 5′-end of the antisense strand. In some embodiments, the antisense strand includes three 2′-MOE modifications at the 1st, 9th, 10th, and/or 23rd nucleotides from the 5′-end of the antisense strand. In some embodiments, the antisense strand includes four 2′-MOE modification at the 1st, 9th, 10th, and 23rd nucleotides from the 5′-end of the antisense strand.

[0462] In certain aspects, the antisense strand includes at least one GNA nucleotide. In some embodiments, the antisense strand includes only one GNA.

[0463] In certain aspects, the antisense strand is 23 nucleotides in length. In some embodiments, the antisense strand includes only one GNA at the 4th nucleotide from 5′-end of the antisense strand. In some embodiments, the antisense strand includes only one GNA at the 5th nucleotide from 5′-end of the antisense strand. In some embodiments, the antisense strand includes only one GNA at the 6th nucleotide from 5′-end of the antisense strand.

[0464] In certain aspects, the antisense strand includes two, three, or four phosphorothioate (PS) linkages between nucleosides. In certain aspects, the antisense strand is 23 nucleotides in length. In some embodiments, the antisense strand includes two 3′-PS modifications positioned at the 1st, 2nd, 21st, and/or 22nd nucleotides from 5′-end of the antisense strand. In some embodiments, the antisense strand includes three 3′-PS modifications positioned at the 1st, 2nd, 21st, and/or 22nd nucleotides from 5′-end of the antisense strand. In some embodiments, the antisense strand includes 3′-PS modifications positioned at the 1st, 2nd, 21st, and 22nd nucleotides from 5′-end of the antisense strand.

[0465] In certain aspects, the antisense strand includes two to eight phosphorothioate (PS) linkages between nucleosides.

[0466] In certain aspects, the antisense strand is 23 nucleotides in length. In some embodiments, the antisense strand includes two 3′-PS modified nucleotides positioned at the 1st, 2nd, 3rd, 4th, 19th, 20th, 21st, and/or 22nd nucleotides from 5′-end of the antisense strand. In some embodiments, the antisense strand includes four 3′-PS modified nucleotides positioned at the 1st, 2nd, 3rd, 4th, 19th, 20th, 21st, and/or 22nd nucleotides from 5′-end of the antisense strand. In some embodiments, the antisense strand includes six 3′-PS modified nucleotides positioned at the 1st, 2nd, 3rd, 4th, 19th, 20th, 21st, and/or 22nd nucleotides from 5′-end of the antisense strand. In some embodiments, the antisense strand includes 3′-PS modified nucleotides positioned at the 1st, 2nd, 3rd, 4th, 19th, 20th, 21st, and 22nd nucleotides from 5′-end of the antisense strand.

[0467] In certain aspects, the antisense strand is 23 nucleotides in length. In some embodiments, at least one of the PS groups at the 1st, 2nd, 3rd, 4th, 19th, 20th, 21st, and/or 22nd nucleotides from 5′-end of the antisense strand is a stereopure Rp isomer. In some embodiments, at least one of the PS groups at the 1st, 2nd, 21st, and/or 22nd nucleotides from 5′-end of the antisense strand is a stereopure Rp isomer. In some embodiments, at least one of the PS groups at the 1st and/or 22nd nucleotides from 5′-end of the antisense strand is a stereopure Rp isomer. In some embodiments, the PS group at the 1st nucleotide from 5′-end of the antisense strand is a stereopure Rp isomer. In some embodiments, the PS group at the 22nd nucleotide from 5′-end of the antisense strand is a stereopure Rp isomer. In some embodiments, the PS groups at the 1st and 22nd nucleotides from 5′-end of the antisense strand are stereopure Rp isomers.

[0468] In certain aspects, the antisense strand is 23 nucleotides in length. In some embodiments, at least one of the PS groups at the 1st, 2nd, 3rd, 4th, 19th, 20th, 21st, and/or 22nd nucleotides from 5′-end of the antisense strand is a stereopure Sp isomer. In some embodiments, at least one of the PS groups at the 1st, 2nd, 21st, and/or 22nd nucleotides from 5′-end of the antisense strand is a stereopure Sp isomer. In some embodiments, at least one of the PS groups at the 1st and/or 22nd nucleotides from 5′-end of the antisense strand is a stereopure Sp isomer. In some embodiments, the PS group at the 1st nucleotide from 5′-end of the antisense strand is a stereopure Sp isomer. In some embodiments, the PS group at the 22nd nucleotide from 5′-end of the antisense strand is a stereopure Sp isomer. In some embodiments, the PS groups at the 1st and 22nd nucleotides from 5′-end of the antisense strand are stereopure Sp isomers.

[0469] In certain aspects, the antisense strand is 23 nucleotides in length. In some embodiments, at least one of the PS groups at the 1st, 2nd, 3rd, 4th, 19th, 20th, 21st, and/or 22nd nucleotides from 5′-end of the antisense strand is stereopure Sp isomer

[0470] In certain aspects, an antisense strand of dsRNA may have a Formula (II):

5′-X_{1′}-X_{2′}-X_{3′}-X_{4′}-X_{5′}-X_{6′}-X_{7′}-X_{8′}-X_{9′}-X_{10′}-X_{11′}-
X_{12′}-X_{13′}-X_{14′}-X_{15′}-X_{16′}-X_{17′}-X_{18′}-X_{19′}-X_{20′}-X_{21′}-
X_{22′}-X_{23′} -3′ (II)

[0471] wherein:
[0472] each X_{1′} to X_{23′} is independently selected from a 2′-deoxy modified nucleotide (deoxyribonucleotide), 2′-F modified nucleotide, 2′-OMe modified nucleotide, 2′-MOE modified nucleotide, and GNA; and
[0473] X_{1′} further includes a 5′-(E)-vinylphosphonate group.

[0474] In certain aspects, X_{1′} to X_{23′} do not include a 2′-MOE modified nucleotide. In some embodiments, each X_{1′} to X_{23′} is independently selected from 2′-F modified nucleotides and 2′-OMe modified nucleotides.

[0475] Alternatively, in certain aspect, X_{1′} to X_{23′} include one to four 2′-MOE modified nucleotides. In some embodiments, one of X_{1′}, X_{9′}, X_{10′}, and X_{23′} may be 2′-MOE modified nucleotide. In some embodiments, two of X_{1′}, X_{9′}, X_{10′}, and X_{23′} may be 2′-MOE modified nucleotides. In some embodiments, three of X_{1′}, X_{9′}, X_{10′}, and X_{23′} may be 2′-MOE modified nucleotides. In some embodiments, X_{1′}, X_{9′}, X_{10′}, and X_{23′} may be 2′-MOE modified nucleotide.

[0476] In some embodiments, X_{2′} is a 2′-F modified nucleotide. In some embodiments, X_{6′} is a 2′-F modified nucleotide. In some embodiments, X_{14′}is a 2′-F modified nucleotide. In some embodiments, X_{16′} is a 2′-F modified nucleotide. In some embodiments, two of X_{2′}, X_{6′}, X_{14′} and X_{16′} are 2′-F modified nucleotides. In some embodiments, three of X_{2′}, X_{6′}, X_{14′} and X_{16′} are 2′-F modified nucleotides. In some embodiments, each X_{2′}, X_{6′}, X_{14′} and X_{16′} is a 2′-F modified nucleotide.

[0477] In some embodiments, X_{1′} to X_{23′} may include at least one GNA. In some embodiments, X_{1′} to X_{23′} may include only one GNA. In some embodiments, X_{5′} is a GNA.

[0478] In some embodiments, the antisense strand includes 2′-OMe modified nucleotides in the remaining positions in the antisense strand.

[0479] In some embodiments, at least two from X_{1′}, X_{2′}, X_{21′}, and X_{22′} contain 3′-PS groups. In some embodiments, two from X_{1′}, X_{2′}, X_{21′}, and X_{22′} contain a 3′-PS group, respectively. In some embodiments, three from X_{1′}, X_{2′}, X_{21′}, and X_{22′} contain a 3′-PS group. In some embodiments, each X_{1′}, X_{2′}, X_{21′}, and X_{22′} contains a 3′-PS group.

[0480] In some embodiments, at least four from X_{1′}, X_{2′}, X_{3′}, X_{4′}, X_{19′}, X_{20′}, X_{21′}, and X_{22′} contain 3′-PS groups. In some embodiments, four from X_{1′}, X_{2′}, X_{3′}, X_{4′}, X_{19′}, X_{20′}, X_{21′}, and X_{22′} contain a 3′-PS group, respectively. In some embodiments, six from X_{1′}, X_{2′}, X_{3′}, X_{4′}, X_{19′}, X_{20′}, X_{21′}, and X_{22′} contain a 3′-PS group, respectively. In some embodiments, X_{1′}, X_{2′}, X_{3′}, X_{4′}, X_{19′}, X_{20′}, X_{21′}, and X_{22′} contain a 3′-PS group, respectively.

[0481] In some embodiments, in X_{3′} to X_{20′}, two to six nucleotides contain 3′-PS groups. In some embodiments, in X_{3′} to X_{20′}, two nucleotides contain a 3′-PS group, respectively. In some embodiments, in X_{3′} to X_{20′}, three nucleotides contain a 3′-PS group, respectively. In some embodiments, in X_{3′} to X_{20′}, four nucleotides contain a 3′-PS group, respectively. In some embodiments, in X_{3′} to X_{20′}, five nucleotides contain a 3′-PS group, respectively. In some embodiments, in X_{3′} to X_{20′}, six nucleotides contain a 3′-PS group, respectively.

[0482] In certain aspects, the antisense strand includes 5′-(E)-VP modified nucleotide at the first nucleotide from 5′ end of the antisense strand. In some embodiments, the antisense strand includes a 5′-(E)-VP-2′-OMe modified nucleotide at the first nucleotide from 5′ end of the antisense strand.

[0483] In some embodiments, the antisense strand having 23 nucleotides in length includes:
[0484] (i) a 5′-(E)-VP-2′-OMe modification at the first nucleotide from 5′ end of the antisense strand; and
[0485] (ii) 3′-PS modifications at the 1^{st}, 2^{nd}, 21^{st}, and/or 22^{nd} nucleotides from 5′-end of the antisense strand.

[0486] In some embodiments, the antisense strand having 23 nucleotides in length includes:
[0487] (i) a 5′-(E)-VP-2′-OMe modification at the first nucleotide from 5′ end of the antisense strand; and
[0488] (ii) 2′-F modifications at 2^{nd}, 6^{th}, 14^{th}, and/or 16^{th} nucleotides from the 5′ end of the antisense strand.

[0489] In some embodiments, the antisense strand having 23 nucleotides in length includes:
[0490] (i) a 5′-(E)-VP-2′-OMe modification at the first nucleotide from 5′ end of the antisense strand, and
[0491] (ii) 2′-F modifications at 2^{nd}, 6^{th}, 14^{th}, and/or 16^{th} nucleotides from the 5′ end of the antisense strand; and 2′-OMe modifications in the remaining nucleotides.

[0492] In some embodiments, the antisense strand having 23 nucleotides in length includes:
[0493] (i) a 5′-(E)-VP-2′-OMe modification at the first nucleotide from 5′ end of the antisense strand;
[0494] (ii) 2′-F modifications at 2^{nd}, 6^{th}, 14^{th}, and/or 16^{th} nucleotides from the 5′ end of the antisense strand; and
[0495] (iii) 3′-PS modifications at the 1^{st}, 2^{nd}, 21^{st}, and/or 22^{nd} nucleotides from 5′-end of the antisense strand.

[0496] In some embodiments, the antisense strand having 23 nucleotides in length includes:
[0497] (i) a 5′-(E)-VP-2′-OMe modification at the first nucleotide from 5′ end of the antisense strand;
[0498] (ii) 2′-F modification at 2^{nd}, 6^{th}, 14^{th}, and/or 16^{th} nucleotides from the 5′ end of the antisense strand; and 2′-OMe modification in the remaining nucleotides, and
[0499] (iii) 3′-PS modification at the 1^{st}, 2^{nd}, 21^{st}, and/or 22^{nd} nucleotides from 5′-end of the antisense strand.

[0500] In some embodiments, the antisense strand having 23 nucleotides in length includes:
[0501] (i) a 5′-(E)-VP-2′-OMe modification at the first nucleotide from 5′ end of the antisense strand;
[0502] (ii) 2′-F modification at 2^{nd}, 6^{th}, 14^{th}, and 16^{th} nucleotides from the 5′ end of the antisense strand; and 2′-OMe modification in the remaining nucleotides, and
[0503] (iii) 3′-PS modification at the 1^{st}, 2^{nd}, 21^{st}, and 22^{nd} nucleotides from 5′-end of the antisense strand.

[0504] In some embodiments, the antisense strand having 23 nucleotides in length includes:
[0505] (i) a 5′-(E)-VP-2′-OMe modification at the first nucleotide from 5′ end of the antisense strand;
[0506] (ii) 2′-F modifications at 2^{nd}, 6^{th}, 14^{th}, and/or 16^{th} nucleotides from the 5′ end of the antisense strand; GNA at 5^{th} nucleotide from the 5′ end of the antisense strand; and 2′-OMe modifications in the remaining nucleotides; and
[0507] (iii) 3′-PS modifications at the 1^{st}, 2^{nd}, 21^{st}, and/or 22^{nd} nucleotides from 5′ end of the antisense strand.

[0508] In some embodiments, the antisense strand having 23 nucleotides in length includes:
[0509] (i) a 5′-(E)-VP-2′-OMe modification at the first nucleotide from 5′ end of the antisense strand;
[0510] (ii) 2′-F modifications at 2^{nd}, 14^{th}, and/or 16^{th} nucleotides from the 5′ end of the antisense strand; GNA at 6^{th} nucleotide from the 5′ end of the antisense strand; and 2′-OMe modifications in the remaining nucleotides; and
[0511] (iii) 3′-PS modifications at the 1^{st}, 2^{nd}, 21^{st}, and/or 22^{nd} nucleotides from 5′ end of the antisense strand.

[0512] In some embodiments, the antisense strand having 23 nucleotides in length includes:
[0513] (i) a 5′-(E)-VP-2′-OMe modification at the first nucleotide from 5′ end of the antisense strand;
[0514] (ii) 2′-F modifications at 2^{nd}, 6^{th}, 14^{th}, and/or 16^{th} nucleotides from the 5′ end of the antisense strand; GNA at 7^{th} nucleotide from the 5′ end of the antisense strand; and 2′-OMe modifications in the remaining nucleotides; and
[0515] (iii) 3′-PS modifications at the 1^{st}, 2^{nd}, 21^{st}, and/or 22^{nd} nucleotides from 5′ end of the antisense strand.

[0516] In some embodiments, the antisense strand having 23 nucleotides in length includes:
[0517] (i) a 5′-(E)-VP-2′-OMe modification at the first nucleotide from 5′ end of the antisense strand;
[0518] (ii) 2′-F modifications at 2^{nd}, 6^{th}, 14^{th}, and/or 16^{th} nucleotides from the 5′ end of the antisense strand; TNA at 3^{rd} nucleotide from the 5′ end of the antisense strand; and 2′-OMe modifications in the remaining nucleotides; and
[0519] (iii) 3′-PS modifications at the 1^{st}, 2^{nd}, 21^{st}, and/or 22^{nd} nucleotides from 5′ end of the antisense strand.

[0520] In some embodiments, the antisense strand having 23 nucleotides in length includes:
[0521] (i) a 5′-(E)-VP-2′-OMe modification at the first nucleotide from 5′ end of the antisense strand;
[0522] (ii) 2′-F modifications at 2^{nd}, 6^{th}, 14^{th}, and/or 16^{th} nucleotides from the 5′ end of the antisense strand; TNA at 5^{th} nucleotide from the 5′ end of the antisense strand; and 2′-OMe modifications in the remaining nucleotides; and
[0523] (iii) 3′-PS modifications at the 1^{st}, 2^{nd}, 21^{st}, and/or 22^{nd} nucleotides from 5′ end of the antisense strand.

[0524] In some embodiments, the antisense strand having 23 nucleotides in length includes:
[0525] (i) a 5′-(E)-VP-2′-OMe modification at the first nucleotide from 5′ end of the antisense strand;
[0526] (ii) 2′-F modifications at 2^{nd}, 14^{th}, and/or 16^{th} nucleotides from the 5′ end of the antisense strand; TNA at 6^{th} nucleotide from the 5′ end of the antisense strand; and 2′-OMe modifications in the remaining nucleotides; and
[0527] (iii) 3′-PS modifications at the 1^{st}, 2^{nd}, 21^{st}, and/or 22^{nd} nucleotides from 5′ end of the antisense strand.

[0528] In some embodiments, the antisense strand having 23 nucleotides in length includes:
[0529] (i) a 5′-(E)-VP-2′-OMe modification at the first nucleotide from 5′ end of the antisense strand;
[0530] (ii) 2′-F modifications at 2^{nd}, 6^{th}, 14^{th}, and/or 16^{th} nucleotides from the 5′ end of the antisense strand; TNA at 7^{th} nucleotide from the 5′ end of the antisense strand; and 2′-OMe modifications in the remaining nucleotides; and
[0531] (iii) 3′-PS modifications at the 1^{st}, 2^{nd}, 21^{st}, and/or 22^{nd} nucleotides from 5′ end of the antisense strand.

[0532] In some embodiments, the antisense strand having 23 nucleotides in length includes:
[0533] (i) a 5′-(E)-VP-2′-OMe modification at the first nucleotide from 5′ end of the antisense strand;
[0534] (ii) 2′-F modifications at 2^{nd}, 6^{th}, 14^{th}, and/or 16^{th} nucleotides from the 5′ end of the antisense strand; a 2′-deoxy modification at 5^{th} nucleotide from the 5′ end of the antisense strand; and 2′-OMe modifications in the remaining nucleotides; and
[0535] (iii) 3′-PS modifications at the 1^{st}, 2^{nd}, 21^{st}, and/or 22^{nd} nucleotides from 5′ end of the antisense strand.

[0536] In some embodiments, the antisense strand having 23 nucleotides in length includes:
[0537] (i) a 5′-(E)-VP-2′-OMe modification at the first nucleotide from 5′ end of the antisense strand;
[0538] (ii) 2′-F modifications at 2^{nd}, 14^{th}, and/or 16^{th} nucleotides from the 5′ end of the antisense strand; a 2′-deoxy modification at 6^{th} nucleotide from the 5′ end of the antisense strand; and 2′-OMe modifications in the remaining nucleotides; and
[0539] (iii) 3′-PS modifications at the 1^{st}, 2^{nd}, 21^{st}, and/or 22^{nd} nucleotides from 5′ end of the antisense strand.

[0540] In some embodiments, the antisense strand having 23 nucleotides in length includes:
[0541] (i) a 5′-(E)-VP-2′-OMe modification at the first nucleotide from 5′ end of the antisense strand;
[0542] (ii) 2′-F modifications at 2^{nd}, 6^{th}, 14^{th}, and/or 16^{th} nucleotides from the 5′ end of the antisense strand; a 2′-deoxy modification at 7^{th} nucleotide from the 5′ end of the antisense strand; and 2′-OMe modifications in the remaining nucleotides; and
[0543] (iii) 3′-PS modifications at the 1^{st}, 2^{nd}, 21^{st}, and/or 22^{nd} nucleotides from 5′ end of the antisense strand.

[0544] In some embodiments, the antisense strand having 23 nucleotides in length includes:
[0545] (i) a 5′-(E)-VP-2′-OMe modification at the first nucleotide from 5′ end of the antisense strand;
[0546] (ii) 2′-F modifications at 2^{nd}, 6^{th}, 14^{th}, and/or 16^{th} nucleotides from the 5′ end of the antisense strand; GNA at 3^{rd} and 5^{th} nucleotides from the 5′ end of the antisense strand; and 2′-OMe modifications in the remaining nucleotides; and
[0547] (iii) 3′-PS modifications at the 1^{st}, 2^{nd}, 21^{st}, and/or 22^{nd} nucleotides from 5′ end of the antisense strand.

[0548] In some embodiments, the antisense strand having 23 nucleotides in length includes:
[0549] (i) a 5′-(E)-VP-2′-OMe modification at the first nucleotide from 5′ end of the antisense strand;
[0550] (ii) 2′-F modifications at 2^{nd}, 14^{th}, and/or 16^{th} nucleotides from the 5′ end of the antisense strand; GNA at 3^{rd} and 6^{th} nucleotides from the 5′ end of the antisense strand; and 2′-OMe modifications in the remaining nucleotides; and
[0551] (iii) 3′-PS modifications at the 1^{st}, 2^{nd}, 21^{st}, and/or 22^{nd} nucleotides from 5′ end of the antisense strand.

[0552] In some embodiments, the antisense strand having 23 nucleotides in length includes:
[0553] (i) a 5′-(E)-VP-2′-OMe modification at the first nucleotide from 5′ end of the antisense strand;
[0554] (ii) 2′-F modifications at 2^{nd}, 6^{th}, 14^{th}, and/or 16th nucleotides from the 5′ end of the antisense strand; GNA at 3rd and 7^{th} nucleotides from the 5′ end of the antisense strand; and 2′-OMe modifications in the remaining nucleotides; and
[0555] (iii) 3′-PS modifications at the It, 2^{nd}, 21^{st}, and/or 22^{nd} nucleotides from 5′ end of the antisense strand.

[0556] In some embodiments, the antisense strand having 23 nucleotides in length includes:
[0557] (i) a 5′-(E)-VP-2′-OMe modification at the first nucleotide from 5′ end of the antisense strand;
[0558] (ii) 2′-F modifications at 2^{nd}, 6^{th}, 14^{th}, and/or 16^{th} nucleotides from the 5′ end of the antisense strand; TNA at 3^{rd} and 5^{th} nucleotides from the 5′ end of the antisense strand; and 2′-OMe modifications in the remaining nucleotides; and
[0559] (iii) 3′-PS modifications at the 1^{st}, 2^{nd}, 21^{st}, and/or 22^{nd} nucleotides from 5′ end of the antisense strand.

[0560] In some embodiments, the antisense strand having 23 nucleotides in length includes:
[0561] (i) a 5′-(E)-VP-2′-OMe modification at the first nucleotide from 5′ end of the antisense strand;
[0562] (ii) 2′-F modifications at 2^{nd}, 14^{th}, and/or 16^{th} nucleotides from the 5′ end of the antisense strand; TNA at 3^{rd} and 6^{th} nucleotides from the 5′ end of the antisense strand; and 2′-OMe modifications in the remaining nucleotides; and
[0563] (iii) 3′-PS modifications at the 1^{st}, 2^{nd}, 21^{st}, and/or 22^{nd} nucleotides from 5′ end of the antisense strand.

[0564] In some embodiments, the antisense strand having 23 nucleotides in length includes:
[0565] (i) a 5′-(E)-VP-2′-OMe modification at the first nucleotide from 5′ end of the antisense strand;
[0566] (ii) 2′-F modifications at 2^{nd}, 6^{th}, 14^{th}, and/or 16^{th} nucleotides from the 5′ end of the antisense strand; TNA at 3^{rd} and 7^{th} nucleotides from the 5′ end of the antisense strand; and 2′-OMe modifications in the remaining nucleotides; and
[0567] (iii) 3′-PS modifications at the 1^{st}, 2^{nd}, 21^{st}, and/or 22^{nd} nucleotides from 5′ end of the antisense strand.

[0568] In some embodiments, the antisense strand having 23 nucleotides in length includes:
[0569] (i) a 5′-(E)-VP-2′-OMe modification at the first nucleotide from 5′ end of the antisense strand;
[0570] (ii) 2′-F modifications at 2^{nd}, 6^{th}, 14^{th}, and/or 16^{th} nucleotides from the 5′ end of the antisense strand; a 2′-deoxy modification at 3^{rd} and 5^{th} nucleotides from the 5′ end of the antisense strand; and 2′-OMe modifications in the remaining nucleotides; and
[0571] (iii) 3′-PS modifications at the 1^{st}, 2^{nd}, 21^{st}, and/or 22^{nd} nucleotides from 5′ end of the antisense strand.

[0572] In some embodiments, the antisense strand having 23 nucleotides in length includes:
[0573] (i) a 5′-(E)-VP-2′-OMe modification at the first nucleotide from 5′ end of the antisense strand;
[0574] (ii) 2′-F modifications at 2^{nd}, 14^{th}, and/or 16^{th} nucleotides from the 5′ end of the antisense strand; a 2′-deoxy modification at 3^{rd} and 6^{th} nucleotide from the 5′ end of the antisense strand; and 2′-OMe modifications in the remaining nucleotides; and
[0575] (iii) 3′-PS modifications at the 1^{st}, 2^{nd}, 21^{st}, and/or 22^{nd} nucleotides from 5′ end of the antisense strand.

[0576] In some embodiments, the antisense strand having 23 nucleotides in length includes:
[0577] (i) a 5′-(E)-VP-2′-OMe modification at the first nucleotide from 5′ end of the antisense strand;
[0578] (ii) 2′-F modifications at 2^{nd}, 6^{th}, 14^{th}, and/or 16^{th} nucleotides from the 5′ end of the antisense strand; a 2′-deoxy modification at 3^{rd} and 7^{th} nucleotides from the 5′ end of the antisense strand; and 2′-OMe modifications in the remaining nucleotides; and
[0579] (iii) 3′-PS modifications at the 1^{st}, 2^{nd}, 21^{st}, and/or 22^{nd} nucleotides from 5′ end of the antisense strand.

TABLE C

| | 5′-VP | | | | 2′-deoxy | 2′-OMe | |
|---|---|---|---|---|---|---|---|
| 23-mer AS | modified | 2′-F | | | modified | modified | |
| modification | nucleotide | modified | GNA | TNA | nucleotide | nucleotide | 3′-PS |
| pattern | position | nucleotide | position | position | position | position | linkage |
| AS1 | — | 2, 6, 14, 16 | | | | 1, 3, 4, 5, 7, 8, | 1, 2, 21, 22 |
| | | | | | | 9, 10, 11, 12, | |
| | | | | | | 13, 15, 17, 18, | |
| | | | | | | 19, 20, 21, 22, | |
| | | | | | | 23 | |
| AS2 | 1 | 2, 6, 14, 16 | | | | 1, 3, 4, 5, 7, 8, | 1, 2, 21, 22 |
| | | | | | | 9, 10, 11, 12, | |
| | | | | | | 13, 15, 17, 18, | |
| | | | | | | 19, 20, 21, 22, | |
| | | | | | | 23 | |
| AS3 | 1 | 2, 6, 14, 16 | 5 | | | 1, 3, 4, 7, 8, 9, | 1, 2, 21, 22 |
| | | | | | | 10, 11, 12, 13, | |
| | | | | | | 15, 17, 18, 19, | |
| | | | | | | 20, 21, 22, 23 | |
| AS4 | 1 | 2, 14, 16 | 6 | | | 1, 3, 4, 5, 7, 8, | 1, 2, 21, 22 |
| | | | | | | 9, 10, 11, 12, | |
| | | | | | | 13, 15, 17, 18, | |
| | | | | | | 19, 20, 21, 22, | |
| | | | | | | 23 | |
| AS5 | 1 | 2, 6, 14, 16 | 7 | | | 1, 3, 4, 5, 8, 9, | 1, 2, 21, 22 |
| | | | | | | 10, 11, 12, 13, | |
| | | | | | | 15, 17, 18, 19, | |
| | | | | | | 20, 21, 22, 23 | |
| AS6 | 1 | 2, 6, 14, 16 | | 3 | | 1, 4, 5, 7, 8, 9, | 1, 2, 21, 22 |
| | | | | | | 10, 11, 12, 13, | |
| | | | | | | 15, 17, 18, 19, | |
| | | | | | | 20, 21, 22, 23 | |
| AS7 | 1 | 2, 6, 14, 16 | | 5 | | 1, 3, 4, 7, 8, 9, | 1, 2, 21, 22 |
| | | | | | | 10, 11, 12, 13, | |
| | | | | | | 15, 17, 18, 19, | |
| | | | | | | 20, 21, 22, 23 | |
| AS8 | 1 | 2, 14, 16 | | 6 | | 1, 3, 4, 5, 7, 8, | 1, 2, 21, 22 |
| | | | | | | 9, 10, 11, 12, | |
| | | | | | | 13, 15, 17, 18, | |
| | | | | | | 19, 20, 21, 22, | |
| | | | | | | 23 | |
| AS9 | 1 | 2, 6, 14, 16 | | 7 | | 1, 3, 4, 5, 8, 9, | 1, 2, 21, 22 |
| | | | | | | 10, 11, 12, 13, | |
| | | | | | | 15, 17, 18, 19, | |
| | | | | | | 20, 21, 22, 23 | |
| AS10 | 1 | 2, 6, 14, 16 | | | 5 | 1, 3, 4, 7, 8, 9, | 1, 2, 21, 22 |
| | | | | | | 10, 11, 12, 13, | |
| | | | | | | 15, 17, 18, 19, | |
| | | | | | | 20, 21, 22, 23 | |
| AS11 | 1 | 2, 14, 16 | | | 6 | 1, 3, 4, 5, 7, 8, | 1, 2, 21, 22 |
| | | | | | | 9, 10, 11, 12, | |
| | | | | | | 13, 15, 17, 18, | |
| | | | | | | 19, 20, 21, 22, | |
| | | | | | | 23 | |
| AS12 | 1 | 2, 6, 14, 16 | | | 7 | 1, 3, 4, 5, 8, 9, | 1, 2, 21, 22 |
| | | | | | | 10, 11, 12, 13, | |
| | | | | | | 15, 17, 18, 19, | |
| | | | | | | 20, 21, 22, 23 | |
| AS13 | 1 | 2, 6, 14, 16 | 3,5 | | | 1, 4, 7, 8, 9, | 1, 2, 21, 22 |
| | | | | | | 10, 11, 12, 13, | |
| | | | | | | 15, 17, 18, 19, | |
| | | | | | | 20, 21, 22, 23 | |
| AS14 | 1 | 2, 14, 16 | 3, 6 | | | 1, 4, 5, 7, 8, 9, | 1, 2, 21, 22 |
| | | | | | | 10, 11, 12, 13, | |
| | | | | | | 15, 17, 18, 19, | |
| | | | | | | 20, 21, 22, 23 | |
| AS15 | 1 | 2, 6, 14, 16 | 3, 7 | | | 1, 4, 5, 8, 9, | 1, 2, 21, 22 |
| | | | | | | 10, 11, 12, 13, | |
| | | | | | | 15, 17, 18, 19, | |
| | | | | | | 20, 21, 22, 23 | |
| AS16 | 1 | 2, 6, 14, 16 | | 3,5 | | 1, 4, 7, 8, 9, | 1, 2, 21, 22 |
| | | | | | | 10, 11, 12, 13, | |
| | | | | | | 15, 17, 18, 19, | |
| | | | | | | 20, 21, 22, 23 | |
| AS17 | 1 | 2, 14, 16 | | 3, 6 | | 1, 4, 5, 7, 8, 9, | 1, 2, 21, 22 |
| | | | | | | 10, 11, 12, 13, | |
| | | | | | | 15, 17, 18, 19, | |
| | | | | | | 20, 21, 22, 23 | |
| AS18 | 1 | 2, 6, 14, 16 | | 3, 7 | | 1, 4, 5, 8, 9, | 1, 2, 21, 22 |
| | | | | | | 10, 11, 12, 13, | |
| | | | | | | 15, 17, 18, 19, | |
| | | | | | | 20, 21, 22, 23 | |
| AS19 | 1 | 2, 6, 14, 16 | | | 3,5 | 1, 4, 7, 8, 9, | 1, 2, 21, 22 |
| | | | | | | 10, 11, 12, 13, | |
| | | | | | | 15, 17, 18, 19, | |
| | | | | | | 20, 21, 22, 23 | |
| AS20 | 1 | 2, 14, 16 | | | 3, 6 | 1, 4, 5, 7, 8, 9, | 1, 2, 21, 22 |
| | | | | | | 10, 11, 12, 13, | |
| | | | | | | 15, 17, 18, 19, | |
| | | | | | | 20, 21, 22, 23 | |
| AS21 | 1 | 2, 6, 14, 16 | | | 3, 7 | 1, 4, 5, 8, 9, | 1, 2, 21, 22 |
| | | | | | | 10, 11, 12, 13, | |
| | | | | | | 15, 17, 18, 19, | |
| | | | | | | 20, 21, 22, 23 | |

[0580] In an aspect, the dsRNAi agent having the nucleotides modification patterns as described herein can improve half-life relative to a reference dsRNAi agent that does not contain such nucleotides modification patterns. In some embodiments, the dsRNAi agent having the nucleotides modification patterns as described herein improved half-life by about 1.1 fold, 1.2 fold, 1.3 fold, 1.4 fold, 1.5 fold, 1.6 fold, 1.7 fold, 1.8 fold, 1.9 fold, 2.0 fold, 3.0 fold, 4.0 fold, 5.0 fold, 6.0 fold, 7.0 fold, 8.0 fold, 9.0 fold, 10 fold, or more relative to a reference dsRNAi agent that does not contain such nucleotides modification patterns. In some embodiments, the dsRNAi agent having the nucleotides modification patterns as described herein improved half-life by about 2 fold, 2.5 fold, 3 fold, 3.5 fold, 4 fold, 4.5 fold, 5 fold, 7 fold, or 10 fold, relative to a reference dsRNAi agent that does not contain such nucleotides modification patterns.

dsRNA Modification Pattern

[0581] In an aspect, the dsRNA as described herein includes a sense strand of Formula (I) as described herein and an antisense strand of Formula (II) as described herein. The sense strand and the antisense strand form a duplex.

[0582] In certain aspects, the dsRNA includes:
[0583] (i) a sense strand including 2′-MOE modifications at X₁, X₂, X₂₀ and X₂₁; and
[0584] (ii) an antisense strand including a 5′-(E)-VP-2′-OMe modification at X_{1′}.

[0585] In some embodiments, the dsRNA includes:
[0586] (i) a sense strand including:
   [0587] (a) 2′-MOE modifications at X₁, X₂, X₂₀ and X₂₁; and
   [0588] (b) 3′-PS modifications at X₁ and X₂, and
[0589] (ii) an antisense strand including:
   [0590] (a) a 5′-(E)-VP-2′-OMe modification at X_{1′}; and
   [0591] (b) 3′-PS modifications at X_{1′}, X_{2′}, X_{21′}, and X_{22′}.

[0592] In some embodiments, the dsRNA includes:
[0593] (i) a sense strand including:
   [0594] (a) 2′-MOE modifications at X₁, X₂, X₂₀ and X₂₁; and 2′-F modifications at X₇, X₉, X₁₀ and X₁₁, and
[0595] (ii) an antisense strand including:
   [0596] (a) a 5′-(E)-VP-2′-OMe modification at X_{1′}, and
   [0597] (b) 2′-F modifications at X_{2′}, X_{6′}, X_{14′} and/or X_{16′}.

[0598] In some embodiments, the dsRNA includes:
[0599] (i) a sense strand including:
   [0600] (a) 2′-MOE modifications at X₁, X₂, X₂₀ and X₂₁; and 2′-F modifications at X₇, X₉, X₁₀ and X₁₁, and
   [0601] (b) 3′-PS modifications at X₁ and X₂, and
[0602] (ii) an antisense strand including:
   [0603] (a) a 5′-(E)-VP-2′-OMe modification at X_{1′};
   [0604] (b) 2′-F modifications at X_{2′}, X_{6′}, X_{14′} and/or X_{16′}; and
   [0605] (c) 3′-PS modifications X_{1′}, X_{2′}, X_{21′}, and X_{22′}.

[0606] In some embodiments, the dsRNA includes:
[0607] (i) a sense strand including:
   [0608] (a) 2′-MOE modifications at X₁, X₂, X₂₀ and X₂₁; 2′-F modifications at X₇, X₉, X₁₀ and X₁₁; and 2′-OMe modifications in the remaining nucleotides in the sense strand, and
   [0609] (b) 3′-PS modifications at X₁ and X₂, and
[0610] (ii) an antisense strand including:
   [0611] (a) a 5′-(E)-VP-2′-OMe modification at X_{1′},
   [0612] (b) 2′-F modifications at X_{2′}, X_{6′}, X_{14′} and/or X_{11′}; and 2′-OMe modifications in the remaining nucleotides in the antisense strand, and
   [0613] (c) 3′-PS modifications at X_{1′}, X_{2′}, X_{21′}, and X_{22′}.

[0614] In some embodiments, the dsRNA includes:
[0615] (i) a sense strand including:
   [0616] (a) 2′-MOE modifications at X₁, X₂, X₂₀ and X₂₁; 2′-F modifications at X₇, X₉, X₁₀ and X₁₁; and 2′-OMe modifications in the remaining nucleotides in the sense strand, and
   [0617] (b) 3′-PS modifications at X₁ and X₂, and
[0618] (ii) an antisense strand including:
   [0619] (a) a 5′-(E)-VP-2′-OMe modification at X_{1′},
   [0620] (b) a GNA nucleotide at X_{5′},
   [0621] (c) 2′-F modifications at X_{2′}, X_{6′}, X_{14′} and/or X_{16′}; and 2′-OMe modifications in the remaining nucleotides in the antisense strand, and (d) 3′-PS modifications at X_{1′}, X_{2′}, X_{21′}, and X_{22′}.

[0622] In some embodiments, the dsRNA includes:
[0623] (i) a sense strand including:
   [0624] (a) 2′-MOE modifications at X₁, X₂, X₂₀ and X₂₁; 2′-F modifications at X₇, X₉, X₁₀ and X₁₁; and 2′-OMe modifications in the remaining nucleotides in the sense strand, and
   [0625] (b) 3′-PS modifications at X₁ and X₂, and
[0626] (ii) an antisense strand including:
   [0627] (a) a 5′-(E)-VP-2′-OMe modification at X_{1′};
   [0628] (b) 3′-PS modifications at X_{1′}, X_{2′}, X_{21′}, and X_{22′}; and
   [0629] (c) one selected from:
      [0630] (c1) 2′-F modifications at X_{2′}, X_{6′}, X_{14′} and X_{16′}; and 2′-OMe modifications in the remaining nucleotides in the antisense strand,
      [0631] (c2) 2′-F modifications at X_{2′}, X_{6′}, X_{14′} and X_{16′}; TNA at X_{3′}; and 2′-OMe modifications in the remaining nucleotides in the antisense strand,
      [0632] (c3) 2′-F modifications at X_{2′}, X_{6′}, X_{14′} and X_{16′}; TNA, GNA or 2′-deoxy modification at X₅; and 2′-OMe modifications in the remaining nucleotides in the antisense strand,
      [0633] (c4) 2′-F modifications at X_{2′}, X_{14′} and X_{16′}; TNA, GNA or 2′-deoxy modification at X_{6′}; and 2′-OMe modifications in the remaining nucleotides in the antisense strand, and
      [0634] (c5) 2′-F modifications at X_{2′}, X_{6′}, X_{14′} and X_{16′}; TNA, GNA or 2′-deoxy modification at X_{7′}; and 2′-OMe modifications in the remaining nucleotides in the antisense strand.

[0635] In some embodiments, the dsRNA includes:
[0636] (i) a sense strand of Formula (I′) including:
   [0637] (a) TNAs at Y₁, Y₂, Y₂₀ and Y₂₁; and
   [0638] (b) 3′-PS modifications at Y₁, Y₂, Y₁₉, and Y₂₀, and
[0639] (ii) an antisense strand of Formula (II) including:
   [0640] (a) a 5′-(E)-VP-2′-OMe modification at X_{1′}; and
   [0641] (b) 3′-PS modifications at X_{1′}, X_{2′}, X_{21′}, and X_{22′}.

[0642] In some embodiments, the dsRNA includes:
[0643] (i) a sense strand of Formula (I′) including:
   [0644] (a) TNAs at Y₁, Y₂, Y₂₀ and Y₂₁;
   [0645] (b) 3′-PS modifications at Y₁, Y₂, Y₁₉, and/or Y₂₀; and
   [0646] (c) 2′-F modifications at Y₇, Y₉, and Y₁₀; 2′-deoYy modification at Y₁₁; and 2′-OMe modifications in the remaining nucleotides in the sense strand, and
[0647] (ii) an antisense strand of Formula (II) including:
   [0648] (a) a 5′-(E)-VP-2′-OMe modification at X_{1′};
   [0649] (b) 3′-PS modifications at X_{1′}, X_{2′}, X_{21′}, and X_{22′}; and
   [0650] (c) one selected from:
      [0651] (c1) 2′-F modifications at X_{2′}, X_{6′}, X_{14′} and X_{16′}; and 2′-OMe modifications in the remaining nucleotides in the antisense strand,
      [0652] (c2) 2′-F modifications at X_{2′}, X_{6′}, X_{14′} and X_{16′}; TNA at X_{3′}; and 2′-OMe modifications in the remaining nucleotides in the antisense strand,
      [0653] (c3) 2′-F modifications at X_{2′}, X_{6′}, X_{14′} and X_{16′}; TNA, GNA or 2′-deoxy modification at X_{5′}; and 2′-OMe modifications in the remaining nucleotides in the antisense strand,
      [0654] (c4) 2′-F modifications at X_{2′}, X_{14′} and X_{16′}; TNA, GNA or 2′-deoxy modification at X_{6′}; and 2′-OMe modifications in the remaining nucleotides in the antisense strand, and
      [0655] (c5) 2′-F modifications at X_{2′}, X_{6′}, X_{14′} and X_{16′}; TNA, GNA or 2′-deoxy modification at X_{7′}; and 2′-OMe modifications in the remaining nucleotides in the antisense strand.

[0656] In certain aspects, the dsRNA includes:
[0657] (i) a sense strand having 21 nucleotides in length and including 2′-MOE modifications at the 1^{st}, 2^{nd}, 20^{th} and 21^{st} nucleotides from the 5′end of the sense strand; and
[0658] (ii) an antisense strand having 23 nucleotides in length and including a 5′-(E)-VP-2′-OMe modification at the 1^{st} nucleotide from 5′ end of the antisense strand.

[0659] In some embodiments, the dsRNA as described herein includes a sense strand having 21 nucleotides in length and an antisense strand having 23 nucleotides.

[0660] In some embodiments, the dsRNA as described herein includes a sense strand having 21 nucleotides in length and including 2′-MOE modifications at the 1^{st}, 2^{nd}, 20^{th} and 21^{st} nucleotides from the 5′end of the sense strand.

[0661] In some embodiments, the dsRNA as described herein includes antisense strand having 23 nucleotides in length and including a 5′-(E)-VP-2′-OMe modification at the 1st position from 5′ end of the antisense strand.

[0662] In some embodiments, the dsRNA has Modification Pattern A of:
[0663] (i) a sense strand having 21 nucleotides in length and including:
   [0664] (a) 2′-MOE modifications at the 1^{st}, 2^{nd}, 20^{th} and 21^{st} nucleotides from the 5′end of the sense strand, and
   [0665] (b) 3′-PS modifications at the 1^{st} and 2^{nd} nucleotides from 5′-end of the sense strand, and
[0666] (ii) an antisense strand having 23 nucleotides in length and including:
   [0667] (a) a 5′-(E)-VP-2′-OMe modification at the 1^{st} position from 5′ end of the antisense strand, and
   [0668] (b) 3′-PS modifications at the 1^{st}, 2^{nd}, 21^{st}, and 22^{nd} nucleotides from 5′-end of the antisense strand.

[0669] In some embodiments, the dsRNA has Modification Pattern B of:
[0670] (i) a sense strand having 21 nucleotides in length and including:
   [0671] (a) 2′-MOE modifications at the 1^{st}, 2^{nd}, 20^{th} and 21^{st} nucleotides from the 5′-end of the sense strand; and 2′-F modifications at the 7^{th}, 9^{th}, 10^{th}, and 11^{th} nucleotides from the 5′ end of the sense strand, and
[0672] (ii) an antisense strand having 23 nucleotides in length and including:
   [0673] (a) a 5′-(E)-VP-2′-OMe modification at the 1^{st} position from 5′ end of the antisense strand, and
   [0674] (b) 2′-F modifications at the 2^{nd}, 6^{th}, 14^{th}, and 16^{th} nucleotides from the 5′ end of the antisense strand.

[0675] In some embodiments, the dsRNA has Modification Pattern C of:
[0676] (i) a sense strand having 21 nucleotides in length and including:
   [0677] (a) 2′-MOE modifications at the 1^{st}, 2^{nd}, 20^{th} and 21^{st} nucleotides from the 5′-end of the sense strand; and 2′-F modifications at the 7^{th}, 90^{th}, and 11^{th} nucleotides from the 5′ end of the sense strand, and
   [0678] (b) 3′-PS modifications at the 1^{st} and 2^{nd} nucleotides from 5′-end of the sense strand, and
[0679] (ii) an antisense strand having 23 nucleotides in length and including:
   [0680] (a) a 5′-(E)-VP-2′-OMe modification at the 1^{st} position from 5′ end of the antisense strand,
   [0681] (b) 2′-F modifications at the 2^{nd}, 6^{th}, 14^{th}, and 16^{th} nucleotides from the 5′ end of the antisense strand, and (c) 3′-PS modifications at the 1^{st}, 2^{nd}, 21^{st}, and 22^{nd} nucleotides from 5′-end of the antisense strand.

[0682] In some embodiments, the dsRNA has Modification Pattern D of:
[0683] (i) a sense strand having 21 nucleotides in length and including:
   [0684] (a) 2′-MOE modifications at the 1^{st}, 2^{nd}, 20^{th} and 21^{st} nucleotides from the 5′-end of the sense strand; 2′-F modifications at 7^{th}, 9^{th}, 10^{th}, and 11^{th} nucleotides from the 5′ end of the sense strand; and 2′-OMe modifications in the remaining nucleotides in the sense strand, and
   [0685] (b) 3′-PS modifications at the 1^{st} and 2^{nd} nucleotides from 5′-end of the sense strand, and
[0686] (ii) an antisense strand having 23 nucleotides in length and including:
   [0687] (a) a 5′-(E)-VP-2′-OMe modification at the 1^{st} position from 5′ end of the antisense strand,
   [0688] (b) 2′-F modifications at 2^{nd}, 6^{th}, 14^{th}, and 16^{th} nucleotides from the 5′ end of the antisense strand; and 2′-OMe modifications in the remaining nucleotides in the sense strand, and
   [0689] (c) 3′-PS modifications at the 1^{st}, 2^{nd}, 21^{st}, and 22^{nd} nucleotides from 5′-end of the antisense strand.

[0690] In some embodiments, the dsRNA has Modification Pattern E of:
[0691] (i) a sense strand having 21 monomers (e.g., nucleotides) in length and including:
   [0692] (a) 2′-MOE modifications at the 1^{st}, 2^{nd}, 20^{th} and 21^{st} positions from the 5′-end of the sense strand; 2′-F modifications at 7^{th}, 9^{th}, 10^{th}, and 11^{th} positions from the 5′ end of the sense strand; and 2′-OMe modifications in the remaining positions in the sense strand, and
   [0693] (b) 3′-PS modifications at the 1^{st} and 2^{nd} positions from 5′-end of the sense strand; and
[0694] (ii) an antisense strand having 23 monomers (e.g., nucleotides) in length and including:
   [0695] (a) a 5′-(E)-VP-2′-OMe modification at the 1St position from 5′ end of the antisense strand,
   [0696] (b) a GNA at 5^{th} position from the 5′ end of the antisense strand; 2′-F modifications at 2^{nd}, 6^{th}, 14^{th}, and 16^{th} positions from the 5′ end of the antisense strand; and 2′-OMe modifications in the remaining positions in the antisense strand, and
   [0697] (c) 3′-PS modifications at the 1^{st}, 2^{nd}, 21^{st}, and 22^{nd} positions from 5′-end of the antisense strand.

[0698] In some embodiments, the dsRNA has Modification Pattern E-1 of:
[0699] (i) a sense strand having 21 monomers (e.g., nucleotides) in length and including:
   [0700] (a) 2′-MOE modifications at the 1^{st}, 2^{nd}, 20^{th} and 21^{st} positions from the 5′-end of the sense strand; 2′-F modifications at 7^{th}, 9^{th}, 10^{th}, and 11^{th} positions from the 5′ end of the sense strand; and 2′-OMe modifications in the remaining positions in the sense strand, and
   [0701] (b) 3′-PS modifications at the 1^{st} and 2^{nd} positions from 5′-end of the sense strand; and
[0702] (ii) an antisense strand having 23 monomers (e.g., nucleotides) in length and including:
   [0703] (a) a 5′-(E)-VP-2′-OMe modification at the 1^{st} position from 5′ end of the antisense strand,
   [0704] (b) a GNA, TNA, or 2′-deoxy modification at 5^{th} position from the 5′ end of the antisense strand; 2′-F modifications at 2^{nd}, 6^{th}, 14^{th}, and 16^{th} positions from the 5′ end of the antisense strand; and 2′-OMe modifications in the remaining positions in the antisense strand, and
   [0705] (c) 3′-PS modifications at the 1^{st}, 2^{nd}, 21^{st}, and 22nd positions from 5′-end of the antisense strand.

[0706] In some embodiments, the dsRNA has Modification Pattern E-2 of:
[0707] (i) a sense strand having 21 monomers (e.g., nucleotides) in length and including:
   [0708] (a) 2′-MOE modifications at the 1^{st}, 2^{nd}, 20^{th} and 21^{st} positions from the 5′-end of the sense strand; 2′-F modifications at 7^{th}, 9^{th}, 10^{th}, and 11^{th} positions from the 5′ end of the sense strand; and 2′-OMe modifications in the remaining positions in the sense strand, and
   [0709] (b) 3′-PS modifications at the 1^{st} and 2^{nd} positions from 5′-end of the sense strand; and
[0710] (ii) an antisense strand having 23 monomers (e.g., nucleotides) in length and including:
   [0711] (a) a 5′-(E)-VP-2′-OMe modification at the 1^{st} position from 5′ end of the antisense strand,
   [0712] (b) a TNA nucleotide at 3^{rd} position from the 5′ end of the antisense strand; 2′-F modifications at 2^{nd}, 6^{th}, 14^{th}, and 16^{th} positions from the 5′ end of the antisense strand; and 2′-OMe modifications in the remaining positions in the antisense strand, and (c) 3′-PS modifications at the 1^{st}, 2^{nd}, 21^{st}, and 22nd positions from 5′-end of the antisense strand.

[0713] In some embodiments, the dsRNA has Modification Pattern E-3 of:
[0714] (i) a sense strand having 21 monomers (e.g., nucleotides) in length and including:
   [0715] (a) 2′-MOE modifications at the 1^{st}, 2^{nd}, 20^{th} and 21^{st} positions from the 5′-end of the sense strand; 2′-F modifications at 7^{th}, 9^{th}, 10^{th}, and 11^{th} positions from the 5′ end of the sense strand; and 2′-OMe modifications in the remaining positions in the sense strand, and
   [0716] (b) 3′-PS modifications at the 1^{st} and 2^{nd} positions from 5′-end of the sense strand; and
[0717] (ii) an antisense strand having 23 monomers (e.g., nucleotides) in length and including:
   [0718] (a) a 5′-(E)-VP-2′-OMe modification at the 1^{st} position from 5′ end of the antisense strand,
   [0719] (b) a GNA, TNA, or 2′-deoxy modification at 6^{th} position from the 5′ end of the antisense strand; 2′-F modifications at 2^{nd}, 14^{th}, and 16^{th} positions from the 5′ end of the antisense strand; and 2′-OMe modifications in the remaining positions in the antisense strand, and
   [0720] (c) 3′-PS modifications at the 1^{st}, 2^{nd}, 21^{st}, and 22nd positions from 5′-end of the antisense strand.

[0721] In some embodiments, the dsRNA has Modification Pattern E-4 of:
[0722] (i) a sense strand having 21 monomers (e.g., nucleotides) in length and including:
   [0723] (a) 2′-MOE modifications at the 1^{st}, 2^{nd}, 20^{th} and 21^{st} positions from the 5′-end of the sense strand; 2′-F modifications at 7^{th}, 9^{th}, 10^{th}, and 11^{th} positions from the 5′ end of the sense strand; and 2′-OMe modifications in the remaining positions in the sense strand, and
   [0724] (b) 3′-PS modifications at the 1^{st} and 2^{nd} positions from 5′-end of the sense strand; and
[0725] (ii) an antisense strand having 23 monomers (e.g., nucleotides) in length and including:
   [0726] (a) a 5′-(E)-VP-2′-OMe modification at the 1^{st} position from 5′ end of the antisense strand,
   [0727] (b) a GNA, TNA, or 2′-deoxy modification at 7^{th} position from the 5′ end of the antisense strand; 2′-F modifications at 2^{nd}, 6^{th}, 14^{th}, and 16^{th} positions from the 5′ end of the antisense strand; and 2′-OMe modifications in the remaining positions in the antisense strand, and
   [0728] (c) 3′-PS modifications at the 1^{st}, 2^{nd}, 21^{st}, and 22nd positions from 5′-end of the antisense strand.

[0729] In certain aspects, the antisense strand of the dsRNA as described herein does not include a 5′-(E)-VP-2′-OMe modification at the 1^{st} position from 5′ end of the antisense strand.

[0730] In some embodiments, the dsRNA has Modification Pattern F of:
[0731] (i) a sense strand having 21 nucleotides in length and including:
   [0732] (a) 2′-MOE modifications at the 1^{st}, 2^{nd}, 20^{th} and 21^{st} nucleotides from the 5′-end of the sense strand; 2′-F modifications at 7^{th}, 9^{th}, 10^{th}, and 11^{th} nucleotides from the 5′ end of the sense strand; and 2′-OMe modifications in the remaining nucleotides in the sense strand, and
   [0733] (b) 3′-PS modifications at the 1^{st} and 2^{nd} nucleotides from 5′-end of the sense strand.
[0734] (ii) an antisense strand having 23 nucleotides in length and including:
   [0735] (a) 2′-F modifications at 2^{nd}, 6^{th}, 14^{th}, and 16^{th} nucleotides from the 5′ end of the antisense strand; and 2′-OMe modifications in the remaining nucleotides in the antisense strand, and
   [0736] (b) 3′-PS modifications at the 1^{st}, 2^{nd}, 21^{st}, and 22^{nd} nucleotides from 5′-end of the antisense strand.

[0737] In some embodiments, the dsRNA has Modification Pattern G-1 of:
[0738] (i) a sense strand having 21 nucleotides in length and including:
   [0739] (a) 2′-F modifications at 7^{th}, 9^{th}, 10^{th}, and 11^{th} nucleotides from the 5′ end of the sense strand; and 2′-OMe modifications in the remaining nucleotides in the sense strand, and
   [0740] (b) 3′-PS modifications at the 1^{st} and 2^{nd} nucleotides from 5′-end of the sense strand, and
[0741] (ii) an antisense strand having 23 nucleotides in length and including:
   [0742] (a) 2′-F modifications at 2^{nd}, 6^{th}, 14^{th}, and/or 16^{th} nucleotides from the 5′ end of the antisense strand; and 2′-OMe modifications in the remaining nucleotides in the antisense strand, and
   [0743] (b) 3′-PS modifications at the 1^{st}, 2^{nd}, 21^{st}, and 22^{nd} nucleotides from 5′-end of the antisense strand.

[0744] In some embodiments, the dsRNA has Modification Pattern G-2 of:
[0745] (i) a sense strand having 21 nucleotides in length and including:
   [0746] (a) 2′-F modifications at 7^{th}, 9^{th}, 10^{th}, and 11^{th} nucleotides from the 5′ end of the sense strand; and 2′-OMe modifications in the remaining nucleotides in the sense strand, and
   [0747] (b) 3′-PS modifications at the 1^{st} and 2^{nd} nucleotides from 5′-end of the sense strand, and
[0748] (ii) an antisense strand having 23 nucleotides in length and including:
   [0749] (a) 2′-F modifications at 2^{nd}, 6^{th}, 9^{th}, 14^{th}, and 16^{th} nucleotides from the 5′ end of the antisense strand; and 2′-OMe modifications in the remaining nucleotides in the antisense strand, and
   [0750] (b) 3′-PS modifications at the 1^{st}, 2^{nd}, 21^{st}, and 22^{nd} nucleotides from 5′-end of the antisense strand.

[0751] In some embodiments, the dsRNA has Modification Pattern H of:
[0752] (i) a sense strand having 21 nucleotides in length and including:
   [0753] (a) 2′-F modifications at 7^{th}, 9^{th}, 10^{th}, and 11^{th} nucleotides from the 5′ end of the sense strand; and 2′-OMe modifications in the remaining nucleotides in the sense strand, and
   [0754] (b) 3′-PS modifications at the 1^{st} and 2^{nd} nucleotides from 5′-end of the sense strand, and
[0755] (ii) an antisense strand having 23 nucleotides in length and including:
   [0756] (a) a 5′-(E)-VP-2′-OMe modification at the 1^{st} position from 5′ end of the antisense strand;
   [0757] (b) 2′-F modifications at 2^{nd}, 6^{th}, 14^{th}, and 16^{th} nucleotides from the 5′ end of the antisense strand; and 2′-OMe modifications in the remaining nucleotides in the antisense strand, and
   [0758] (c) 3′-PS modifications at the 1^{st}, 2^{nd}, 21^{st}, and 22^{nd} nucleotides from 5′-end of the antisense strand.

[0759] In some embodiments, the dsRNA has Modification Pattern I of:
[0760] (i) a sense strand having 21 nucleotides in length and including:
   [0761] (a) TNAs at the 1st, 2nd, 20th and 21st nucleotides from the 5′ end, and
   [0762] (b) 3′-PS modifications at the 1st and 2nd nucleotides from the 5′ end, and
[0763] (ii) an antisense strand having 23 nucleotides in length and including:
   [0764] (a) a 5′-(E)-VP-2′-OMe modification at the 1st position from the 5′ end, and
   [0765] (b) 3′-PS modifications at the 1st, 2nd, 21st, and 22nd nucleotides from the 5′ end.

[0766] In some embodiments, the dsRNA has Modification Pattern J of:
[0767] (i) a sense strand having 21 nucleotides in length and including:
   [0768] (a) TNAs at the 1st, 2nd, 20th and 21^{st} nucleotides from the 5′ end, and
   [0769] (b) 3′-PS modifications at the 1st, 2nd, 19th, and 20th nucleotides from the 5′ end, and
[0770] (ii) an antisense strand having 23 nucleotides in length and including:
   [0771] (a) a 5′-(E)-VP-2′-OMe modification at the 1^{st} position from the 5′ end, and
   [0772] (b) 3′-PS modifications at the 1st, 2nd, 21st, and 22nd nucleotides from the 5′ end.

[0773] In some embodiments, the dsRNA has Modification Pattern K of:
[0774] (i) a sense strand having 21 nucleotides in length and including:
   [0775] (a) TNAs at the 1st, 2nd, 20th and 21st nucleotides from the 5′ end,
   [0776] (b) 3′-PS modifications at the 1st, 2nd, 19th, and/or 20th nucleotides from the 5′ end, and
   [0777] (c) 2′-F modifications at the 7th, 9th, 10th, and 11th nucleotides from the 5′ end; and 2′-OMe modifications in the remaining nucleotides in the sense strand,
[0778] and
[0779] (ii) an antisense strand having 23 nucleotides in length and including:
   [0780] (a) a 5′-(E)-VP-2′-OMe modification at the 1^{st} position from the 5′ end,
   [0781] (b) 3′-PS modifications at the 1st, 2nd, 21st, and 22nd nucleotides from the 5′ end, and
   [0782] (c) one selected from:
      [0783] (c1) 2′-F modifications at the 2nd, 6th, 14th, and 16th nucleotides from the 5′ end; and 2′-OMe modifications in the remaining nucleotides in the antisense strand,
      [0784] (c2) 2′-F modifications at the 2nd, 6th, 14th, and 16th nucleotides from the 5′ end; TNA at the 3rd nucleotide from the 5′ end; and 2′-OMe modifications in the remaining nucleotides in the antisense strand,
      [0785] (c3) 2′-F modifications at the 2nd, 6th, 14th, and 16th nucleotides from the 5′ end; TNA, GNA or 2′-deoxy modification at the 5th nucleotide from the 5′ end; and 2′-OMe modifications in the remaining nucleotides in the antisense strand,
      [0786] (c4) 2′-F modifications at the 2nd, 14th, and 16th nucleotides from the 5′ end; TNA, GNA or 2′-deoxy modification at the 6th nucleotide from the 5′ end; and 2′-OMe modifications in the remaining nucleotides in the antisense strand, and
      [0787] (c5) 2′-F modifications at the 2nd, 6th, 14th, and 16th nucleotides from the 5′ end; TNA, GNA or 2′-deoxy modification at the 7th nucleotide from the 5′ end; and 2′-OMe modifications in the remaining nucleotides in the antisense strand.

[0788] In certain aspects, modified sequences of sense strands and antisense strands targeting the above indicated HMGCR mRNA (SEQ ID NO: 811, or GenBank: NM_000859.3) are in Table 3.

TABLE 3

| siRNA | | | SEQ ID |
|---|---|---|---|
| No. | Sequence (5′-3′) | Strand | NO. |
| 647 | T005p001G005p001U004pU004pG004pU004pC007pA004pA007 | SS | 1294 |
| | pG007pA007pC004pU004pU004pU004pU004pU004pC004pG004 | | |
| | pA005pA005 | | |
| | X033U1027p001U007p001C004pG004pA004pA007pA004pA004 | AS | 1298 |
| | pA004pG004pU004pC004pU004pU007pG004pA007pC004pA004 | | |
| | pA004pC004pA004p001U004p001U004 | | |
| 648 | T005p001T005p001G004pC004pA004pG004pA007pU004pG007 | SS | 1295 |
| | pC007pU007pA004pG004pG004pU004pG004pU004pU004pC004 | | |
| | pA005pA005 | | |
| | X033U1027p001U007p001G004pA004pA004pC007pA004pC004 | AS | 1299 |
| | pC004pU004pA004pG004pC004pA007pU004pC007pU004pG004 | | |
| | pC004pA004pA004p001A004p001C004 | | |
| 649 | T005p001C005*p001A004pA004pG004pA004pC007pU004pU00 | SS | 1296 |
| | 7pU007pU007pU004pC004pG004pA004pA004pU004pG004pC00 | | |
| | 4pA005pA005 | | |
| | X033U1027p001U007p001G004pC004pA1016pU004pU004pC00 | AS | 1300 |
| | 4pG004pA004pA004pA004pA004pA007pG004pU007pC004pU00 | | |
| | 4pU004pG004pA004p001C004p001A004 | | |
| 650 | T005p001T005p001G004pC004pA004pG004pA007pU004pG007 | SS | 1297 |
| | pC007pU007pA004pG004pG004pU004pG004pU004pU004pC004 | | |
| | pA005pT005 | | |
| | A004p001U007p001G004pA004pA004pC007pA004pC004pC004 | AS | 1301 |
| | pU004pA004pG004pC004pA007pU004pC007pU004pG004pC004 | | |
| | pA004pA004p001A004p001C004 | | |
| 709 | G005p001A005p001U004pU004pC004pU004pG007pU004pA007 | SS | 1448 |
| | pG007pC007pU004pA004pC004pA004pA004pU004pG004pU004 | | |
| | pT005pA005 | | |
| | X033U1027p001A007p001A004pC004pA004pU007pU004pG004 | AS | 1463 |
| | pU004pA004pG004pC004pU004pA007pC004pA007pG004pA004 | | |
| | pA004pU004pC004p001C004p001U004 | | |
| 710 | A005p001T005p001U004pC004pU004pG004pU007pA004pG007 | SS | 1449 |
| | pC007pU007pA004pC004pA004pA004pU004pG004pU004pU004 | | |
| | pG005pT005 | | |
| | X033A1027p001C007p001A004pA004pC004pA007pU004pU004 | AS | 1464 |
| | pG004pU004pA004pG004pC004pU007pA004pC007pA004pG004 | | |
| | pA004pA004pU004p001C004p001C004 | | |
| 711 | T005p001G005p001U004pA004pG004pC004pU007pA004pC007 | SS | 1450 |
| | pA007pA007pU004pG004pU004pU004pG004pU004pC004pA004 | | |
| | pA005pA005 | | |
| | X033U1027p001U007p001U004pG004pA004pC007pA004pA004 | AS | 1465 |
| | pC004pA004pU004pU004pG004pU007pA004pG007pC004pU004 | | |
| | pA004pC004pA004p001G004p001A004 | | |
| 712 | T005p001G005p001U004pA004pG004pC004pU007pA004pC007 | SS | 1451 |
| | pA007pA007pU004pG004pU004pU004pG004pU004pC004pA004 | | |
| | p001A005p001A005 | | |
| | X033U1027p001U007p001U004pG004pA004pC007pA004pA004 | AS | 1466 |
| | pC004pA004pU004pU004pG004pU007pA004pG007pC004pU004 | | |
| | pA004pC004pA004p001G004p001A004 | | |
| 713 | T005p001G005p001U004pU004pG004pU004pC007pA004pA007 | SS | 1452 |
| | pG007pA007pC004pU004pU004pU004pU004pU004pC004pG004 | | |
| | p001A005p001A005 | | |
| | X033U1027p001U007p001C004pG004pA004pA007pA004pA004 | AS | 1467 |
| | pA004pG004pU004pC004pU004pU007pG004pA007pC004pA004 | | |
| | pA004pC004pA004p001U004p001U004 | | |
| 714 | A005p001C005*p001A004pU004pA004pA004pA007pA004pU00 | SS | 1453 |
| | 7pC007pU007pG004pU004pG004pA004pA004pU004pU004pA00 | | |
| | 4pA005pA005 | | |
| | X033U1027p001U007p001U004pA004pA004pU007pU004pC004 | AS | 1468 |
| | pA004pC004pA004pG004pA004pU007pU004pU007pU004pA004 | | |
| | pU004pG004pU004p001U004p001A004 | | |
| 715 | A005p001C005*p001A004pU004pA004pA004pA007pA004pU00 | SS | 1454 |
| | 7pC007pU007pG004pU004pG004pA004pA004pU004pU004pA00 | | |
| | 4p001A005p001A005 | | |
| | X033U1027p001U007p001U004pA004pA004pU007pU004pC004 | AS | 1469 |
| | pA004pC004pA004pG004pA004pU007pU004pU007pU004pA004 | | |
| | pU004pG004pU004p001U004p001A004 | | |
| 716 | A005p001A005p001G004pG004pA004pC004pU007pA004pA007 | SS | 1455 |
| | pC007pA007pU004pA004pA004pA004pA004pU004pC004pU004 | | |
| | pG005pT005 | | |
| | X033A1027p001C007p001A004pG004pA004pU007pU004pU004 | AS | 1470 |
| | pU004pA004pU004pG004pU004pU007pA004pG007pU004pC004 | | |
| | pC004pU004pU004p001U004p001A004 | | |
| 717 | A005p001A005p001G004pG004pA004pC004pU007pA004pA007 | SS | 1456 |
| | pC007pA007pU004pA004pA004pA004pA004pU004pC004pU004 | | |
| | p001G005p001T005 | | |
| | X033A1027p001C007p001A004pG004pA004pU007pU004pU004 | AS | 1471 |
| | pU004pA004pU004pG004pU004pU007pA004pG007pU004pC004 | | |
| | pC004pU004pU004p001U004p001A004 | | |
| 718 | T005p001A005p001A004pG004pU004pU004pC007pA004pU007 | SS | 1457 |
| | pG007pU007pU004pU004pG004pU004pA004pA004pA004pU004 | | |
| | pT005pA005 | | |
| | X033U1027p001A007p001A004pU004pU004pU007pA004pC004 | AS | 1472 |
| | pA004pA004pA004pC004pA004pU007pG004pA007pA004pC004 | | |
| | pU004pU004pA004p001G004p001A004 | | |
| 720 | T005p001A005p001A004pG004pU004pU004pC007pA004pU007 | SS | 1458 |
| | pG007pU007pU004pU004pG004pU004pA004pA004pA004pU004 | | |
| | p001T005p001A005 | | |
| | X033U1027p001A007p001A004pU004pU004pU007pA004pC004 | AS | 1473 |
| | pA004pA004pA004pC004pA004pU007pG004pA007pA004pC004 | | |
| | pU004pU004pA004p001G004p001A004 | | |
| 721 | T005p001T005p001A004pA004pA004pC004pA007pU004pG007 | SS | 1459 |
| | pC007pU007pA004pA004pA004pU004pA004pG004pU004pU004 | | |
| | pC005*pT005 | | |
| | X033A1027p001G007p001A004pA004pC004pU007pA004pU004 | AS | 1474 |
| | pU004pU004pA004pG004pC004pA007pU004pG007pU004pU004 | | |
| | pU004pA004pA004p001C004p001A004 | | |
| 722 | T005p001T005p001A004pA004pA004pC004pA007pU004pG007 | SS | 1460 |
| | pC007pU007pA004pA004pA004pU004pA004pG004pU004pU004 | | |
| | p001C005*p001T005 | | |
| | X033A1027p001G007p001A004pA004pC004pU007pA004pU004 | AS | 1475 |
| | pU004pU004pA004pG004pC004pA007pU004pG007pU004pU004 | | |
| | pU004pA004pA004p001C004p001A004 | | |
| 723 | T005p001T005p001G004pC004pA004pG004pA007pU004pG007 | SS | 1461 |
| | pC007pU007pA004pG004pG004pU004pG004pU004pU004pC004 | | |
| | pA005pA005 | | |
| | X033U1027p001U007p001G004pA004pA004pC007pA004pC004 | AS | 1476 |
| | pC004pU004pA004pG004pC004pA007pU004pC007pU004pG004 | | |
| | pC004pA004pA004p001A004p001C004 | | |
| 724 | T005p001T005p001G004pC004pA004pG004pA007pU004pG007 | SS | 1462 |
| | pC007pU007pA004pG004pG004pU004pG004pU004pU004pC004 | | |
| | p001A005p001A005 | | |
| | X033U1027p001U007p001G004pA004pA004pC007pA004pC004 | AS | 1477 |
| | pC004pU004pA004pG004pC004pA007pU004pC007pU004pG004 | | |
| | pC004pA004pA004p001A004p001C004 | | |
| 725 | U042p001U042p001G004pC004pA004pG004pA007pU004pG007 | SS | 1481 |
| | pC007pU007pA004pG004pG004pU004pG004pU004pU004pC004 | | |
| | pA042pA042 | | |
| | X033U1027p001U007p001G004pA004pA004pC007pA004pC004 | AS | 1299 |
| | pC004pU004pA004pG004pC004pA007pU004pC007pU004pG004 | | |
| | pC004pA004pA004p001A004p001C004 | | |
| 726 | U042p001U042p001G004pC004pA004pG004pA007pU004pG007 | SS | 1482 |
| | pC007pU007pA004pG004pG004pU004pG004pU004pU004pC004 | | |
| | pA042p001A042 | | |
| | X033U1027p001U007p001G004pA004pA004pC007pA004pC004 | AS | 1299 |
| | pC004pU004pA004pG004pC004pA007pU004pC007pU004pG004 | | |
| | pC004pA004pA004p001A004p001C004 | | |
| 727 | T005p001G005p001U004pA004pG004pC004pU007pA004pC007 | SS | 1451 |
| | pA007pA007pU004pG004pU004pU004pG004pU004pC004pA004 | | |
| | p001A005p001A005 | | |
| | X033U1027p001U007p001U042pG004pA004pC007pA004pA004 | AS | 2600 |
| | pC004pA004pU004pU004pG004pU007pA004pG007pC004pU004 | | |
| | pA004pC004pA004p001G004p001A004 | | |
| 728 | A005p001A005p001G004pG004pA004pC004pU007pA004pA007 | SS | 1456 |
| | pC007pA007pU004pA004pA004pA004pA004pU004pC004pU004 | | |
| | p001G005p001T005 | | |
| | X033A1027p001C007p001A042pG004pA004pU007pU004pU004 | AS | 2601 |
| | pU004pA004pU004pG004pU004pU007pA004pG007pU004pC004 | | |
| | pC004pU004pU004p001U004p001A004 | | |
| 729 | T005p001G005p001U004pU004pG004pU004pC007pA004pA007 | SS | 1452 |
| | pG007pA007pC004pU004pU004pU004pU004pU004pC004pG004 | | |
| | p001A005p001A005 | | |
| | X033U1027p001U007p001C042pG004pA004pA007pA004pA004 | AS | 2602 |
| | pA004pG004pU004pC004pU004pU007pG004pA007pC004pA004 | | |
| | pA004pC004pA004p001U004p001U004 | | |
| 730 | A005p001C005*p001A004pU004pA004pA004pA007pA004pU00 | SS | 1454 |
| | 7pC007pU007pG004pU004pG004pA004pA004pU004pU004pA00 | | |
| | 4p001A005p001A005 | | |
| | X033U1027p001U007p001U042pA004pA004pU007pU004pC004 | AS | 2603 |
| | pA004pC004pA004pG004pA004pU007pU004pU007pU004pA004 | | |
| | pU004pG004pU004p001U004p001A004 | | |
| 731 | T005p001A005p001A004pG004pU004pU004pC007pA004pU007 | SS | 1458 |
| | pG007pU007pU004pU004pG004pU004pA004pA004pA004pU004 | | |
| | p001T005p001A005 | | |
| | X033U1027p001A007p001A042pU004pU004pU007pA004pC004 | AS | 2604 |
| | pA004pA004pA004pC004pA004pU007pG004pA007pA004pC004 | | |
| | pU004pU004pA004p001G004p001A004 | | |
| 732 | T005p001T005p001A004pA004pA004pC004pA007pU004pG007 | SS | 1460 |
| | pC007pU007pA004pA004pA004pU004pA004pG004pU004pU004 | | |
| | p001C005*p001T005 | | |
| | X033A1027p001G007p001A042pA004pC004pU007pA004pU004 | AS | 2605 |
| | pU004pU004pA004pG004pC004pA007pU004pG007pU004pU004 | | |
| | pU004pA004pA004p001C004p001A004 | | |

[0789] In Table 3, the nucleotide indicated with “T” is referred to a ribonucleotide having thymidine nucleobase (“ribothymidine”) and “U” is referred to a ribonucleotide having uracil nucleobase (“uridine”). In some embodiments, “T” ribonucleotide (ribothymidine) above may be interchangeably use as “methylated uridine,” “5-methyluridine” or “mU.”

[0790] In some embodiments, the sequence in Table 3 may include modified nucleobases. In some embodiments, the sense strand may include one or more nucleotides containing thymine or methylated uracil nucleobase. In some embodiments, the first nucleotide at 5′ end of the sense strand contains the thymine or methylated uracil. In some embodiments, the first nucleotide at 5′ end of the sense strand contains the thymine or methylated uracil. In some embodiments, the sense strand may include one or more nucleotides containing methylate cytosine nucleobase (e.g., 5-methylcytosine or N4-methylcytosine). Example sequences containing modified nucleobases are described in Table 3 above (e.g., C005*: 5-methyl-cytidine/2′ MOE).

[0791] In some embodiments, the terminal T at 5′ end of the sense strand in the sequences (SEQ ID Nos: 1294 to 1297, 1448 to 1462, and 1481 to 1482 in Table 3) may not be a part of the HMGCR target mRNA sequence. In some embodiments, the terminal U (uridine with 5′(E)-VP-2′-OMe) at 5′ end of the antisense strand in the sequences (SEQ ID Nos: 1298 to 1301, 1463 to 1477, and 2600 to 2605 in Table 3) may not be a part of the complementary sequence to the HMGCR mRNA target region.

[0792] In some embodiments, the dsRNA includes (i) a sense strand having 15 contiguous nucleotides differing by no more than one, two or three nucleotides from the nucleotide sequence selected from SEQ ID NO: 1294 and (ii) an antisense strand forming a duplex with the sense strand of (i) and having 15 contiguous nucleotides differing by no more than one, two or three nucleotides from the nucleotide sequence selected from SEQ ID NO: 1298. In some embodiments, the dsRNA includes (i) a sense strand having 16 contiguous nucleotides differing by no more than one, two or three from the nucleotide sequence selected from SEQ ID NO: 1294 and (ii) an antisense strand forming a duplex with the sense strand of (i) and having 16 contiguous nucleotides differing by no more than one, two or three nucleotides from the nucleotide sequence selected from SEQ ID NO: 1298. In some embodiments, the dsRNA includes (i) a sense strand having 17 contiguous nucleotides differing by no more than one, two or three nucleotides from the nucleotide sequence selected from SEQ ID NO: 1294 and (ii) an antisense strand forming a duplex with the sense strand of (i) and having 17 contiguous nucleotides differing by no more than one, two or three nucleotides from the nucleotide sequence selected from SEQ ID NO: 1298. In some embodiments, the dsRNA includes (i) a sense strand having 18 contiguous nucleotides differing by no more than one, two or three nucleotides from the nucleotide sequence selected from SEQ ID NO: 1294 and (ii) an antisense strand forming a duplex with the sense strand of (i) and having 18 contiguous nucleotides differing by no more than one, two or three nucleotides from the nucleotide sequence selected from SEQ ID NO: 1298. In some embodiments, the dsRNA includes (i) a sense strand having 19 contiguous nucleotides differing by no more than one, two or three nucleotides from the nucleotide sequence selected from SEQ ID NO: 1294 and (ii) an antisense strand forming a duplex with the sense strand of (i) and having 19 contiguous nucleotides differing by no more than one, two or three nucleotides from the nucleotide sequence selected from SEQ ID NO: 1298. In some embodiments, the dsRNA includes (i) a sense strand having 20 contiguous nucleotides differing by no more than one, two or three nucleotides from the nucleotide sequence selected from SEQ ID NO: 1294 and (ii) an antisense strand forming a duplex with the sense strand of (i) and having 20 contiguous nucleotides differing by no more than one, two or three nucleotides from the nucleotide sequence selected from SEQ ID NO: 1298. In some embodiments, the dsRNA includes (i) a sense strand having 21 contiguous nucleotides differing by no more than one, two or three nucleotides from the nucleotide sequence selected from SEQ ID NO: 1294 and (ii) an antisense strand forming a duplex with the sense strand of (i) and having 21 contiguous nucleotides differing by no more than one, two or three nucleotides from the nucleotide sequence selected from SEQ ID NO: 1298.

[0793] In some embodiments, the dsRNA includes (i) a sense strand having 15 contiguous nucleotides differing by no more than one, two or three nucleotides from the nucleotide sequence selected from SEQ ID NO: 1295 and (ii) an antisense strand forming a duplex with the sense strand of (i) and having 15 contiguous nucleotides differing by no more than one, two or three nucleotides from the nucleotide sequence selected from SEQ ID NO: 1299. In some embodiments, the dsRNA includes (i) a sense strand having 16 contiguous nucleotides differing by no more than one, two or three from the nucleotide sequence selected from SEQ ID NO: 1295 and (ii) an antisense strand forming a duplex with the sense strand of (i) and having 16 contiguous nucleotides differing by no more than one, two or three nucleotides from the nucleotide sequence selected from SEQ ID NO: 1299. In some embodiments, the dsRNA includes (i) a sense strand having 17 contiguous nucleotides differing by no more than one, two or three nucleotides from the nucleotide sequence selected from SEQ ID NO: 1295 and (ii) an antisense strand forming a duplex with the sense strand of (i) and having 17 contiguous nucleotides differing by no more than one, two or three nucleotides from the nucleotide sequence selected from SEQ ID NO: 1299. In some embodiments, the dsRNA includes (i) a sense strand having 18 contiguous nucleotides differing by no more than one, two or three nucleotides from the nucleotide sequence selected from SEQ ID NO: 1295 and (ii) an antisense strand forming a duplex with the sense strand of (i) and having 18 contiguous nucleotides differing by no more than one, two or three nucleotides from the nucleotide sequence selected from SEQ ID NO: 1299. In some embodiments, the dsRNA includes (i) a sense strand having 19 contiguous nucleotides differing by no more than one, two or three nucleotides from the nucleotide sequence selected from SEQ ID NO: 1295 and (ii) an antisense strand forming a duplex with the sense strand of (i) and having 19 contiguous nucleotides differing by no more than one, two or three nucleotides from the nucleotide sequence selected from SEQ ID NO: 1299. In some embodiments, the dsRNA includes (i) a sense strand having 20 contiguous nucleotides differing by no more than one, two or three nucleotides from the nucleotide sequence selected from SEQ ID NO: 1295 and (ii) an antisense strand forming a duplex with the sense strand of (i) and having 20 contiguous nucleotides differing by no more than one, two or three nucleotides from the nucleotide sequence selected from SEQ ID NO: 1299. In some embodiments, the dsRNA includes (i) a sense strand having 21 contiguous nucleotides differing by no more than one, two or three nucleotides from the nucleotide sequence selected from SEQ ID NO: 1295 and (ii) an antisense strand forming a duplex with the sense strand of (i) and having 21 contiguous nucleotides differing by no more than one, two or three nucleotides from the nucleotide sequence selected from SEQ ID NO: 1299.

[0794] In some embodiments, the dsRNA includes (i) a sense strand having 15 contiguous nucleotides differing by no more than one, two or three nucleotides from the nucleotide sequence selected from SEQ ID NO: 1296 and (ii) an antisense strand forming a duplex with the sense strand of (i) and having 15 contiguous nucleotides differing by no more than one, two or three nucleotides from the nucleotide sequence selected from SEQ ID NO: 1300. In some embodiments, the dsRNA includes (i) a sense strand having 16 contiguous nucleotides differing by no more than one, two or three from the nucleotide sequence selected from SEQ ID NO: 1296 and (ii) an antisense strand forming a duplex with the sense strand of (i) and having 16 contiguous nucleotides differing by no more than one, two or three nucleotides from the nucleotide sequence selected from SEQ ID NO: 1300. In some embodiments, the dsRNA includes (i) a sense strand having 17 contiguous nucleotides differing by no more than one, two or three nucleotides from the nucleotide sequence selected from SEQ ID NO: 1296 and (ii) an antisense strand forming a duplex with the sense strand of (i) and having 17 contiguous nucleotides differing by no more than one, two or three nucleotides from the nucleotide sequence selected from SEQ ID NO: 1300. In some embodiments, the dsRNA includes (i) a sense strand having 18 contiguous nucleotides differing by no more than one, two or three nucleotides from the nucleotide sequence selected from SEQ ID NO: 1296 and (ii) an antisense strand forming a duplex with the sense strand of (i) and having 18 contiguous nucleotides differing by no more than one, two or three nucleotides from the nucleotide sequence selected from SEQ ID NO: 1300. In some embodiments, the dsRNA includes (i) a sense strand having 19 contiguous nucleotides differing by no more than one, two or three nucleotides from the nucleotide sequence selected from SEQ ID NO: 1296 and (ii) an antisense strand forming a duplex with the sense strand of (i) and having 19 contiguous nucleotides differing by no more than one, two or three nucleotides from the nucleotide sequence selected from SEQ ID NO: 1300. In some embodiments, the dsRNA includes (i) a sense strand having 20 contiguous nucleotides differing by no more than one, two or three nucleotides from the nucleotide sequence selected from SEQ ID NO: 1296 and (ii) an antisense strand forming a duplex with the sense strand of (i) and having 20 contiguous nucleotides differing by no more than one, two or three nucleotides from the nucleotide sequence selected from SEQ ID NO: 1300. In some embodiments, the dsRNA includes (i) a sense strand having 21 contiguous nucleotides differing by no more than one, two or three nucleotides from the nucleotide sequence selected from SEQ ID NO: 1296 and (ii) an antisense strand forming a duplex with the sense strand of (i) and having 21 contiguous nucleotides differing by no more than one, two or three nucleotides from the nucleotide sequence selected from SEQ ID NO: 1300.

[0795] In some embodiments, the dsRNA includes (i) a sense strand having 15 contiguous nucleotides differing by no more than one, two or three nucleotides from the nucleotide sequence selected from SEQ ID NO: 1297 and (ii) an antisense strand forming a duplex with the sense strand of (i) and having 15 contiguous nucleotides differing by no more than one, two or three nucleotides from the nucleotide sequence selected from SEQ ID NO: 1301. In some embodiments, the dsRNA includes (i) a sense strand having 16 contiguous nucleotides differing by no more than one, two or three from the nucleotide sequence selected from SEQ ID NO: 1297 and (ii) an antisense strand forming a duplex with the sense strand of (i) and having 16 contiguous nucleotides differing by no more than one, two or three nucleotides from the nucleotide sequence selected from SEQ ID NO: 1301. In some embodiments, the dsRNA includes (i) a sense strand having 17 contiguous nucleotides differing by no more than one, two or three nucleotides from the nucleotide sequence selected from SEQ ID NO: 1297 and (ii) an antisense strand forming a duplex with the sense strand of (i) and having 17 contiguous nucleotides differing by no more than one, two or three nucleotides from the nucleotide sequence selected from SEQ ID NO: 1301. In some embodiments, the dsRNA includes (i) a sense strand having 18 contiguous nucleotides differing by no more than one, two or three nucleotides from the nucleotide sequence selected from SEQ ID NO: 1297 and (ii) an antisense strand forming a duplex with the sense strand of (i) and having 18 contiguous nucleotides differing by no more than one, two or three nucleotides from the nucleotide sequence selected from SEQ ID NO: 1301. In some embodiments, the dsRNA includes (i) a sense strand having 19 contiguous nucleotides differing by no more than one, two or three nucleotides from the nucleotide sequence selected from SEQ ID NO: 1297 and (ii) an antisense strand forming a duplex with the sense strand of (i) and having 19 contiguous nucleotides differing by no more than one, two or three nucleotides from the nucleotide sequence selected from SEQ ID NO: 1301. In some embodiments, the dsRNA includes (i) a sense strand having 20 contiguous nucleotides differing by no more than one, two or three nucleotides from the nucleotide sequence selected from SEQ ID NO: 1297 and (ii) an antisense strand forming a duplex with the sense strand of (i) and having 20 contiguous nucleotides differing by no more than one, two or three nucleotides from the nucleotide sequence selected from SEQ ID NO: 1301. In some embodiments, the dsRNA includes (i) a sense strand having 21 contiguous nucleotides differing by no more than one, two or three nucleotides from the nucleotide sequence selected from SEQ ID NO: 1297 and (ii) an antisense strand forming a duplex with the sense strand of (i) and having 21 contiguous nucleotides differing by no more than one, two or three nucleotides from the nucleotide sequence selected from SEQ ID NO: 1301.

[0796] In some embodiments, the dsRNA includes (i) a sense strand having 15 contiguous nucleotides differing by no more than one, two or three nucleotides from the nucleotide sequence selected from SEQ ID NO: 1448 and (ii) an antisense strand forming a duplex with the sense strand of (i) and having 15 contiguous nucleotides differing by no more than one, two or three nucleotides from the nucleotide sequence selected from SEQ ID NO: 1463. In some embodiments, the dsRNA includes (i) a sense strand having 16 contiguous nucleotides differing by no more than one, two or three from the nucleotide sequence selected from SEQ ID NO: 1448 and (ii) an antisense strand forming a duplex with the sense strand of (i) and having 16 contiguous nucleotides differing by no more than one, two or three nucleotides from the nucleotide sequence selected from SEQ ID NO: 1463. In some embodiments, the dsRNA includes (i) a sense strand having 17 contiguous nucleotides differing by no more than one, two or three nucleotides from the nucleotide sequence selected from SEQ ID NO: 1448 and (ii) an antisense strand forming a duplex with the sense strand of (i) and having 17 contiguous nucleotides differing by no more than one, two or three nucleotides from the nucleotide sequence selected from SEQ ID NO: 1463. In some embodiments, the dsRNA includes (i) a sense strand having 18 contiguous nucleotides differing by no more than one, two or three nucleotides from the nucleotide sequence selected from SEQ ID NO: 1448 and (ii) an antisense strand forming a duplex with the sense strand of (i) and having 18 contiguous nucleotides differing by no more than one, two or three nucleotides from the nucleotide sequence selected from SEQ ID NO: 1463. In some embodiments, the dsRNA includes (i) a sense strand having 19 contiguous nucleotides differing by no more than one, two or three nucleotides from the nucleotide sequence selected from SEQ ID NO: 1448 and (ii) an antisense strand forming a duplex with the sense strand of (i) and having 19 contiguous nucleotides differing by no more than one, two or three nucleotides from the nucleotide sequence selected from SEQ ID NO: 1463. In some embodiments, the dsRNA includes (i) a sense strand having 20 contiguous nucleotides differing by no more than one, two or three nucleotides from the nucleotide sequence selected from SEQ ID NO: 1448 and (ii) an antisense strand forming a duplex with the sense strand of (i) and having 20 contiguous nucleotides differing by no more than one, two or three nucleotides from the nucleotide sequence selected from SEQ ID NO: 1463. In some embodiments, the dsRNA includes (i) a sense strand having 21 contiguous nucleotides differing by no more than one, two or three nucleotides from the nucleotide sequence selected from SEQ ID NO: 1448 and (ii) an antisense strand forming a duplex with the sense strand of (i) and having 21 contiguous nucleotides differing by no more than one, two or three nucleotides from the nucleotide sequence selected from SEQ ID NO: 1463.

[0797] In some embodiments, the dsRNA includes (i) a sense strand having 15 contiguous nucleotides differing by no more than one, two or three nucleotides from the nucleotide sequence selected from SEQ ID NO: 1449 and (ii) an antisense strand forming a duplex with the sense strand of (i) and having 15 contiguous nucleotides differing by no more than one, two or three nucleotides from the nucleotide sequence selected from SEQ ID NO: 1464. In some embodiments, the dsRNA includes (i) a sense strand having 16 contiguous nucleotides differing by no more than one, two or three from the nucleotide sequence selected from SEQ ID NO: 1449 and (ii) an antisense strand forming a duplex with the sense strand of (i) and having 16 contiguous nucleotides differing by no more than one, two or three nucleotides from the nucleotide sequence selected from SEQ ID NO: 1464. In some embodiments, the dsRNA includes (i) a sense strand having 17 contiguous nucleotides differing by no more than one, two or three nucleotides from the nucleotide sequence selected from SEQ ID NO: 1449 and (ii) an antisense strand forming a duplex with the sense strand of (i) and having 17 contiguous nucleotides differing by no more than one, two or three nucleotides from the nucleotide sequence selected from SEQ ID NO: 1464. In some embodiments, the dsRNA includes (i) a sense strand having 18 contiguous nucleotides differing by no more than one, two or three nucleotides from the nucleotide sequence selected from SEQ ID NO: 1449 and (ii) an antisense strand forming a duplex with the sense strand of (i) and having 18 contiguous nucleotides differing by no more than one, two or three nucleotides from the nucleotide sequence selected from SEQ ID NO: 1464. In some embodiments, the dsRNA includes (i) a sense strand having 19 contiguous nucleotides differing by no more than one, two or three nucleotides from the nucleotide sequence selected from SEQ ID NO: 1449 and (ii) an antisense strand forming a duplex with the sense strand of (i) and having 19 contiguous nucleotides differing by no more than one, two or three nucleotides from the nucleotide sequence selected from SEQ ID NO: 1464. In some embodiments, the dsRNA includes (i) a sense strand having 20 contiguous nucleotides differing by no more than one, two or three nucleotides from the nucleotide sequence selected from SEQ ID NO: 1449 and (ii) an antisense strand forming a duplex with the sense strand of (i) and having 20 contiguous nucleotides differing by no more than one, two or three nucleotides from the nucleotide sequence selected from SEQ ID NO: 1464. In some embodiments, the dsRNA includes (i) a sense strand having 21 contiguous nucleotides differing by no more than one, two or three nucleotides from the nucleotide sequence selected from SEQ ID NO: 1449 and (ii) an antisense strand forming a duplex with the sense strand of (i) and having 21 contiguous nucleotides differing by no more than one, two or three nucleotides from the nucleotide sequence selected from SEQ ID NO: 1464.

[0798] In some embodiments, the dsRNA includes (i) a sense strand having 15 contiguous nucleotides differing by no more than one, two or three nucleotides from the nucleotide sequence selected from SEQ ID NO: 1450 and (ii) an antisense strand forming a duplex with the sense strand of (i) and having 15 contiguous nucleotides differing by no more than one, two or three nucleotides from the nucleotide sequence selected from SEQ ID NO: 1465. In some embodiments, the dsRNA includes (i) a sense strand having 16 contiguous nucleotides differing by no more than one, two or three from the nucleotide sequence selected from SEQ ID NO: 1450 and (ii) an antisense strand forming a duplex with the sense strand of (i) and having 16 contiguous nucleotides differing by no more than one, two or three nucleotides from the nucleotide sequence selected from SEQ ID NO: 1465. In some embodiments, the dsRNA includes (i) a sense strand having 17 contiguous nucleotides differing by no more than one, two or three nucleotides from the nucleotide sequence selected from SEQ ID NO: 1450 and (ii) an antisense strand forming a duplex with the sense strand of (i) and having 17 contiguous nucleotides differing by no more than one, two or three nucleotides from the nucleotide sequence selected from SEQ ID NO: 1465. In some embodiments, the dsRNA includes (i) a sense strand having 18 contiguous nucleotides differing by no more than one, two or three nucleotides from the nucleotide sequence selected from SEQ ID NO: 1450 and (ii) an antisense strand forming a duplex with the sense strand of (i) and having 18 contiguous nucleotides differing by no more than one, two or three nucleotides from the nucleotide sequence selected from SEQ ID NO: 1465. In some embodiments, the dsRNA includes (i) a sense strand having 19 contiguous nucleotides differing by no more than one, two or three nucleotides from the nucleotide sequence selected from SEQ ID NO: 1450 and (ii) an antisense strand forming a duplex with the sense strand of (i) and having 19 contiguous nucleotides differing by no more than one, two or three nucleotides from the nucleotide sequence selected from SEQ ID NO: 1465. In some embodiments, the dsRNA includes (i) a sense strand having 20 contiguous nucleotides differing by no more than one, two or three nucleotides from the nucleotide sequence selected from SEQ ID NO: 1450 and (ii) an antisense strand forming a duplex with the sense strand of (i) and having 20 contiguous nucleotides differing by no more than one, two or three nucleotides from the nucleotide sequence selected from SEQ ID NO: 1465. In some embodiments, the dsRNA includes (i) a sense strand having 21 contiguous nucleotides differing by no more than one, two or three nucleotides from the nucleotide sequence selected from SEQ ID NO: 1450 and (ii) an antisense strand forming a duplex with the sense strand of (i) and having 21 contiguous nucleotides differing by no more than one, two or three nucleotides from the nucleotide sequence selected from SEQ ID NO: 1465.

[0799] In some embodiments, the dsRNA includes (i) a sense strand having 15 contiguous nucleotides differing by no more than one, two or three nucleotides from the nucleotide sequence selected from SEQ ID NO: 1451 and (ii) an antisense strand forming a duplex with the sense strand of (i) and having 15 contiguous nucleotides differing by no more than one, two or three nucleotides from the nucleotide sequence selected from SEQ ID NO: 1466. In some embodiments, the dsRNA includes (i) a sense strand having 16 contiguous nucleotides differing by no more than one, two or three from the nucleotide sequence selected from SEQ ID NO: 1451 and (ii) an antisense strand forming a duplex with the sense strand of (i) and having 16 contiguous nucleotides differing by no more than one, two or three nucleotides from the nucleotide sequence selected from SEQ ID NO: 1466. In some embodiments, the dsRNA includes (i) a sense strand having 17 contiguous nucleotides differing by no more than one, two or three nucleotides from the nucleotide sequence selected from SEQ ID NO: 1451 and (ii) an antisense strand forming a duplex with the sense strand of (i) and having 17 contiguous nucleotides differing by no more than one, two or three nucleotides from the nucleotide sequence selected from SEQ ID NO: 1466. In some embodiments, the dsRNA includes (i) a sense strand having 18 contiguous nucleotides differing by no more than one, two or three nucleotides from the nucleotide sequence selected from SEQ ID NO: 1451 and (ii) an antisense strand forming a duplex with the sense strand of (i) and having 18 contiguous nucleotides differing by no more than one, two or three nucleotides from the nucleotide sequence selected from SEQ ID NO: 1466. In some embodiments, the dsRNA includes (i) a sense strand having 19 contiguous nucleotides differing by no more than one, two or three nucleotides from the nucleotide sequence selected from SEQ ID NO: 1451 and (ii) an antisense strand forming a duplex with the sense strand of (i) and having 19 contiguous nucleotides differing by no more than one, two or three nucleotides from the nucleotide sequence selected from SEQ ID NO: 1466. In some embodiments, the dsRNA includes (i) a sense strand having 20 contiguous nucleotides differing by no more than one, two or three nucleotides from the nucleotide sequence selected from SEQ ID NO: 1451 and (ii) an antisense strand forming a duplex with the sense strand of (i) and having 20 contiguous nucleotides differing by no more than one, two or three nucleotides from the nucleotide sequence selected from SEQ ID NO: 1466. In some embodiments, the dsRNA includes (i) a sense strand having 21 contiguous nucleotides differing by no more than one, two or three nucleotides from the nucleotide sequence selected from SEQ ID NO: 1451 and (ii) an antisense strand forming a duplex with the sense strand of (i) and having 21 contiguous nucleotides differing by no more than one, two or three nucleotides from the nucleotide sequence selected from SEQ ID NO: 1466.

[0800] In some embodiments, the dsRNA includes (i) a sense strand having 15 contiguous nucleotides differing by no more than one, two or three nucleotides from the nucleotide sequence selected from SEQ ID NO: 1452 and (ii) an antisense strand forming a duplex with the sense strand of (i) and having 15 contiguous nucleotides differing by no more than one, two or three nucleotides from the nucleotide sequence selected from SEQ ID NO: 1467. In some embodiments, the dsRNA includes (i) a sense strand having 16 contiguous nucleotides differing by no more than one, two or three from the nucleotide sequence selected from SEQ ID NO: 1452 and (ii) an antisense strand forming a duplex with the sense strand of (i) and having 16 contiguous nucleotides differing by no more than one, two or three nucleotides from the nucleotide sequence selected from SEQ ID NO: 1467. In some embodiments, the dsRNA includes (i) a sense strand having 17 contiguous nucleotides differing by no more than one, two or three nucleotides from the nucleotide sequence selected from SEQ ID NO: 1452 and (ii) an antisense strand forming a duplex with the sense strand of (i) and having 17 contiguous nucleotides differing by no more than one, two or three nucleotides from the nucleotide sequence selected from SEQ ID NO: 1467. In some embodiments, the dsRNA includes (i) a sense strand having 18 contiguous nucleotides differing by no more than one, two or three nucleotides from the nucleotide sequence selected from SEQ ID NO: 1452 and (ii) an antisense strand forming a duplex with the sense strand of (i) and having 18 contiguous nucleotides differing by no more than one, two or three nucleotides from the nucleotide sequence selected from SEQ ID NO: 1467. In some embodiments, the dsRNA includes (i) a sense strand having 19 contiguous nucleotides differing by no more than one, two or three nucleotides from the nucleotide sequence selected from SEQ ID NO: 1452 and (ii) an antisense strand forming a duplex with the sense strand of (i) and having 19 contiguous nucleotides differing by no more than one, two or three nucleotides from the nucleotide sequence selected from SEQ ID NO: 1467. In some embodiments, the dsRNA includes (i) a sense strand having 20 contiguous nucleotides differing by no more than one, two or three nucleotides from the nucleotide sequence selected from SEQ ID NO: 1452 and (ii) an antisense strand forming a duplex with the sense strand of (i) and having 20 contiguous nucleotides differing by no more than one, two or three nucleotides from the nucleotide sequence selected from SEQ ID NO: 1467. In some embodiments, the dsRNA includes (i) a sense strand having 21 contiguous nucleotides differing by no more than one, two or three nucleotides from the nucleotide sequence selected from SEQ ID NO: 1452 and (ii) an antisense strand forming a duplex with the sense strand of (i) and having 21 contiguous nucleotides differing by no more than one, two or three nucleotides from the nucleotide sequence selected from SEQ ID NO: 1467.

[0801] In some embodiments, the dsRNA includes (i) a sense strand having 15 contiguous nucleotides differing by no more than one, two or three nucleotides from the nucleotide sequence selected from SEQ ID NO: 1453 and (ii) an antisense strand forming a duplex with the sense strand of (i) and having 15 contiguous nucleotides differing by no more than one, two or three nucleotides from the nucleotide sequence selected from SEQ ID NO: 1468. In some embodiments, the dsRNA includes (i) a sense strand having 16 contiguous nucleotides differing by no more than one, two or three from the nucleotide sequence selected from SEQ ID NO: 1453 and (ii) an antisense strand forming a duplex with the sense strand of (i) and having 16 contiguous nucleotides differing by no more than one, two or three nucleotides from the nucleotide sequence selected from SEQ ID NO: 1468. In some embodiments, the dsRNA includes (i) a sense strand having 17 contiguous nucleotides differing by no more than one, two or three nucleotides from the nucleotide sequence selected from SEQ ID NO: 1453 and (ii) an antisense strand forming a duplex with the sense strand of (i) and having 17 contiguous nucleotides differing by no more than one, two or three nucleotides from the nucleotide sequence selected from SEQ ID NO: 1468. In some embodiments, the dsRNA includes (i) a sense strand having 18 contiguous nucleotides differing by no more than one, two or three nucleotides from the nucleotide sequence selected from SEQ ID NO: 1453 and (ii) an antisense strand forming a duplex with the sense strand of (i) and having 18 contiguous nucleotides differing by no more than one, two or three nucleotides from the nucleotide sequence selected from SEQ ID NO: 1468. In some embodiments, the dsRNA includes (i) a sense strand having 19 contiguous nucleotides differing by no more than one, two or three nucleotides from the nucleotide sequence selected from SEQ ID NO: 1453 and (ii) an antisense strand forming a duplex with the sense strand of (i) and having 19 contiguous nucleotides differing by no more than one, two or three nucleotides from the nucleotide sequence selected from SEQ ID NO: 1468. In some embodiments, the dsRNA includes (i) a sense strand having 20 contiguous nucleotides differing by no more than one, two or three nucleotides from the nucleotide sequence selected from SEQ ID NO: 1453 and (ii) an antisense strand forming a duplex with the sense strand of (i) and having 20 contiguous nucleotides differing by no more than one, two or three nucleotides from the nucleotide sequence selected from SEQ ID NO: 1468. In some embodiments, the dsRNA includes (i) a sense strand having 21 contiguous nucleotides differing by no more than one, two or three nucleotides from the nucleotide sequence selected from SEQ ID NO: 1453 and (ii) an antisense strand forming a duplex with the sense strand of (i) and having 21 contiguous nucleotides differing by no more than one, two or three nucleotides from the nucleotide sequence selected from SEQ ID NO: 1468.

[0802] In some embodiments, the dsRNA includes (i) a sense strand having 15 contiguous nucleotides differing by no more than one, two or three nucleotides from the nucleotide sequence selected from SEQ ID NO: 1454 and (ii) an antisense strand forming a duplex with the sense strand of (i) and having 15 contiguous nucleotides differing by no more than one, two or three nucleotides from the nucleotide sequence selected from SEQ ID NO: 1469. In some embodiments, the dsRNA includes (i) a sense strand having 16 contiguous nucleotides differing by no more than one, two or three from the nucleotide sequence selected from SEQ ID NO: 1454 and (ii) an antisense strand forming a duplex with the sense strand of (i) and having 16 contiguous nucleotides differing by no more than one, two or three nucleotides from the nucleotide sequence selected from SEQ ID NO: 1469. In some embodiments, the dsRNA includes (i) a sense strand having 17 contiguous nucleotides differing by no more than one, two or three nucleotides from the nucleotide sequence selected from SEQ ID NO: 1454 and (ii) an antisense strand forming a duplex with the sense strand of (i) and having 17 contiguous nucleotides differing by no more than one, two or three nucleotides from the nucleotide sequence selected from SEQ ID NO: 1469. In some embodiments, the dsRNA includes (i) a sense strand having 18 contiguous nucleotides differing by no more than one, two or three nucleotides from the nucleotide sequence selected from SEQ ID NO: 1454 and (ii) an antisense strand forming a duplex with the sense strand of (i) and having 18 contiguous nucleotides differing by no more than one, two or three nucleotides from the nucleotide sequence selected from SEQ ID NO: 1469. In some embodiments, the dsRNA includes (i) a sense strand having 19 contiguous nucleotides differing by no more than one, two or three nucleotides from the nucleotide sequence selected from SEQ ID NO: 1454 and (ii) an antisense strand forming a duplex with the sense strand of (i) and having 19 contiguous nucleotides differing by no more than one, two or three nucleotides from the nucleotide sequence selected from SEQ ID NO: 1469. In some embodiments, the dsRNA includes (i) a sense strand having 20 contiguous nucleotides differing by no more than one, two or three nucleotides from the nucleotide sequence selected from SEQ ID NO: 1454 and (ii) an antisense strand forming a duplex with the sense strand of (i) and having 20 contiguous nucleotides differing by no more than one, two or three nucleotides from the nucleotide sequence selected from SEQ ID NO: 1469. In some embodiments, the dsRNA includes (i) a sense strand having 21 contiguous nucleotides differing by no more than one, two or three nucleotides from the nucleotide sequence selected from SEQ ID NO: 1454 and (ii) an antisense strand forming a duplex with the sense strand of (i) and having 21 contiguous nucleotides differing by no more than one, two or three nucleotides from the nucleotide sequence selected from SEQ ID NO: 1469.

[0803] In some embodiments, the dsRNA includes (i) a sense strand having 15 contiguous nucleotides differing by no more than one, two or three nucleotides from the nucleotide sequence selected from SEQ ID NO: 1455 and (ii) an antisense strand forming a duplex with the sense strand of (i) and having 15 contiguous nucleotides differing by no more than one, two or three nucleotides from the nucleotide sequence selected from SEQ ID NO: 1470. In some embodiments, the dsRNA includes (i) a sense strand having 16 contiguous nucleotides differing by no more than one, two or three from the nucleotide sequence selected from SEQ ID NO: 1455 and (ii) an antisense strand forming a duplex with the sense strand of (i) and having 16 contiguous nucleotides differing by no more than one, two or three nucleotides from the nucleotide sequence selected from SEQ ID NO: 1470. In some embodiments, the dsRNA includes (i) a sense strand having 17 contiguous nucleotides differing by no more than one, two or three nucleotides from the nucleotide sequence selected from SEQ ID NO: 1455 and (ii) an antisense strand forming a duplex with the sense strand of (i) and having 17 contiguous nucleotides differing by no more than one, two or three nucleotides from the nucleotide sequence selected from SEQ ID NO: 1470. In some embodiments, the dsRNA includes (i) a sense strand having 18 contiguous nucleotides differing by no more than one, two or three nucleotides from the nucleotide sequence selected from SEQ ID NO: 1455 and (ii) an antisense strand forming a duplex with the sense strand of (i) and having 18 contiguous nucleotides differing by no more than one, two or three nucleotides from the nucleotide sequence selected from SEQ ID NO: 1470. In some embodiments, the dsRNA includes (i) a sense strand having 19 contiguous nucleotides differing by no more than one, two or three nucleotides from the nucleotide sequence selected from SEQ ID NO: 1455 and (ii) an antisense strand forming a duplex with the sense strand of (i) and having 19 contiguous nucleotides differing by no more than one, two or three nucleotides from the nucleotide sequence selected from SEQ ID NO: 1470. In some embodiments, the dsRNA includes (i) a sense strand having 20 contiguous nucleotides differing by no more than one, two or three nucleotides from the nucleotide sequence selected from SEQ ID NO: 1455 and (ii) an antisense strand forming a duplex with the sense strand of (i) and having 20 contiguous nucleotides differing by no more than one, two or three nucleotides from the nucleotide sequence selected from SEQ ID NO: 1470. In some embodiments, the dsRNA includes (i) a sense strand having 21 contiguous nucleotides differing by no more than one, two or three nucleotides from the nucleotide sequence selected from SEQ ID NO: 1455 and (ii) an antisense strand forming a duplex with the sense strand of (i) and having 21 contiguous nucleotides differing by no more than one, two or three nucleotides from the nucleotide sequence selected from SEQ ID NO: 1470.

[0804] In some embodiments, the dsRNA includes (i) a sense strand having 15 contiguous nucleotides differing by no more than one, two or three nucleotides from the nucleotide sequence selected from SEQ ID NO: 1456 and (ii) an antisense strand forming a duplex with the sense strand of (i) and having 15 contiguous nucleotides differing by no more than one, two or three nucleotides from the nucleotide sequence selected from SEQ ID NO: 1471. In some embodiments, the dsRNA includes (i) a sense strand having 16 contiguous nucleotides differing by no more than one, two or three from the nucleotide sequence selected from SEQ ID NO: 1456 and (ii) an antisense strand forming a duplex with the sense strand of (i) and having 16 contiguous nucleotides differing by no more than one, two or three nucleotides from the nucleotide sequence selected from SEQ ID NO: 1471. In some embodiments, the dsRNA includes (i) a sense strand having 17 contiguous nucleotides differing by no more than one, two or three nucleotides from the nucleotide sequence selected from SEQ ID NO: 1456 and (ii) an antisense strand forming a duplex with the sense strand of (i) and having 17 contiguous nucleotides differing by no more than one, two or three nucleotides from the nucleotide sequence selected from SEQ ID NO: 1471. In some embodiments, the dsRNA includes (i) a sense strand having 18 contiguous nucleotides differing by no more than one, two or three nucleotides from the nucleotide sequence selected from SEQ ID NO: 1456 and (ii) an antisense strand forming a duplex with the sense strand of (i) and having 18 contiguous nucleotides differing by no more than one, two or three nucleotides from the nucleotide sequence selected from SEQ ID NO: 1471. In some embodiments, the dsRNA includes (i) a sense strand having 19 contiguous nucleotides differing by no more than one, two or three nucleotides from the nucleotide sequence selected from SEQ ID NO: 1456 and (ii) an antisense strand forming a duplex with the sense strand of (i) and having 19 contiguous nucleotides differing by no more than one, two or three nucleotides from the nucleotide sequence selected from SEQ ID NO: 1471. In some embodiments, the dsRNA includes (i) a sense strand having 20 contiguous nucleotides differing by no more than one, two or three nucleotides from the nucleotide sequence selected from SEQ ID NO: 1456 and (ii) an antisense strand forming a duplex with the sense strand of (i) and having 20 contiguous nucleotides differing by no more than one, two or three nucleotides from the nucleotide sequence selected from SEQ ID NO: 1471. In some embodiments, the dsRNA includes (i) a sense strand having 21 contiguous nucleotides differing by no more than one, two or three nucleotides from the nucleotide sequence selected from SEQ ID NO: 1456 and (ii) an antisense strand forming a duplex with the sense strand of (i) and having 21 contiguous nucleotides differing by no more than one, two or three nucleotides from the nucleotide sequence selected from SEQ ID NO: 1471.

[0805] In some embodiments, the dsRNA includes (i) a sense strand having 15 contiguous nucleotides differing by no more than one, two or three nucleotides from the nucleotide sequence selected from SEQ ID NO: 1457 and (ii) an antisense strand forming a duplex with the sense strand of (i) and having 15 contiguous nucleotides differing by no more than one, two or three nucleotides from the nucleotide sequence selected from SEQ ID NO: 1472. In some embodiments, the dsRNA includes (i) a sense strand having 16 contiguous nucleotides differing by no more than one, two or three from the nucleotide sequence selected from SEQ ID NO: 1457 and (ii) an antisense strand forming a duplex with the sense strand of (i) and having 16 contiguous nucleotides differing by no more than one, two or three nucleotides from the nucleotide sequence selected from SEQ ID NO: 1472. In some embodiments, the dsRNA includes (i) a sense strand having 17 contiguous nucleotides differing by no more than one, two or three nucleotides from the nucleotide sequence selected from SEQ ID NO: 1457 and (ii) an antisense strand forming a duplex with the sense strand of (i) and having 17 contiguous nucleotides differing by no more than one, two or three nucleotides from the nucleotide sequence selected from SEQ ID NO: 1472. In some embodiments, the dsRNA includes (i) a sense strand having 18 contiguous nucleotides differing by no more than one, two or three nucleotides from the nucleotide sequence selected from SEQ ID NO: 1457 and (ii) an antisense strand forming a duplex with the sense strand of (i) and having 18 contiguous nucleotides differing by no more than one, two or three nucleotides from the nucleotide sequence selected from SEQ ID NO: 1472. In some embodiments, the dsRNA includes (i) a sense strand having 19 contiguous nucleotides differing by no more than one, two or three nucleotides from the nucleotide sequence selected from SEQ ID NO: 1457 and (ii) an antisense strand forming a duplex with the sense strand of (i) and having 19 contiguous nucleotides differing by no more than one, two or three nucleotides from the nucleotide sequence selected from SEQ ID NO: 1472. In some embodiments, the dsRNA includes (i) a sense strand having 20 contiguous nucleotides differing by no more than one, two or three nucleotides from the nucleotide sequence selected from SEQ ID NO: 1457 and (ii) an antisense strand forming a duplex with the sense strand of (i) and having 20 contiguous nucleotides differing by no more than one, two or three nucleotides from the nucleotide sequence selected from SEQ ID NO: 1472. In some embodiments, the dsRNA includes (i) a sense strand having 21 contiguous nucleotides differing by no more than one, two or three nucleotides from the nucleotide sequence selected from SEQ ID NO: 1457 and (ii) an antisense strand forming a duplex with the sense strand of (i) and having 21 contiguous nucleotides differing by no more than one, two or three nucleotides from the nucleotide sequence selected from SEQ ID NO: 1472.

[0806] In some embodiments, the dsRNA includes (i) a sense strand having 15 contiguous nucleotides differing by no more than one, two or three nucleotides from the nucleotide sequence selected from SEQ ID NO: 1458 and (ii) an antisense strand forming a duplex with the sense strand of (i) and having 15 contiguous nucleotides differing by no more than one, two or three nucleotides from the nucleotide sequence selected from SEQ ID NO: 1473. In some embodiments, the dsRNA includes (i) a sense strand having 16 contiguous nucleotides differing by no more than one, two or three from the nucleotide sequence selected from SEQ ID NO: 1458 and (ii) an antisense strand forming a duplex with the sense strand of (i) and having 16 contiguous nucleotides differing by no more than one, two or three nucleotides from the nucleotide sequence selected from SEQ ID NO: 1473. In some embodiments, the dsRNA includes (i) a sense strand having 17 contiguous nucleotides differing by no more than one, two or three nucleotides from the nucleotide sequence selected from SEQ ID NO: 1458 and (ii) an antisense strand forming a duplex with the sense strand of (i) and having 17 contiguous nucleotides differing by no more than one, two or three nucleotides from the nucleotide sequence selected from SEQ ID NO: 1473. In some embodiments, the dsRNA includes (i) a sense strand having 18 contiguous nucleotides differing by no more than one, two or three nucleotides from the nucleotide sequence selected from SEQ ID NO: 1458 and (ii) an antisense strand forming a duplex with the sense strand of (i) and having 18 contiguous nucleotides differing by no more than one, two or three nucleotides from the nucleotide sequence selected from SEQ ID NO: 1473. In some embodiments, the dsRNA includes (i) a sense strand having 19 contiguous nucleotides differing by no more than one, two or three nucleotides from the nucleotide sequence selected from SEQ ID NO: 1458 and (ii) an antisense strand forming a duplex with the sense strand of (i) and having 19 contiguous nucleotides differing by no more than one, two or three nucleotides from the nucleotide sequence selected from SEQ ID NO: 1473. In some embodiments, the dsRNA includes (i) a sense strand having 20 contiguous nucleotides differing by no more than one, two or three nucleotides from the nucleotide sequence selected from SEQ ID NO: 1458 and (ii) an antisense strand forming a duplex with the sense strand of (i) and having 20 contiguous nucleotides differing by no more than one, two or three nucleotides from the nucleotide sequence selected from SEQ ID NO: 1473. In some embodiments, the dsRNA includes (i) a sense strand having 21 contiguous nucleotides differing by no more than one, two or three nucleotides from the nucleotide sequence selected from SEQ ID NO: 1458 and (ii) an antisense strand forming a duplex with the sense strand of (i) and having 21 contiguous nucleotides differing by no more than one, two or three nucleotides from the nucleotide sequence selected from SEQ ID NO: 1473.

[0807] In some embodiments, the dsRNA includes (i) a sense strand having 15 contiguous nucleotides differing by no more than one, two or three nucleotides from the nucleotide sequence selected from SEQ ID NO: 1459 and (ii) an antisense strand forming a duplex with the sense strand of (i) and having 15 contiguous nucleotides differing by no more than one, two or three nucleotides from the nucleotide sequence selected from SEQ ID NO: 1474. In some embodiments, the dsRNA includes (i) a sense strand having 16 contiguous nucleotides differing by no more than one, two or three from the nucleotide sequence selected from SEQ ID NO: 1459 and (ii) an antisense strand forming a duplex with the sense strand of (i) and having 16 contiguous nucleotides differing by no more than one, two or three nucleotides from the nucleotide sequence selected from SEQ ID NO: 1474. In some embodiments, the dsRNA includes (i) a sense strand having 17 contiguous nucleotides differing by no more than one, two or three nucleotides from the nucleotide sequence selected from SEQ ID NO: 1459 and (ii) an antisense strand forming a duplex with the sense strand of (i) and having 17 contiguous nucleotides differing by no more than one, two or three nucleotides from the nucleotide sequence selected from SEQ ID NO: 1474. In some embodiments, the dsRNA includes (i) a sense strand having 18 contiguous nucleotides differing by no more than one, two or three nucleotides from the nucleotide sequence selected from SEQ ID NO: 1459 and (ii) an antisense strand forming a duplex with the sense strand of (i) and having 18 contiguous nucleotides differing by no more than one, two or three nucleotides from the nucleotide sequence selected from SEQ ID NO: 1474. In some embodiments, the dsRNA includes (i) a sense strand having 19 contiguous nucleotides differing by no more than one, two or three nucleotides from the nucleotide sequence selected from SEQ ID NO: 1459 and (ii) an antisense strand forming a duplex with the sense strand of (i) and having 19 contiguous nucleotides differing by no more than one, two or three nucleotides from the nucleotide sequence selected from SEQ ID NO: 1474. In some embodiments, the dsRNA includes (i) a sense strand having 20 contiguous nucleotides differing by no more than one, two or three nucleotides from the nucleotide sequence selected from SEQ ID NO: 1459 and (ii) an antisense strand forming a duplex with the sense strand of (i) and having 20 contiguous nucleotides differing by no more than one, two or three nucleotides from the nucleotide sequence selected from SEQ ID NO: 1474. In some embodiments, the dsRNA includes (i) a sense strand having 21 contiguous nucleotides differing by no more than one, two or three nucleotides from the nucleotide sequence selected from SEQ ID NO: 1459 and (ii) an antisense strand forming a duplex with the sense strand of (i) and having 21 contiguous nucleotides differing by no more than one, two or three nucleotides from the nucleotide sequence selected from SEQ ID NO: 1474.

[0808] In some embodiments, the dsRNA includes (i) a sense strand having 15 contiguous nucleotides differing by no more than one, two or three nucleotides from the nucleotide sequence selected from SEQ ID NO: 1460 and (ii) an antisense strand forming a duplex with the sense strand of (i) and having 15 contiguous nucleotides differing by no more than one, two or three nucleotides from the nucleotide sequence selected from SEQ ID NO: 1475. In some embodiments, the dsRNA includes (i) a sense strand having 16 contiguous nucleotides differing by no more than one, two or three from the nucleotide sequence selected from SEQ ID NO: 1460 and (ii) an antisense strand forming a duplex with the sense strand of (i) and having 16 contiguous nucleotides differing by no more than one, two or three nucleotides from the nucleotide sequence selected from SEQ ID NO: 1475. In some embodiments, the dsRNA includes (i) a sense strand having 17 contiguous nucleotides differing by no more than one, two or three nucleotides from the nucleotide sequence selected from SEQ ID NO: 1460 and (ii) an antisense strand forming a duplex with the sense strand of (i) and having 17 contiguous nucleotides differing by no more than one, two or three nucleotides from the nucleotide sequence selected from SEQ ID NO: 1475. In some embodiments, the dsRNA includes (i) a sense strand having 18 contiguous nucleotides differing by no more than one, two or three nucleotides from the nucleotide sequence selected from SEQ ID NO: 1460 and (ii) an antisense strand forming a duplex with the sense strand of (i) and having 18 contiguous nucleotides differing by no more than one, two or three nucleotides from the nucleotide sequence selected from SEQ ID NO: 1475. In some embodiments, the dsRNA includes (i) a sense strand having 19 contiguous nucleotides differing by no more than one, two or three nucleotides from the nucleotide sequence selected from SEQ ID NO: 1460 and (ii) an antisense strand forming a duplex with the sense strand of (i) and having 19 contiguous nucleotides differing by no more than one, two or three nucleotides from the nucleotide sequence selected from SEQ ID NO: 1475. In some embodiments, the dsRNA includes (i) a sense strand having 20 contiguous nucleotides differing by no more than one, two or three nucleotides from the nucleotide sequence selected from SEQ ID NO: 1460 and (ii) an antisense strand forming a duplex with the sense strand of (i) and having 20 contiguous nucleotides differing by no more than one, two or three nucleotides from the nucleotide sequence selected from SEQ ID NO: 1475. In some embodiments, the dsRNA includes (i) a sense strand having 21 contiguous nucleotides differing by no more than one, two or three nucleotides from the nucleotide sequence selected from SEQ ID NO: 1460 and (ii) an antisense strand forming a duplex with the sense strand of (i) and having 21 contiguous nucleotides differing by no more than one, two or three nucleotides from the nucleotide sequence selected from SEQ ID NO: 1475.

[0809] In some embodiments, the dsRNA includes (i) a sense strand having 15 contiguous nucleotides differing by no more than one, two or three nucleotides from the nucleotide sequence selected from SEQ ID NO: 1461 and (ii) an antisense strand forming a duplex with the sense strand of (i) and having 15 contiguous nucleotides differing by no more than one, two or three nucleotides from the nucleotide sequence selected from SEQ ID NO: 1476. In some embodiments, the dsRNA includes (i) a sense strand having 16 contiguous nucleotides differing by no more than one, two or three from the nucleotide sequence selected from SEQ ID NO: 1461 and (ii) an antisense strand forming a duplex with the sense strand of (i) and having 16 contiguous nucleotides differing by no more than one, two or three nucleotides from the nucleotide sequence selected from SEQ ID NO: 1476. In some embodiments, the dsRNA includes (i) a sense strand having 17 contiguous nucleotides differing by no more than one, two or three nucleotides from the nucleotide sequence selected from SEQ ID NO: 1461 and (ii) an antisense strand forming a duplex with the sense strand of (i) and having 17 contiguous nucleotides differing by no more than one, two or three nucleotides from the nucleotide sequence selected from SEQ ID NO: 1476. In some embodiments, the dsRNA includes (i) a sense strand having 18 contiguous nucleotides differing by no more than one, two or three nucleotides from the nucleotide sequence selected from SEQ ID NO: 1461 and (ii) an antisense strand forming a duplex with the sense strand of (i) and having 18 contiguous nucleotides differing by no more than one, two or three nucleotides from the nucleotide sequence selected from SEQ ID NO: 1476. In some embodiments, the dsRNA includes (i) a sense strand having 19 contiguous nucleotides differing by no more than one, two or three nucleotides from the nucleotide sequence selected from SEQ ID NO: 1461 and (ii) an antisense strand forming a duplex with the sense strand of (i) and having 19 contiguous nucleotides differing by no more than one, two or three nucleotides from the nucleotide sequence selected from SEQ ID NO: 1476. In some embodiments, the dsRNA includes (i) a sense strand having 20 contiguous nucleotides differing by no more than one, two or three nucleotides from the nucleotide sequence selected from SEQ ID NO: 1461 and (ii) an antisense strand forming a duplex with the sense strand of (i) and having 20 contiguous nucleotides differing by no more than one, two or three nucleotides from the nucleotide sequence selected from SEQ ID NO: 1476. In some embodiments, the dsRNA includes (i) a sense strand having 21 contiguous nucleotides differing by no more than one, two or three nucleotides from the nucleotide sequence selected from SEQ ID NO: 1461 and (ii) an antisense strand forming a duplex with the sense strand of (i) and having 21 contiguous nucleotides differing by no more than one, two or three nucleotides from the nucleotide sequence selected from SEQ ID NO: 1476.

[0810] In some embodiments, the dsRNA includes (i) a sense strand having 15 contiguous nucleotides differing by no more than one, two or three nucleotides from the nucleotide sequence selected from SEQ ID NO: 1462 and (ii) an antisense strand forming a duplex with the sense strand of (i) and having 15 contiguous nucleotides differing by no more than one, two or three nucleotides from the nucleotide sequence selected from SEQ ID NO: 1477. In some embodiments, the dsRNA includes (i) a sense strand having 16 contiguous nucleotides differing by no more than one, two or three from the nucleotide sequence selected from SEQ ID NO: 1462 and (ii) an antisense strand forming a duplex with the sense strand of (i) and having 16 contiguous nucleotides differing by no more than one, two or three nucleotides from the nucleotide sequence selected from SEQ ID NO: 1477. In some embodiments, the dsRNA includes (i) a sense strand having 17 contiguous nucleotides differing by no more than one, two or three nucleotides from the nucleotide sequence selected from SEQ ID NO: 1462 and (ii) an antisense strand forming a duplex with the sense strand of (i) and having 17 contiguous nucleotides differing by no more than one, two or three nucleotides from the nucleotide sequence selected from SEQ ID NO: 1477. In some embodiments, the dsRNA includes (i) a sense strand having 18 contiguous nucleotides differing by no more than one, two or three nucleotides from the nucleotide sequence selected from SEQ ID NO: 1462 and (ii) an antisense strand forming a duplex with the sense strand of (i) and having 18 contiguous nucleotides differing by no more than one, two or three nucleotides from the nucleotide sequence selected from SEQ ID NO: 1477. In some embodiments, the dsRNA includes (i) a sense strand having 19 contiguous nucleotides differing by no more than one, two or three nucleotides from the nucleotide sequence selected from SEQ ID NO: 1462 and (ii) an antisense strand forming a duplex with the sense strand of (i) and having 19 contiguous nucleotides differing by no more than one, two or three nucleotides from the nucleotide sequence selected from SEQ ID NO: 1477. In some embodiments, the dsRNA includes (i) a sense strand having 20 contiguous nucleotides differing by no more than one, two or three nucleotides from the nucleotide sequence selected from SEQ ID NO: 1462 and (ii) an antisense strand forming a duplex with the sense strand of (i) and having 20 contiguous nucleotides differing by no more than one, two or three nucleotides from the nucleotide sequence selected from SEQ ID NO: 1477. In some embodiments, the dsRNA includes (i) a sense strand having 21 contiguous nucleotides differing by no more than one, two or three nucleotides from the nucleotide sequence selected from SEQ ID NO: 1462 and (ii) an antisense strand forming a duplex with the sense strand of (i) and having 21 contiguous nucleotides differing by no more than one, two or three nucleotides from the nucleotide sequence selected from SEQ ID NO: 1477.

[0811] In some embodiments, the dsRNA includes (i) a sense strand having 15 contiguous nucleotides differing by no more than one, two or three nucleotides from the nucleotide sequence selected from SEQ ID NO: 1481 and (ii) an antisense strand forming a duplex with the sense strand of (i) and having 15 contiguous nucleotides differing by no more than one, two or three nucleotides from the nucleotide sequence selected from SEQ ID NO: 1299. In some embodiments, the dsRNA includes (i) a sense strand having 16 contiguous nucleotides differing by no more than one, two or three from the nucleotide sequence selected from SEQ ID NO: 1481 and (ii) an antisense strand forming a duplex with the sense strand of (i) and having 16 contiguous nucleotides differing by no more than one, two or three nucleotides from the nucleotide sequence selected from SEQ ID NO: 1299. In some embodiments, the dsRNA includes (i) a sense strand having 17 contiguous nucleotides differing by no more than one, two or three nucleotides from the nucleotide sequence selected from SEQ ID NO: 1481 and (ii) an antisense strand forming a duplex with the sense strand of (i) and having 17 contiguous nucleotides differing by no more than one, two or three nucleotides from the nucleotide sequence selected from SEQ ID NO: 1299. In some embodiments, the dsRNA includes (i) a sense strand having 18 contiguous nucleotides differing by no more than one, two or three nucleotides from the nucleotide sequence selected from SEQ ID NO: 1481 and (ii) an antisense strand forming a duplex with the sense strand of (i) and having 18 contiguous nucleotides differing by no more than one, two or three nucleotides from the nucleotide sequence selected from SEQ ID NO: 1299. In some embodiments, the dsRNA includes (i) a sense strand having 19 contiguous nucleotides differing by no more than one, two or three nucleotides from the nucleotide sequence selected from SEQ ID NO: 1481 and (ii) an antisense strand forming a duplex with the sense strand of (i) and having 19 contiguous nucleotides differing by no more than one, two or three nucleotides from the nucleotide sequence selected from SEQ ID NO: 1299. In some embodiments, the dsRNA includes (i) a sense strand having 20 contiguous nucleotides differing by no more than one, two or three nucleotides from the nucleotide sequence selected from SEQ ID NO: 1481 and (ii) an antisense strand forming a duplex with the sense strand of (i) and having 20 contiguous nucleotides differing by no more than one, two or three nucleotides from the nucleotide sequence selected from SEQ ID NO: 1299. In some embodiments, the dsRNA includes (i) a sense strand having 21 contiguous nucleotides differing by no more than one, two or three nucleotides from the nucleotide sequence selected from SEQ ID NO: 1481 and (ii) an antisense strand forming a duplex with the sense strand of (i) and having 21 contiguous nucleotides differing by no more than one, two or three nucleotides from the nucleotide sequence selected from SEQ ID NO: 1299.

[0812] In some embodiments, the dsRNA includes (i) a sense strand having 15 contiguous nucleotides differing by no more than one, two or three nucleotides from the nucleotide sequence selected from SEQ ID NO: 1482 and (ii) an antisense strand forming a duplex with the sense strand of (i) and having 15 contiguous nucleotides differing by no more than one, two or three nucleotides from the nucleotide sequence selected from SEQ ID NO: 1299. In some embodiments, the dsRNA includes (i) a sense strand having 16 contiguous nucleotides differing by no more than one, two or three from the nucleotide sequence selected from SEQ ID NO: 1482 and (ii) an antisense strand forming a duplex with the sense strand of (i) and having 16 contiguous nucleotides differing by no more than one, two or three nucleotides from the nucleotide sequence selected from SEQ ID NO: 1299. In some embodiments, the dsRNA includes (i) a sense strand having 17 contiguous nucleotides differing by no more than one, two or three nucleotides from the nucleotide sequence selected from SEQ ID NO: 1482 and (ii) an antisense strand forming a duplex with the sense strand of (i) and having 17 contiguous nucleotides differing by no more than one, two or three nucleotides from the nucleotide sequence selected from SEQ ID NO: 1299. In some embodiments, the dsRNA includes (i) a sense strand having 18 contiguous nucleotides differing by no more than one, two or three nucleotides from the nucleotide sequence selected from SEQ ID NO: 1482 and (ii) an antisense strand forming a duplex with the sense strand of (i) and having 18 contiguous nucleotides differing by no more than one, two or three nucleotides from the nucleotide sequence selected from SEQ ID NO: 1299. In some embodiments, the dsRNA includes (i) a sense strand having 19 contiguous nucleotides differing by no more than one, two or three nucleotides from the nucleotide sequence selected from SEQ ID NO: 1482 and (ii) an antisense strand forming a duplex with the sense strand of (i) and having 19 contiguous nucleotides differing by no more than one, two or three nucleotides from the nucleotide sequence selected from SEQ ID NO: 1299. In some embodiments, the dsRNA includes (i) a sense strand having 20 contiguous nucleotides differing by no more than one, two or three nucleotides from the nucleotide sequence selected from SEQ ID NO: 1482 and (ii) an antisense strand forming a duplex with the sense strand of (i) and having 20 contiguous nucleotides differing by no more than one, two or three nucleotides from the nucleotide sequence selected from SEQ ID NO: 1299. In some embodiments, the dsRNA includes (i) a sense strand having 21 contiguous nucleotides differing by no more than one, two or three nucleotides from the nucleotide sequence selected from SEQ ID NO: 1482 and (ii) an antisense strand forming a duplex with the sense strand of (i) and having 21 contiguous nucleotides differing by no more than one, two or three nucleotides from the nucleotide sequence selected from SEQ ID NO: 1299.

[0813] In some embodiments, the dsRNA includes (i) a sense strand having 15 contiguous nucleotides differing by no more than one, two or three nucleotides from the nucleotide sequence selected from SEQ ID NO: 1451 and (ii) an antisense strand forming a duplex with the sense strand of (i) and having 15 contiguous nucleotides differing by no more than one, two or three nucleotides from the nucleotide sequence selected from SEQ ID NO: 2600. In some embodiments, the dsRNA includes (i) a sense strand having 16 contiguous nucleotides differing by no more than one, two or three from the nucleotide sequence selected from SEQ ID NO: 1451 and (ii) an antisense strand forming a duplex with the sense strand of (i) and having 16 contiguous nucleotides differing by no more than one, two or three nucleotides from the nucleotide sequence selected from SEQ ID NO: 2600. In some embodiments, the dsRNA includes (i) a sense strand having 17 contiguous nucleotides differing by no more than one, two or three nucleotides from the nucleotide sequence selected from SEQ ID NO: 1451 and (ii) an antisense strand forming a duplex with the sense strand of (i) and having 17 contiguous nucleotides differing by no more than one, two or three nucleotides from the nucleotide sequence selected from SEQ ID NO: 2600. In some embodiments, the dsRNA includes (i) a sense strand having 18 contiguous nucleotides differing by no more than one, two or three nucleotides from the nucleotide sequence selected from SEQ ID NO: 1451 and (ii) an antisense strand forming a duplex with the sense strand of (i) and having 18 contiguous nucleotides differing by no more than one, two or three nucleotides from the nucleotide sequence selected from SEQ ID NO: 2600. In some embodiments, the dsRNA includes (i) a sense strand having 19 contiguous nucleotides differing by no more than one, two or three nucleotides from the nucleotide sequence selected from SEQ ID NO: 1451 and (ii) an antisense strand forming a duplex with the sense strand of (i) and having 19 contiguous nucleotides differing by no more than one, two or three nucleotides from the nucleotide sequence selected from SEQ ID NO: 2600. In some embodiments, the dsRNA includes (i) a sense strand having 20 contiguous nucleotides differing by no more than one, two or three nucleotides from the nucleotide sequence selected from SEQ ID NO: 1451 and (ii) an antisense strand forming a duplex with the sense strand of (i) and having 20 contiguous nucleotides differing by no more than one, two or three nucleotides from the nucleotide sequence selected from SEQ ID NO: 2600. In some embodiments, the dsRNA includes (i) a sense strand having 21 contiguous nucleotides differing by no more than one, two or three nucleotides from the nucleotide sequence selected from SEQ ID NO: 1451 and (ii) an antisense strand forming a duplex with the sense strand of (i) and having 21 contiguous nucleotides differing by no more than one, two or three nucleotides from the nucleotide sequence selected from SEQ ID NO: 2600.

[0814] In some embodiments, the dsRNA includes (i) a sense strand having 15 contiguous nucleotides differing by no more than one, two or three nucleotides from the nucleotide sequence selected from SEQ ID NO: 1456 and (ii) an antisense strand forming a duplex with the sense strand of (i) and having 15 contiguous nucleotides differing by no more than one, two or three nucleotides from the nucleotide sequence selected from SEQ ID NO: 2601. In some embodiments, the dsRNA includes (i) a sense strand having 16 contiguous nucleotides differing by no more than one, two or three from the nucleotide sequence selected from SEQ ID NO: 1456 and (ii) an antisense strand forming a duplex with the sense strand of (i) and having 16 contiguous nucleotides differing by no more than one, two or three nucleotides from the nucleotide sequence selected from SEQ ID NO: 2601. In some embodiments, the dsRNA includes (i) a sense strand having 17 contiguous nucleotides differing by no more than one, two or three nucleotides from the nucleotide sequence selected from SEQ ID NO: 1456 and (ii) an antisense strand forming a duplex with the sense strand of (i) and having 17 contiguous nucleotides differing by no more than one, two or three nucleotides from the nucleotide sequence selected from SEQ ID NO: 2601. In some embodiments, the dsRNA includes (i) a sense strand having 18 contiguous nucleotides differing by no more than one, two or three nucleotides from the nucleotide sequence selected from SEQ ID NO: 1456 and (ii) an antisense strand forming a duplex with the sense strand of (i) and having 18 contiguous nucleotides differing by no more than one, two or three nucleotides from the nucleotide sequence selected from SEQ ID NO: 2601. In some embodiments, the dsRNA includes (i) a sense strand having 19 contiguous nucleotides differing by no more than one, two or three nucleotides from the nucleotide sequence selected from SEQ ID NO: 1456 and (ii) an antisense strand forming a duplex with the sense strand of (i) and having 19 contiguous nucleotides differing by no more than one, two or three nucleotides from the nucleotide sequence selected from SEQ ID NO: 2601. In some embodiments, the dsRNA includes (i) a sense strand having 20 contiguous nucleotides differing by no more than one, two or three nucleotides from the nucleotide sequence selected from SEQ ID NO: 1456 and (ii) an antisense strand forming a duplex with the sense strand of (i) and having 20 contiguous nucleotides differing by no more than one, two or three nucleotides from the nucleotide sequence selected from SEQ ID NO: 2601. In some embodiments, the dsRNA includes (i) a sense strand having 21 contiguous nucleotides differing by no more than one, two or three nucleotides from the nucleotide sequence selected from SEQ ID NO: 1456 and (ii) an antisense strand forming a duplex with the sense strand of (i) and having 21 contiguous nucleotides differing by no more than one, two or three nucleotides from the nucleotide sequence selected from SEQ ID NO: 2601.

[0815] In some embodiments, the dsRNA includes (i) a sense strand having 15 contiguous nucleotides differing by no more than one, two or three nucleotides from the nucleotide sequence selected from SEQ ID NO: 1452 and (ii) an antisense strand forming a duplex with the sense strand of (i) and having 15 contiguous nucleotides differing by no more than one, two or three nucleotides from the nucleotide sequence selected from SEQ ID NO: 2602. In some embodiments, the dsRNA includes (i) a sense strand having 16 contiguous nucleotides differing by no more than one, two or three from the nucleotide sequence selected from SEQ ID NO: 1452 and (ii) an antisense strand forming a duplex with the sense strand of (i) and having 16 contiguous nucleotides differing by no more than one, two or three nucleotides from the nucleotide sequence selected from SEQ ID NO: 2602. In some embodiments, the dsRNA includes (i) a sense strand having 17 contiguous nucleotides differing by no more than one, two or three nucleotides from the nucleotide sequence selected from SEQ ID NO: 1452 and (ii) an antisense strand forming a duplex with the sense strand of (i) and having 17 contiguous nucleotides differing by no more than one, two or three nucleotides from the nucleotide sequence selected from SEQ ID NO: 2602. In some embodiments, the dsRNA includes (i) a sense strand having 18 contiguous nucleotides differing by no more than one, two or three nucleotides from the nucleotide sequence selected from SEQ ID NO: 1452 and (ii) an antisense strand forming a duplex with the sense strand of (i) and having 18 contiguous nucleotides differing by no more than one, two or three nucleotides from the nucleotide sequence selected from SEQ ID NO: 2602. In some embodiments, the dsRNA includes (i) a sense strand having 19 contiguous nucleotides differing by no more than one, two or three nucleotides from the nucleotide sequence selected from SEQ ID NO: 1452 and (ii) an antisense strand forming a duplex with the sense strand of (i) and having 19 contiguous nucleotides differing by no more than one, two or three nucleotides from the nucleotide sequence selected from SEQ ID NO: 2602. In some embodiments, the dsRNA includes (i) a sense strand having 20 contiguous nucleotides differing by no more than one, two or three nucleotides from the nucleotide sequence selected from SEQ ID NO: 1452 and (ii) an antisense strand forming a duplex with the sense strand of (i) and having 20 contiguous nucleotides differing by no more than one, two or three nucleotides from the nucleotide sequence selected from SEQ ID NO: 2602. In some embodiments, the dsRNA includes (i) a sense strand having 21 contiguous nucleotides differing by no more than one, two or three nucleotides from the nucleotide sequence selected from SEQ ID NO: 1452 and (ii) an antisense strand forming a duplex with the sense strand of (i) and having 21 contiguous nucleotides differing by no more than one, two or three nucleotides from the nucleotide sequence selected from SEQ ID NO: 2602.

[0816] In some embodiments, the dsRNA includes (i) a sense strand having 15 contiguous nucleotides differing by no more than one, two or three nucleotides from the nucleotide sequence selected from SEQ ID NO: 1454 and (ii) an antisense strand forming a duplex with the sense strand of (i) and having 15 contiguous nucleotides differing by no more than one, two or three nucleotides from the nucleotide sequence selected from SEQ ID NO: 2603. In some embodiments, the dsRNA includes (i) a sense strand having 16 contiguous nucleotides differing by no more than one, two or three from the nucleotide sequence selected from SEQ ID NO: 1454 and (ii) an antisense strand forming a duplex with the sense strand of (i) and having 16 contiguous nucleotides differing by no more than one, two or three nucleotides from the nucleotide sequence selected from SEQ ID NO: 2603. In some embodiments, the dsRNA includes (i) a sense strand having 17 contiguous nucleotides differing by no more than one, two or three nucleotides from the nucleotide sequence selected from SEQ ID NO: 1454 and (ii) an antisense strand forming a duplex with the sense strand of (i) and having 17 contiguous nucleotides differing by no more than one, two or three nucleotides from the nucleotide sequence selected from SEQ ID NO: 2603. In some embodiments, the dsRNA includes (i) a sense strand having 18 contiguous nucleotides differing by no more than one, two or three nucleotides from the nucleotide sequence selected from SEQ ID NO: 1454 and (ii) an antisense strand forming a duplex with the sense strand of (i) and having 18 contiguous nucleotides differing by no more than one, two or three nucleotides from the nucleotide sequence selected from SEQ ID NO: 2603. In some embodiments, the dsRNA includes (i) a sense strand having 19 contiguous nucleotides differing by no more than one, two or three nucleotides from the nucleotide sequence selected from SEQ ID NO: 1454 and (ii) an antisense strand forming a duplex with the sense strand of (i) and having 19 contiguous nucleotides differing by no more than one, two or three nucleotides from the nucleotide sequence selected from SEQ ID NO: 2603. In some embodiments, the dsRNA includes (i) a sense strand having 20 contiguous nucleotides differing by no more than one, two or three nucleotides from the nucleotide sequence selected from SEQ ID NO: 1454 and (ii) an antisense strand forming a duplex with the sense strand of (i) and having 20 contiguous nucleotides differing by no more than one, two or three nucleotides from the nucleotide sequence selected from SEQ ID NO: 2603. In some embodiments, the dsRNA includes (i) a sense strand having 21 contiguous nucleotides differing by no more than one, two or three nucleotides from the nucleotide sequence selected from SEQ ID NO: 1454 and (ii) an antisense strand forming a duplex with the sense strand of (i) and having 21 contiguous nucleotides differing by no more than one, two or three nucleotides from the nucleotide sequence selected from SEQ ID NO: 2603.

[0817] In some embodiments, the dsRNA includes (i) a sense strand having 15 contiguous nucleotides differing by no more than one, two or three nucleotides from the nucleotide sequence selected from SEQ ID NO: 1458 and (ii) an antisense strand forming a duplex with the sense strand of (i) and having 15 contiguous nucleotides differing by no more than one, two or three nucleotides from the nucleotide sequence selected from SEQ ID NO: 2604. In some embodiments, the dsRNA includes (i) a sense strand having 16 contiguous nucleotides differing by no more than one, two or three from the nucleotide sequence selected from SEQ ID NO: 1458 and (ii) an antisense strand forming a duplex with the sense strand of (i) and having 16 contiguous nucleotides differing by no more than one, two or three nucleotides from the nucleotide sequence selected from SEQ ID NO: 2604. In some embodiments, the dsRNA includes (i) a sense strand having 17 contiguous nucleotides differing by no more than one, two or three nucleotides from the nucleotide sequence selected from SEQ ID NO: 1458 and (ii) an antisense strand forming a duplex with the sense strand of (i) and having 17 contiguous nucleotides differing by no more than one, two or three nucleotides from the nucleotide sequence selected from SEQ ID NO: 2604. In some embodiments, the dsRNA includes (i) a sense strand having 18 contiguous nucleotides differing by no more than one, two or three nucleotides from the nucleotide sequence selected from SEQ ID NO: 1458 and (ii) an antisense strand forming a duplex with the sense strand of (i) and having 18 contiguous nucleotides differing by no more than one, two or three nucleotides from the nucleotide sequence selected from SEQ ID NO: 2604. In some embodiments, the dsRNA includes (i) a sense strand having 19 contiguous nucleotides differing by no more than one, two or three nucleotides from the nucleotide sequence selected from SEQ ID NO: 1458 and (ii) an antisense strand forming a duplex with the sense strand of (i) and having 19 contiguous nucleotides differing by no more than one, two or three nucleotides from the nucleotide sequence selected from SEQ ID NO: 2604. In some embodiments, the dsRNA includes (i) a sense strand having 20 contiguous nucleotides differing by no more than one, two or three nucleotides from the nucleotide sequence selected from SEQ ID NO: 1458 and (ii) an antisense strand forming a duplex with the sense strand of (i) and having 20 contiguous nucleotides differing by no more than one, two or three nucleotides from the nucleotide sequence selected from SEQ ID NO: 2604. In some embodiments, the dsRNA includes (i) a sense strand having 21 contiguous nucleotides differing by no more than one, two or three nucleotides from the nucleotide sequence selected from SEQ ID NO: 1458 and (ii) an antisense strand forming a duplex with the sense strand of (i) and having 21 contiguous nucleotides differing by no more than one, two or three nucleotides from the nucleotide sequence selected from SEQ ID NO: 2604.

[0818] In some embodiments, the dsRNA includes (i) a sense strand having 15 contiguous nucleotides differing by no more than one, two or three nucleotides from the nucleotide sequence selected from SEQ ID NO: 1460 and (ii) an antisense strand forming a duplex with the sense strand of (i) and having 15 contiguous nucleotides differing by no more than one, two or three nucleotides from the nucleotide sequence selected from SEQ ID NO: 2605. In some embodiments, the dsRNA includes (i) a sense strand having 16 contiguous nucleotides differing by no more than one, two or three from the nucleotide sequence selected from SEQ ID NO: 1460 and (ii) an antisense strand forming a duplex with the sense strand of (i) and having 16 contiguous nucleotides differing by no more than one, two or three nucleotides from the nucleotide sequence selected from SEQ ID NO: 2605. In some embodiments, the dsRNA includes (i) a sense strand having 17 contiguous nucleotides differing by no more than one, two or three nucleotides from the nucleotide sequence selected from SEQ ID NO: 1460 and (ii) an antisense strand forming a duplex with the sense strand of (i) and having 17 contiguous nucleotides differing by no more than one, two or three nucleotides from the nucleotide sequence selected from SEQ ID NO: 2605. In some embodiments, the dsRNA includes (i) a sense strand having 18 contiguous nucleotides differing by no more than one, two or three nucleotides from the nucleotide sequence selected from SEQ ID NO: 1460 and (ii) an antisense strand forming a duplex with the sense strand of (i) and having 18 contiguous nucleotides differing by no more than one, two or three nucleotides from the nucleotide sequence selected from SEQ ID NO: 2605. In some embodiments, the dsRNA includes (i) a sense strand having 19 contiguous nucleotides differing by no more than one, two or three nucleotides from the nucleotide sequence selected from SEQ ID NO: 1460 and (ii) an antisense strand forming a duplex with the sense strand of (i) and having 19 contiguous nucleotides differing by no more than one, two or three nucleotides from the nucleotide sequence selected from SEQ ID NO: 2605. In some embodiments, the dsRNA includes (i) a sense strand having 20 contiguous nucleotides differing by no more than one, two or three nucleotides from the nucleotide sequence selected from SEQ ID NO: 1460 and (ii) an antisense strand forming a duplex with the sense strand of (i) and having 20 contiguous nucleotides differing by no more than one, two or three nucleotides from the nucleotide sequence selected from SEQ ID NO: 2605. In some embodiments, the dsRNA includes (i) a sense strand having 21 contiguous nucleotides differing by no more than one, two or three nucleotides from the nucleotide sequence selected from SEQ ID NO: 1460 and (ii) an antisense strand forming a duplex with the sense strand of (i) and having 21 contiguous nucleotides differing by no more than one, two or three nucleotides from the nucleotide sequence selected from SEQ ID NO: 2605.

[0819] In certain aspects, when a sense strand or an antisense strand of a dsRNA in above paragraphs is differing by a certain number of nucleotides (e.g., one, two or three nucleotides) from a specific sequence (e.g., SEQ ID NOs: 1294 to 1301, 1448 to 1477, 1481 to 1482, and 2600 to 2605), it is meant by that the sense strand or the antisense strand includes one, two or three nucleotides, having different nucleobases and/or different modifications compared to the nucleobases and/or the modifications of the nucleotides at the corresponding positions of the specific sequence (e.g., SEQ ID NOs: 1294 to 1301, 1448 to 1477, 1481 to 1482, and 2600 to 2605). In some embodiments, when a sense strand or an antisense strand is differing by a certain number of nucleotides (e.g., one, two or three nucleotides) from a specific sequence (e.g., SEQ ID NOs: 1294 to 1301, 1448 to 1477, 1481 to 1482, and 2600 to 2605), the sense strand or the antisense strand includes one, two, or three nucleotides, having different nucleobases compared to the nucleobases of the nucleotides at the corresponding positions of the specific sequence (e.g., SEQ ID NOs: 1294 to 1301, 1448 to 1477, 1481 to 1482, and 2600 to 2605). In some embodiments, when a sense strand or an antisense strand is differing by a certain number of nucleotides (e.g., one, two or three nucleotides) from a specific sequence (e.g., SEQ ID NOs: 1294 to 1301, 1448 to 1477, 1481 to 1482, and 2600 to 2605), the sense strand or the antisense strand includes one, two, or three nucleotides, having different modifications compared to the modifications of the nucleotides at the corresponding positions of the specific sequence (e.g., SEQ ID NOs: 1294 to 1301, 1448 to 1477, 1481 to 1482, and 2600 to 2605). In some embodiments, when a sense strand or an antisense strand is differing by a certain number of nucleotides (e.g., one, two or three nucleotides) from a specific sequence (e.g., SEQ ID NOs: 1294 to 1301, 1448 to 1477, 1481 to 1482, and 2600 to 2605), the sense strand or the antisense strand includes one, two, or three nucleotides having different nucleobases and different modifications compared to the nucleobases and the modifications of the nucleotides at the corresponding positions of the specific sequence (e.g., SEQ ID NOs: 1294 to 1301, 1448 to 1477, 1481 to 1482, and 2600 to 2605).

[0820] In certain aspects, when a sense strand or an antisense strand of a dsRNA in above paragraphs is differing by a certain number of nucleotides (e.g., one, two or three nucleotides) from a specific sequence (e.g., SEQ ID NOs: 1294 to 1301, 1448 to 1477, 1481 to 1482, and 2600 to 2605), it is meant by that the sense strand or the antisense strand includes one, two or three nucleotides, having different nucleobases, different modifications, and/or different phosphate linkages (e.g., phosphorothioate (PS)), compared to the nucleobases, the modifications, and/or the phosphate linkages of the nucleotides at the corresponding positions of the specific sequence (e.g., SEQ ID NOs: 1294 to 1301, 1448 to 1477, 1481 to 1482, and 2600 to 2605). In some embodiments, when a sense strand or an antisense strand is differing by a certain number of nucleotides (e.g., one, two or three nucleotides) from a specific sequence (e.g., SEQ ID NOs: 1294 to 1301, 1448 to 1477, 1481 to 1482, and 2600 to 2605), the sense strand or the antisense strand includes one, two, or three nucleotides, having different phosphate linkages compared to the phosphate linkages of the nucleotides at the corresponding positions of the specific sequence (e.g., SEQ ID NOs: 1294 to 1301, 1448 to 1477, 1481 to 1482, and 2600 to 2605). In some embodiments, when a sense strand or an antisense strand is differing by a certain number of nucleotides (e.g., one, two or three nucleotides) from a specific sequence (e.g., SEQ ID NOs: 1294 to 1301, 1448 to 1477, 1481 to 1482, and 2600 to 2605), the sense strand or the antisense strand includes one, two, or three nucleotides, having different nucleobases and different phosphate linkages compared to the nucleobases and the phosphate linkages of the nucleotides at the corresponding positions of the specific sequence (e.g., SEQ ID NOs: 1294 to 1301, 1448 to 1477, 1481 to 1482, and 2600 to 2605). In some embodiments, when a sense strand or an antisense strand is differing by a certain number of nucleotides (e.g., one, two or three nucleotides) from a specific sequence (e.g., SEQ ID NOs: 1294 to 1301, 1448 to 1477, 1481 to 1482, and 2600 to 2605), the sense strand or the antisense strand includes one, two, or three nucleotides, having different modifications and different phosphate linkages compared to the modifications and the phosphate linkages of the nucleotides at the corresponding positions of the specific sequence (e.g., SEQ ID NOs: 1298 to 1301, 1463 to 1477, and 2600 to 2605). In some embodiments, when a sense strand or an antisense strand is differing by a certain number of nucleotides (e.g., one, two or three nucleotides) from a specific sequence (e.g., SEQ ID NOs: 1294 to 1301, 1448 to 1477, 1481 to 1482, and 2600 to 2605), the sense strand or the antisense strand includes one, two, or three nucleotides having different nucleobases, different modifications, and different phosphate linkages compared to the nucleobases, the modifications, and the phosphate linkages of the nucleotides at the corresponding positions of the specific sequence (e.g., SEQ ID NOs: 1294 to 1301, 1448 to 1477, 1481 to 1482, and 2600 to 2605).

### Ligands

[0821] In an aspect, a ligand including the various chemical and biological moieties, such as a small molecule compound, a peptide, an antibody, a carbohydrate, or an additional nucleic acid with or without a linker, can be coupled or conjugated to a dsRNA as described herein. In certain aspects, the ligand may directly (e.g., covalently) conjugated to at least one strand of the dsRNA.

[0822] In certain aspects, the ligand may be conjugated via a linker thereof (e.g., covalent linker) to a sense strand. In some embodiments, the ligand may be conjugated via a linker (e.g., covalent linker, or by forming a phosphate or phosphorothioate linkage) to one or more nucleotides in the sense strand. In some embodiments, the ligand may be conjugated via a linker (e.g., covalent linker, or by forming a phosphate or phosphorothioate linkage) to 5′ end of the sense strand. In some embodiments, the ligand may be conjugated via a linker (e.g., covalent linker, or by forming a phosphate or phosphorothioate linkage) to 3′ end of the sense strand. In some embodiments, the ligand may be conjugated via a linker (e.g., covalent linker, or by forming a phosphate or phosphorothioate linkage) to 5′ carbon of the first nucleotide from the 5′ end. In some embodiments, the ligand may be conjugated via a linker (e.g., covalent linker, or by forming a phosphate or phosphorothioate linkage) to 3′ carbon of the first nucleotide from the 3′ end.

[0823] In certain aspects, the ligand may be conjugated via a linker (e.g., covalent linker) to an antisense strand. In some embodiments, the ligand may be conjugated via a linker (e.g., covalent linker, or by forming phosphate or phosphorothioate linkage) to one or more nucleotides of an antisense strand. In some embodiments, the ligand may be conjugated via a linker (e.g., covalent linker, or by forming phosphate or phosphorothioate linkage) to 5′ end of an antisense strand. In some embodiments, the ligand may be conjugated via a linker (e.g., covalent linker, or by forming phosphate or phosphorothioate linkage) to 3′ end of an antisense strand. In some embodiments, the ligand may be conjugated via a linker (e.g., covalent linker, or by forming phosphate or phosphorothioate linkage) to 5′ carbon of the first nucleotide from the 5′ end. In some embodiments, the ligand may be conjugated via a linker (e.g., covalent linker, or by forming phosphate or phosphorothioate linkage) to 3′ carbon of the first nucleotide from the 3′ end.

[0824] In some embodiments, when the linker forms a phosphate or phosphorothioate linkage, one or more oxygens in the phosphate or phosphorothioate group may be provided from the conjugating nucleotide and/or the ligand. In some embodiments, the linker forms a phosphate or phosphorothioate linkage including the oxygen atom from hydroxyl group of the first nucleotide (e.g., 5′-OH at 5′ end, or 3′-OH from the 3′-end). In some embodiments, the linker forms a phosphate or phosphorothioate linkage including the oxygen atom from the ligand (e.g., terminal group containing oxygen). In some embodiments, the linker forms a phosphate or phosphorothioate linkage including the oxygen atom from hydroxyl group of the first nucleotide (e.g., 5′-OH at 5′ end, or 3′-OH from the 3′-end) and the oxygen atom from the ligand (e.g., terminal group containing oxygen).

[0825] In certain aspects, the linker may be a cleavable chemical moiety which is sufficiently stable outside the cell but which upon is spontaneously and/or irreversibly cleaved to release one or more conjugated groups (e.g., targeting moiety) when introduced in a cell or other physiological conditions (e.g., serum, or blood). In some embodiments, the cleavable linker may include a cleavage site at its terminal part that is attached to other compounds or molecules. In some embodiments, the cleavable linker may include a cleavage site that locates between the two-terminus attached to each different compound or molecule.

[0826] In certain aspects, the linker may be a non-cleavable linker. In certain aspects, the linker may be a hydrolysable linker.

[0827] A choice of the ligand may provide an enhanced affinity and/or delivery of the dsRNA to a specific target biomolecule, cell, tissue, organ compartment, or organ or region of a body. In certain aspects, the ligand may include a targeting moiety or group which bind to a specific organ cell, e.g., liver or kidney cell. In some embodiments, the ligand may include a targeting moiety or group which bind to a specific cell type, e.g., a cancer cell, endothelial cell, or bone cell. In certain aspects, the ligand may include a targeting moiety to hormones and hormone receptors. In certain aspects, the ligand may include a targeting moiety including a lipid component (e.g., short/long chain fatty acid, cationic lipid, lipophilic molecule, cholesterol, steroid, uvaol, hecigenin, diosgenin, terpene, triterpene, sarsasapogenin, friedelin, epifriedelanol-derivatized lithocholic acid, etc.) to modulate or control the binding, to increase resistance to degradation, or to increase targeting or transport into a target cell membrane or cellular lipid vesicles.

[0828] Non limiting examples of ligands may include, but not be limited to, proteins (e.g., thyrotropin, melanotropin, lectin, glycoprotein such as transferrin, or surfactant protein A), carbohydrates (e.g., mucin carbohydrate, multivalent lactose, multivalent galactose, N-acetyl-galactosamine, N-acetyl-glucosamine, multivalent mannose, multivalent fucose, glycosylated polyaminoacids, or multivalent galactose), small molecule drugs (e.g., bisphosphonate), polymers (e.g., PEG (e.g., PEG-40K), MPEG, [MPEG]2, polyglutamate, or polyaspartate), a lipid component (e.g., cholesterol, a steroid, bile acid, cholic acid, adamantane acetic acid, 1-pyrene butyric acid, dihydrotestosterone, 1,3-bis-O(hexadecyl)glycerol, geranyloxyhexyl group, hexadecylglycerol, borneol, menthol, 1,3-propanediol, heptadecyl group, palmitic acid, myristic acid, 03-(oleoyl)lithocholic acid, or 03-(oleoyl)cholenic acid), organic compounds (e.g., dimethoxytrityl, or phenoxazine), vitamins (e.g., folate, vitamin B12, or biotin), small peptides (e.g., antennapedia peptide, TAT peptide, RGD peptide, an RGD peptide mimetic), an additional nucleic acids (e.g., an aptamer), dyes, intercalating agents (e.g., acridines), cross-linkers (e.g., psoralene, mitomycin C), porphyrins (TPPC4, texaphyrin, Sapphyrin), polycyclic aromatic hydrocarbons (e.g., phenazine, dihydrophenazine), artificial endonucleases or a chelator (e.g., EDTA), radiolabeled markers, enzymes, or the like.

[0829] In some embodiments, the ligand may include carbohydrates (e.g., mucin carbohydrate, multivalent lactose, multivalent galactose, N-acetyl-galactosamine, N-acetyl-glucosamine multivalent mannose, multivalent fucose, glycosylated polyaminoacids, or multivalent galactose) as the targeting moiety. In some embodiments, the ligand may include multivalent lactose or multivalent galactose. In some embodiments, the ligand may include N-acetyl-galactosamine as the targeting moiety.

[0830] In certain aspects, the ligand may include one or more diagnostic compound, reporter group, cross-linking agent, nuclease-resistance conferring moiety, modified or unmodified nucleobase, lipophilic molecule, cholesterol, lipid, lectin, steroid, uvaol, hecigenin, diosgenin, terpene, triterpene, sarsasapogenin, friedelin, epifriedelanol-derivatized lithocholic acid, vitamin, carbohydrate, dextran, pullulan, chitin, chitosan, synthetic carbohydrate, oligo lactate (e.g., 15-mer), natural polymer, low- or medium-molecular weight polymer, inulin, cyclodextrin, hyaluronic acid, protein, protein-binding agent, integrin-targeting molecule, polycationic, peptide, polyamine, peptide mimic, and/or transferrin.

[0831] In certain aspects, the ligand targets a specific receptor on a cell (e.g., liver cell or kidney cell). In some embodiments, the ligand targets a cell surface protein, e.g., asialoglycoprotein receptor (ASGPR), which is abundantly expressed on liver cells (hepatocytes). In some embodiments, for targeting ASGPR, the ligand may include one or more selected from carbohydrate (e.g., pyranose such as glucose or its derivatives (e.g., GluNAc), galactose or its derivatives (e.g., GalNAc), mannose or its derivatives (e.g., mannose-6P)). In some embodiments, the ligand may include a sugar cluster containing two or more sugar moieties (e.g., glucose or its derivatives, galactose or its derivatives (e.g., GalNAc), mannose or its derivatives (e.g., mannose-6P), and etc.). In some embodiments, the ligand may include galactose cluster, e.g., GalNAc cluster, or mannose cluster. In some embodiments, the cluster may be formed by linking or coupling the sugar moieties via one or more covalent linkers.

[0832] In certain aspects, the ligand includes one or more GalNAc moieties. In some embodiments, the ligand includes one GalNAc moiety. In some embodiments, the ligand includes two GalNAc moieties. In some embodiments, the ligand includes three GalNAc moieties. In some embodiments, the ligand may include one or more covalent linkers.

[0833] In certain aspects, the ligand has a structure of Formula (A):

[chemical structure]

or a pharmaceutically acceptable salt thereof, wherein:
[0834] each L¹ is an independently a linker which may be same or different in each occurrence; L² is a linker;
[0835] n is an integer from 1 to 3; and
[0836] [symbol] is an attachment point to the sense strand or the antisense strand, or to a conjugate linker conjugated to the sense strand or the antisense strand.

[0837] In some embodiments, the attachment point is connected to the sense strand or the antisense strand via a direct bond. In some embodiments, the attachment point is connected to the sense strand or the antisense strand via “a conjugate linker” that connects the ligand and one or both strands of dsRNA (e.g., sense strand or antisense strand). In some embodiments, the attachment point is connected to the sense strand or the antisense strand via the conjugate linker that may form a phosphodiester linkage. In some embodiments, the attachment point is connected to the sense strand or the antisense strand via a conjugate linker that may form a phosphorothioate linkage.

[0838] In some embodiments, the attachment point is connected to the sense strand via a phosphodiester linkage at the 3′ end of the sense strand. In some embodiments, the attachment point is connected to the sense strand via a phosphodiester linkage at the 5′ end of the sense strand. In some embodiments, the attachment point is connected to the sense strand via a phosphorothioate group at the 3′ end of the sense strand. In some embodiments, the attachment point is connected to the sense strand via a phosphorothioate group at the 5′ end of the sense strand.

[0839] In some embodiments, the attachment point is connected to the antisense strand via a phosphodiester linkage at the 3′ end of the antisense strand. In some embodiments, the attachment point is connected to the antisense strand via a phosphodiester linkage at the 5′ end of the antisense strand. In some embodiments, the attachment point is connected to the antisense strand via a phosphorothioate group at the 3′ end of the antisense strand. In some embodiments, the attachment point is connected to the antisense strand via a phosphorothioate group at the 5′ end of the antisense strand.

[0840] In certain aspects, each Lⁱ is independently a covalent linker having the formula -L^{1A}-L^{1B}-L^{1C}-L^{1D}-L^{1E}-. Each L^{1A}, L^{1B}, L^{1C}, L^{1D}, and L^{1E} is independently a bond, —O—P(S)(O)—O—, or —O—P(O)(O)—O—, —O—P(S)(O)—, or —O—P(O)(O)—, a substituted or unsubstituted alkylene (e.g., C₁-C₃₀ alkylene, C₁-C₂₅ alkylene, C₁-C₁₂ or C₁-C₈ alkylene), a substituted or unsubstituted heteroalkylene (e.g., 2 to 30 membered heteroalkylene, 2 to 15 membered heteroalkylene, 2 to 12 membered heteroalkylene, or 2 to 8 membered heteroalkylene), a substituted or unsubstituted cycloalkylene (e.g., C₄-C₁₂ cycloalkylene), a substituted or unsubstituted heterocycloalkylene (e.g., 2 to 30 membered, 2 to 15 membered, or 2 to 12 membered heteroalkylene heterocycloalkylene), substituted or unsubstituted arylene (e.g., C₆-C₁₂ arylene), or a substituted or unsubstituted heteroarylene (e.g., 5 to 6 membered heteroarylene). In some embodiments, each L^{1A}, L^{1B}, L^{1C}, L^{1D}, and L^{1E} is independently a bond, a substituted or unsubstituted alkylene (e.g., C₁-C₃₀, C₁-C₁₅, or C₁-C₁₂ alkylene), a substituted or unsubstituted heteroalkylene (e.g., 2 to 12 membered heteroalkylene), substituted or unsubstituted arylene (e.g., phenylene), or substituted or unsubstituted heteroarylene (e.g., pyridylene). In some embodiments, each L^{1A}L^{1B}, L^{1C}, L^{1D}, and L^{1E} is independently a bond, unsubstituted C₁-C₁₂ alkylene, —NHC(O)—, —C(O)NH—, —(CH₂)ₐ₁—O—, —O—(CH₂)ₐ₁—, —(CH₂CH₂O)_{b1}—, —(OCH₂CH₂)_{b1}—, —O—P(S)(O)—O—, or —O—P(O)(O)—O—, and each a1 or b1 is independently an integer from 0 to 12.

[0841] In some embodiments, Li has the following structure:

[chemical structure]

[0842] or a pharmaceutically acceptable salt thereof,
[0843] wherein:
   [0844] each p1, p2, p3, p4, q1, q2, r1, r2, r3 and r4 is independently an integer from 0 to 12;
   [0845] W is —OH or —SH; and
   [0846] Y is —O— or absent.

[0847] In some embodiments, W is —OH. In some embodiments, W is —SH.

[0848] In some embodiments, Y is —O—. In some embodiments, Y is absent.

[0849] In some embodiments, L¹ has the following structure:

[chemical structure]

[0850] or a pharmaceutically acceptable salt thereof.
[0851] p1, p2, p3, p4, q1, q2, r1, r2, r3, r4, and W are as described above.

[0852] In some embodiments, each p1, p2, p3, p4, q1, q2, r1, r2, r3 and r4 is independently an integer from 1 to 6. In some embodiments, each p1, p2, p3, and p4 is independently 2, 3, 4, 5, 6, or 8. In some embodiments, each q1 and q2 is independently 1, 2, 3, or 4. In some embodiments, each r1, r2, r3 and r4 is independently 1, 2, 3, or 4.

[0853] In certain aspects, the ligand includes the following structures (e.g., GalNAc moiety):

[chemical structure]

[0854] or a pharmaceutically acceptable salt thereof,
[0855] wherein each n1, n2, n3, and n4 is independently an integer from 1 to 3.
[0856] Y, W, p1, p2, p3, p4, q1, q2, r1, r2, r3, and r4 are as described above, and “*” is an attachment point to L² in Formula (A).

[0857] In some embodiments, n1 is 1. In some embodiments, n1 is 2. In some embodiments, n1 is 3. In some embodiments, n2 is 1. In some embodiments, n2 is 2. In some embodiments, n2 is 3. In some embodiments, n3 is 1. In some embodiments, n3 is 2. In some embodiments, n3 is 3. In some embodiments, n4 is 1. In some embodiments, n4 is 2. In some embodiments, n4 is 3.

[0858] In some embodiments, the ligand includes the following structure:

[chemical structure]

[0859] or a pharmaceutically acceptable salt thereof,
[0860] wherein L², Y, W, p1, p2, p3, p4, q1, q2, r1, r2, r3, and r4 are as described above and [symbol] is an attachment point to the sense strand or the antisense strand, or to a conjugate linker conjugated to the sense strand or the antisense strand.

[0861] In certain aspects, L² is a covalent linker of the formula -L^{2A}-L^{2B}-L^{2C}-L^{2D}-L^{2E}-. Each L^{2A}, L^{2B}, L^{2C}, L^{2D}, and L^{2E} a bond, —O—P(S)(O)—O—, —O—P(O)(O)—O—, —O—P(S)(O)—, or —O—P(O)(O)—, a substituted or unsubstituted alkylene (e.g., C₁-C₃₀ alkylene, C₁-C₂₅ alkylene, C₁-C₁₂ or C₁-C₈ alkylene), a substituted or unsubstituted heteroalkylene (e.g., 2 to 30 membered heteroalkylene, 2 to 15 membered heteroalkylene, 2 to 12 membered heteroalkylene, or 2 to 8 membered heteroalkylene), a substituted or unsubstituted cycloalkylene (e.g., C₄-C₁₂ cycloalkylene), a substituted or unsubstituted heterocycloalkylene (e.g., 5 to 6 membered heterocycloalkylene), substituted or unsubstituted arylene (e.g., phenylene), or a substituted or unsubstituted heteroarylene (e.g., 5 to 6 membered heteroarylene). In some embodiments, each L^{2A}, L^{2B} L²c L^{2D}, and L^{2E} is independently a bond, substituted or unsubstituted alkylene (e.g., C₁-C₃₀ alkylene, C₁-C₂₅ alkylene, C₁-C₁₂ or C₁-C₅ alkylene), a substituted or unsubstituted heteroalkylene (e.g., 2 to 30 membered, 2 to 15 membered, or 2 to 12 membered heteroalkylene heteroalkylene), or a substituted or unsubstituted heterocycloalkylene (e.g., 5 to 6 membered heterocycloalkylene). In some embodiments, each L^{2A}, L^{2B}, L^{2C}, L^{2D}, and L^{2E} is independently a bond, substituted (e.g., OH-substituted) or unsubstituted C₁-C₁₂ alkylene, —NHC(O)—, —C(O)NH—, —(CH₂)ₐ₂—O—, —O—(CH₂)ₐ₂—, —(CH₂CH₂O)_{b2}—, —(OCH₂CH₂)_{b2}—, —O—P(S)(O)—O—, —O—P(O)(O)—O—, —O—P(S)(O)—, or —O—P(O)(O)—, substituted or unsubstituted cycloalkylene (e.g., cyclohexylene), substituted or unsubstituted heterocycloalkylene (e.g., pyrrolidinyl, pyrazolinyl, pyrazolidinyl, imidazolinyl, imidazolidinyl, piperidinyl, piperazinyl, [1,3]dioxolane, oxazolidinyl, isoxazolidinyl, morpholinyl, thiazolidinyl, isothiazolidinyl, quinoxalinyl, pyridazinonyl, tetrahydrofuryl and decalin) or substituted or unsubstituted arylene (e.g., phenylene). Each a2 or b2 is independently an integer from 1 to 12.

[0862] In some embodiments, L^{2A} is —NHC(O)—, or —C(O)NH—. In some embodiments, L^{2A} is —NHC(O)—.

[0863] In some embodiments, L^{2D} is

[chemical structure]

In some embodiments, L^{2D} is

[chemical structure]

In some embodiments, L^{2D} is

[chemical structure]

In some embodiments, L^{2D} is

[chemical structure]

In some embodiments, L^{2D} is

[chemical structure]

In some embodiments, L^{2D} is —O— or —S—.

[0864] In some embodiments, L^{2E} is a bond. In some embodiments, L^{2E} is —O— or —S—. In some embodiments, L^{2E} is

[chemical structure]

In some embodiments, L^{2E} is

[chemical structure]

In some embodiments, L^{2E} is

[chemical structure]

In some embodiments, L^{2E} is

[chemical structure]

In some embodiments, L^{2E} is

[chemical structure]

In some embodiments,

[chemical structure]

In some embodiments, L^{2E} is

[chemical structure]

[0865] In some embodiments, the ligand includes the following structures (B-1) to (B-6):

[chemical structure]

[0866] or a pharmaceutically acceptable salt thereof,
[0867] wherein each s1, t1, and u1 is independently an integer from 1 to 12, and R¹⁰⁰ is a hydrogen or a substituent (e.g., a side chain of a natural or unnatural amino acid). p1, q1, r1, and b2 are as described above.

[0868] Additional suitable ligands related to the above structures of Formula (B) and its subordinates and synthesis thereof are also described in WO2009/082607, entire contents of which are incorporated herein by reference.

[0869] In some embodiments, Y is —O—. In some embodiments, Y is absent.

[0870] In some embodiments, the ligand includes the following structures (C-1) to (C-3):

[chemical structure]

[0871] or a pharmaceutically acceptable salt thereof,
   [0872] wherein each s2 and t2 is independently an integer from 1 to 12. p2, q2, and r2 are as described above.

[0873] Additional suitable ligands related to the above structures of Formula (C) and its subordinates and synthesis thereof are also described in WO2018/191278, entire contents of which are incorporated herein by reference.

[0874] In some embodiments, the ligand includes the following structure (D):

[chemical structure]

[0875] or a pharmaceutically acceptable salt thereof,
[0876] wherein each s3 and t3 is independently an integer from 1 to 12. p3 and r3 are as described above.

[0877] Additional suitable ligands related to the above structure of Formula (D) and its subordinates and synthesis thereof are also described in WO2014/179620, entire contents of which are incorporated herein by reference.

[0878] In some embodiments, the ligand includes the following structure (E-1) to (E-2):

[chemical structure]

[0879] or a pharmaceutically acceptable salt thereof,
[0880] wherein each s4 is independently an integer from 1 to 12.
[0881] W, p4, and r4 are as described above, a2 is 3 or 4, and [symbol] is an attachment point to the sense strand or the antisense strand, or to a conjugate linker conjugated to the sense strand or the antisense strand.

[0882] In some embodiments, at least one of W is —SH. In some embodiments, at least one of W is —OH.

[0883] Additional suitable ligands related to the above structure of Formula (E) and its subordinates and synthesis thereof are also described in WO2017/174657, entire contents of which are incorporated herein by reference.

[0884] In some embodiments, the ligand includes the following structures:

[chemical structure]

[chemical structure]

[0885] or a pharmaceutically acceptable salt thereof,
[0886] wherein [symbol] is an attachment point to the sense strand or the antisense strand, or to a conjugate linker conjugated to the sense strand or the antisense strand.

[0887] In some embodiments, the ligand has the following structure:

[chemical structure]

[0888] or a pharmaceutically acceptable salt thereof,
[0889] wherein [symbol] is an attachment point to the sense strand or the antisense strand, or to a conjugate linker conjugated to the sense strand or the antisense strand.

[0890] In some embodiments, the ligand has the following structure:

[chemical structure]

[0891] or a pharmaceutically acceptable salt thereof,
[0892] wherein [symbol] is an attachment point to the sense strand or the antisense strand, or to a conjugate linker conjugated to the sense strand or the antisense strand.

[0893] In certain aspects, the ligand has a structure of Formula (F):

[chemical structure]

[0894] or a pharmaceutically acceptable salt thereof,
   [0895] wherein:
   [0896] each L¹¹, L¹², L¹³, L¹⁴, and L¹⁵ is an independently a linker;
   [0897] L² is a linker as described above;
   [0898] [symbol] is an attachment point to the sense strand or the antisense strand, or to a conjugate linker conjugated to the sense strand or the antisense strand.

[0899] In some embodiments, each L¹¹ is independently a covalent linker having the formula -L^{11A}-L^{11B}-L^{11C}-L^{11D}-L^{11E}-. Each L^{11A}, L^{11B}, L^{11C}, L^{11D}, and L^{11E} is independently a bond, substituted or unsubstituted alkylene, or a substituted or unsubstituted heteroalkylene. In some embodiments, each L^{11A}, L^{11B}, L^{11C}, L^{11D}, and L^{11E} is independently a bond, substituted or unsubstituted alkylene (e.g., C₁-C₃₀, C₁-C₁₅, or C₁-C₁₂ alkylene), or a substituted or unsubstituted heteroalkylene (e.g., 2 to 30, 2 to 15 membered, or 2 to 12 membered heteroalkylene. In some embodiments, each L^{11A}, L^{11B}, L^{11C}, L^{11D}, and L^{11E} is independently a bond, unsubstituted C₁₁-C₁₁₂ alkylene, —NHC(O)—, —C(O)NH—, —(CH₂)ₐ₁₁—O—, —O—(CH₂)ₐ₁₁—, —(CH₂CH₂O)_{b11}—, or —(OCH₂CH₂)_{b11}—, and each a11 or b11 is independently an integer from 0 to 12.

[0900] In some embodiments, each L¹² is independently a covalent linker having the formula -L^{12A}-L^{12B}-L^{12C}-L^{12D}-L^{12E}-. Each L^{12A}, L^{12B} L^{12C}, L^{12D}, and L^{12E} is independently a bond, substituted or unsubstituted alkylene, or a substituted or unsubstituted heteroalkylene. In some embodiments, each L^{12A}, L^{12B}, L^{12C}, L^{12D}, and L^{12E} is independently a bond, substituted or unsubstituted alkylene (e.g., C₁-C₃₀, C₁-C₁₅, or C₁-C₁₂ alkylene), or a substituted or unsubstituted heteroalkylene (e.g., 2 to 30, 2 to 15 membered, or 2 to 12 membered heteroalkylene. In some embodiments, each L^{12A}, L^{12B}, L^{12C}, L^{12D}, and L^{12E} is independently a bond, unsubstituted C₁₂-C₁₂₂ alkylene, —NHC(O)—, —C(O)NH—, —(CH₂)ₐ₁₂—O—, —O—(CH₂)ₐ₁₂—, —(CH₂CH₂O)_{b12}—, or —(OCH₂CH₂)_{b12}—, and each a12 or b12 is independently an integer from 0 to 12.

[0901] In some embodiments, each L¹³ is independently a covalent linker having the formula -L^{13A}-L^{13B}-L^{13C}-L^{13D}-L^{13E}-. Each L^{13A}, L^{13B}, L^{13C}, L^{13D}, and L^{13E} is independently a bond, substituted or unsubstituted alkylene, or a substituted or unsubstituted heteroalkylene. In some embodiments, each L^{13A}, L^{13B}, L^{13C}, L^{13D}, and L^{13E} is independently a bond, substituted or unsubstituted alkylene (e.g., C₁-C₃₀, C₁-C₁₅, or C₁-C₁₂ alkylene), or a substituted or unsubstituted heteroalkylene (e.g., 2 to 30, 2 to 15 membered, or 2 to 12 membered heteroalkylene. In some embodiments, each L^{13A}, L^{13B}, L^{13C}, L^{13D}, and L^{13E} is independently a bond, unsubstituted C₁ₐ₁₄-C₁₂ alkylene, —NHC(O)—, —C(O)NH—, —(CH₂)ₐ₁₃—O—, —O—(CH₂)ₐ₁₃—, —(CH₂CH₂O)_{b13}—, or —(OCH₂CH₂)_{b13}—, and each a13 or b13 is independently an integer from 0 to 12.

[0902] In some embodiments, L¹⁴ has the formula -L^{14A}-L^{14B}-L^{14C}-L^{14D}-L^{14E}-. Each L^{14A}L^{14B}, L^{14C}, L^{14D}, and L^{14E} is independently a bond, substituted or unsubstituted alkylene, or a substituted or unsubstituted heteroalkylene. In some embodiments, each L^{14A}, L^{14B}, L^{14C}, L^{14D}, and L^{14E} is independently a bond, unsubstituted C₁-C₁₂ alkylene, —NHC(O)—, —C(O)NH—, —(CH₂)ₐ₁₄—O—, —O—(CH₂)ₐ₁₄—, —(CH₂CH₂O)_{b14}—,or —(OCH₂CH₂)_{b14}—, and each a14 or b14 is independently an integer from 0 to 12. In some embodiments, L¹⁴ is a bond. In some embodiments, L¹⁴ is unsubstituted C₁-C₁₂ alkylene. In some embodiments, L¹⁴ is —C(O)NH—(CH₂)_{z1}, or —NHC(O)—(CH₂)_{z1} wherein z1 is an integer from 0 to 12.

[0903] In some embodiments, L¹⁵ has the formula -L^{15A}-L^{15B}-L^{15C}-L^{15D}-L^{15E}-. Each L^{15A}, L^{15B}, L^{15C}, L^{15D}, and L^{15E} is independently a bond, substituted or unsubstituted alkylene, or a substituted or unsubstituted heteroalkylene. In some embodiments, each L^{15A}, L^{15B}, L^{15C}, L^{15D}, and L^{15E} is independently a bond, unsubstituted C₁-C₁₂ alkylene, —NHC(O)—, —C(O)NH—, —(CH₂)ₐ₁₅—O—, —O—(CH₂)ₐ₁₅—, —(CH₂CH₂O)_{b15}—,or —(OCH₂CH₂)_{b15}—, and each a15 or b15 is independently an integer from 0 to 12. In some embodiments, L¹⁵ is unsubstituted C₁-C₁₂ alkylene. In some embodiments, L¹⁵ is —C(O)NH—(CH₂)_{z2}, or —NHC(O)—(CH₂)_{z2} wherein z2 is an integer from 0 to 12. In some embodiments, L¹⁵ is —C(O)NH— or —NHC(O)—.

[0904] In certain aspects, the ligand includes the following structure:

[chemical structure]

[0905] or a pharmaceutically acceptable salt thereof,
[0906] wherein:
[0907] L² is as described above;
[0908] each p11 and q11 is independently an integer from 0 to 12;
[0909] each z1, z2, and z3 is independently an integer of 0 to 12; and
[0910] [symbol] is an attachment point to the sense strand or the antisense strand, or to a conjugate linker conjugated to the sense strand or the antisense strand.

[0911] In some embodiments, the ligand includes the following structures (F-1-a) to (F-1-c):

[chemical structure]

[0912] or a pharmaceutically acceptable salt thereof,
   [0913] wherein W, p2, q2, z1, z2, and z3 are as described above. z4 is an integer from 0 to 10.

[0914] In some embodiments, the ligand includes the following structures (F-2-a) to (F-2-c):

[chemical structure]

[0915] or a pharmaceutically acceptable salt thereof,
[0916] wherein W, p2, q2, z1, z2 and z3 are as described above. z4 is an integer from 0 to 10.

[0917] In some embodiments, z1 is 0. In some embodiments, z1 is 1. In some embodiments, z1 is 2. In some embodiments, z1 is 3. In some embodiments, z1 is 4. In some embodiments, z2 is 0. In some embodiments, z2 is 1. In some embodiments, z2 is 2. In some embodiments, z2 is 3. In some embodiments, z2 is 4. In some embodiments, z3 is 0. In some embodiments, z3 is 1. In some embodiments, z3 is 2. In some embodiments, z3 is 3. In some embodiments, z3 is 4.

[0918] In some embodiments, the ligand includes the following structure:

[chemical structure]

or a pharmaceutically acceptable salt thereof.

[0919] Additional suitable ligands related to the above structures of Formula (F) and its subordinates and synthesis thereof are also described in WO2011/104169 and WO2008/022309, entire contents of which are incorporated herein by reference.

[0920] In some embodiments, the ligand is coupled or conjugated to the 3′ end of the sense strand. In some embodiments, the ligand is coupled or conjugated to the 5′ end of the sense strand. In some embodiments, the ligand is coupled or conjugated to the 3′ end of the antisense strand. In some embodiments, the ligand is coupled or conjugated to the 5′ end of the antisense strand. In some embodiments, two ligands may be coupled to both sense strand and antisense strand. In some embodiments, the ligand is conjugated to a “non-end” of the sense strand or antisense strand.

[0921] In some embodiments, the ligands may be conjugated to the 3′ end of the sense strand and to the 3′ end of the antisense strand. In some embodiments, the ligands may be conjugated to the 5′ end of the sense strand and to the 3′ end of the antisense strand. In some embodiments, the ligands may be conjugated to a non-end of the sense strand and to the 3′ end of the antisense strand. In some embodiments, the ligands may be conjugated to the 3′ end of the sense strand and to a non-end of the antisense strand. In some embodiments, the ligands may be conjugated to the 5′ end of the sense strand and to a non-end of the antisense strand. In some embodiments, the ligands may be conjugated to a non-end of the sense strand and to a non-end of the antisense strand (e.g., nucleobases).

[0922] In some embodiments, the dsRNAi agent includes the following structure:

[chemical structure]

[0923] or a pharmaceutically acceptable salt thereof,
[0924] wherein W is —OH or —SH.

[0925] In some embodiments, the dsRNAi agent includes the following structure:

[chemical structure]

[0926] or a pharmaceutically acceptable salt thereof,
[0927] wherein W is —OH or —SH, and the sense strand includes any one sense strand selected from SEQ ID NOs: 1-405, 812-1052, 1294-1297, 1434-1440, 1448-1462, and 1481-1482.

[0928] In some embodiments, the RNAi agent includes the following structure:

[chemical structure]

[0929] or a pharmaceutically acceptable salt thereof,
[0930] wherein W is —OH or —SH.

[0931] In some embodiments, the RNAi agent includes the following structure:

[chemical structure]

[0932] or a pharmaceutically acceptable salt thereof,
[0933] wherein W is —OH or —SH, and the sense strand includes any one sense strand selected from SEQ ID NOs: 1-405, 812-1052, 1294-1297, 1434-1440, 1448-1462, and 1481-1482.

[0934] In some embodiments, the RNAi agent includes the following structure:

[chemical structure]

[0935] or a pharmaceutically acceptable salt thereof,
[0936] wherein W is —OH or —SH.

[0937] In some embodiments, the RNAi agent includes the following structure:

[chemical structure]

[0938] or a pharmaceutically acceptable salt thereof,
[0939] wherein W is —OH or —SH, and the antisense strand includes any antisense strand selected from SEQ ID NOs: 406-810, 1053-1293, 1298-1301, 1441-1447, and 1463-1477.

[0940] In some embodiments, the RNAi agent includes the following structure:

[chemical structure]

[0941] or a pharmaceutically acceptable salt thereof,
[0942] wherein W is —OH or —SH.

[0943] In some embodiments, the RNAi agent includes the following structure:

[chemical structure]

[0944] or a pharmaceutically acceptable salt thereof,
[0945] wherein W is —OH or —SH, and the antisense strand includes any antisense strand selected from SEQ ID NOs: 406-810, 1053-1293, 1298-1301, 1441-1447, and 1463-1477.

[0946] In some embodiments, the RNAi agent includes the following structure:

[chemical structure]

or a pharmaceutically acceptable salt thereof,
[0947] wherein W is —OH or —SH.

[0948] In some embodiments, the RNAi agent includes the following structure:

[chemical structure]

[0949] or a pharmaceutically acceptable salt thereof,
   [0950] wherein W is —OH or —SH, and the sense strand includes any one sense strand selected from SEQ ID NOs: 1-405, 812-1052, 1294-1297, 1434-1440, 1448-1462, and 1481-1482.

[0951] In some embodiments, the RNAi agent includes the following structure:

[chemical structure]

[0952] or a pharmaceutically acceptable salt thereof,
   [0953] wherein W is —OH or —SH.

[0954] In some embodiments, the RNAi agent includes the following structure:

[chemical structure]

[0955] or a pharmaceutically acceptable salt thereof,
   [0956] wherein W is —OH or —SH, and the sense strand includes any one sense strand selected from SEQ ID NOs: 1-405, 812-1052, 1294-1297, 1434-1440, 1448-1462, and 1481-1482.

[0957] In some embodiments, the RNAi agent includes the following structure:

[chemical structure]

[0958] or a pharmaceutically acceptable salt thereof,
   [0959] wherein W is —OH or —SH.

[0960] In some embodiments, the RNAi agent includes the following structure:

[chemical structure]

[0961] or a pharmaceutically acceptable salt thereof,
   [0962] wherein W is —OH or —SH, and the antisense strand includes any antisense strand selected from SEQ ID NOs: 406-810, 1053-1293, 1298-1301, 1441-1447, and 1463-1477.

[0963] In some embodiments, the RNAi agent includes the following structure:

[chemical structure]

[0964] or a pharmaceutically acceptable salt thereof,
   [0965] wherein W is —OH or —SH.

[0966] In some embodiments, the RNAi agent includes the following structure:

[chemical structure]

[0967] or a pharmaceutically acceptable salt thereof,
   [0968] wherein W is —OH or —SH, and the antisense strand includes any antisense strand selected from SEQ ID NOs: 406-810, 1053-1293, 1298-1301, 1441-1447, and 1463-1477.

[0969] In some embodiments, the RNAi agent includes the following structure:

[chemical structure]

[0970] or a pharmaceutically acceptable salt thereof,
   [0971] wherein W is —OH or —SH.

[0972] In some embodiments, the RNAi agent includes the following structure:

[chemical structure]

[0973] or a pharmaceutically acceptable salt thereof,
   [0974] wherein W is —OH or —SH, and the sense strand includes any one sense strand selected from SEQ ID NOs: 1-405, 812-1052, 1294-1297, 1434-1440, 1448-1462, and 1481-1482.

[0975] In some embodiments, the RNAi agent includes the following structure:

[chemical structure]

[0976] or a pharmaceutically acceptable salt thereof,
   [0977] wherein W is —OH or —SH.

[0978] In some embodiments, the RNAi agent includes the following structure:

[chemical structure]

[0979] or a pharmaceutically acceptable salt thereof,
   [0980] wherein W is —OH or —SH, and the sense strand includes any one sense strand selected from SEQ ID NOs: 1-405, 812-1052, 1294-1297, 1434-1440, 1448-1462, and 1481-1482.

[0981] In some embodiments, the RNAi agent includes the following structure:

[chemical structure]

[0982] or a pharmaceutically acceptable salt thereof,
   [0983] wherein W is —OH or —SH.

[0984] In some embodiments, the RNAi agent includes the following structure:

[chemical structure]

[0985] or a pharmaceutically acceptable salt thereof,
   [0986] wherein W is —OH or —SH, and the antisense strand includes any antisense strand selected from SEQ ID NOs: 406-810, 1053-1293, 1298-1301, 1441-1447, and 1463-1477.

[0987] In some embodiments, the RNAi agent includes the following structure:

[chemical structure]

[0988] or a pharmaceutically acceptable salt thereof,
   [0989] wherein W is —OH or —SH.

[0990] In some embodiments, the RNAi agent includes the following structure:

[chemical structure]

[0991] or a pharmaceutically acceptable salt thereof,
   [0992] wherein W is —OH or —SH, and the antisense strand includes any antisense strand selected from SEQ ID NOs: 406-810, 1053-1293, 1298-1301, 1441-1447, and 1463-1477.

[0993] In some embodiments, the RNAi agent includes the following structure:

[chemical structure]

[0994] or a pharmaceutically acceptable salt thereof,
   [0995] wherein W is —OH or —SH.

[0996] In some embodiments, the RNAi agent includes the following structure:

[chemical structure]

[0997] or a pharmaceutically acceptable salt thereof,
   [0998] wherein W is —OH or —SH, and the sense strand includes any one sense strand selected from SEQ ID NOs: 1-405, 812-1052, 1294-1297, 1434-1440, 1448-1462, and 1481-1482.

[0999] In some embodiments, the RNAi agent includes the following structure:

[chemical structure]

[1000] or a pharmaceutically acceptable salt thereof,
   [1001] wherein W is —OH or —SH.

[1002] In some embodiments, the RNAi agent includes the following structure:

[chemical structure]

[1003] or a pharmaceutically acceptable salt thereof,
   [1004] wherein W is —OH or —SH, and the sense strand includes any one sense strand selected from SEQ ID NOs: 1-405, 812-1052, 1294-1297, 1434-1440, 1448-1462, and 1481-1482.

[1005] In some embodiments, the RNAi agent includes the following structure:

[chemical structure]

[1006] or a pharmaceutically acceptable salt thereof,
   [1007] wherein W is —OH or —SH.

[1008] In some embodiments, the RNAi agent includes the following structure:

[chemical structure]

[1009] or a pharmaceutically acceptable salt thereof,
   [1010] wherein W is —OH or —SH, and the antisense strand includes any antisense strand selected from SEQ ID NOs: 406-810, 1053-1293, 1298-1301, 1441-1447, and 1463-1477.

[1011] In some embodiments, the RNAi agent includes the following structure:

[chemical structure]

[1012] or a pharmaceutically acceptable salt thereof,
   [1013] wherein W is —OH or —SH.

[1014] In some embodiments, the RNAi agent includes the following structure:

[chemical structure]

[1015] or a pharmaceutically acceptable salt thereof,
   [1016] wherein W is —OH or —SH, and the antisense strand includes any antisense strand selected from SEQ ID NOs: 406-810, 1053-1293, 1298-1301, 1441-1447, and 1463-1477.

[1017] In some embodiments, W is —OH. In some embodiments, W is —SH.

[1018] In certain aspects, the ligand may further include an inverted abasic deoxyribonucleotide (invAb) that may be connected to the sense strand or antisense strand. In some embodiments, the ligand comprises the following structure:

[chemical structure]

[1019] or a pharmaceutically acceptable salt thereof,
   [1020] wherein W is —OH or —SH, and [symbol] is an attachment point to the sense strand or the antisense strand.

[1021] In some embodiments, W is —OH. In some embodiments, W is —SH.

[1022] In certain aspects, the ligand as described above may direct the dsRNAi to a specific cell or tissue, e.g., liver cells. In some embodiments, the ligand may direct the dsRNAi to a liver cell. Examples of dsRNAi agent including the liver targeting ligand (L96) are listed in Table 4.

TABLE 4

| | | | SEQ ID |
|---|---|---|---|
| siRNA | Sequence (5′-3′) | Strand | NO |
| 651 | T005p001G005p001U004pU004pG004pU004pC007pA004pA007pG0 | SS | 1302 |
| | 07pA007pC004pU004pU004pU004pU004pU004pC004pG004pA005p | | |
| | A005px1085 | | |
| | X033U1027p001U007p001C004pG004pA004pA007pA004pA004pA0 | AS | 1306 |
| | 04pG004pU004pC004pU004pU007pG004pA007pC004pA004pA004p | | |
| | C004pA004p001U004p001U004 | | |
| 652 | T005p001T005p001G004pC004pA004pG004pA007pU004pG007pC0 | SS | 1303 |
| | 07pU007pA004pG004pG004pU004pG004pU004pU004pC004pA005p | | |
| | A005px1085 | | |
| | X033U1027p001U007p001G004pA004pA004pC007pA004pC004pC0 | AS | 1307 |
| | 04pU004pA004pG004pC004pA007pU004pC007pU004pG004pC004p | | |
| | A004pA004p001A004p001C004 | | |
| 653 | T005p001C005*p001A004pA004pG004pA004pC007pU004pU007pU | SS | 1304 |
| | 007pU007pU004pC004pG004pA004pA004pU004pG004pC004pA005 | | |
| | pA005px1085 | | |
| | X033U1027p001U007p001G004pC004pA1016pU004pU004pC004pG | AS | 1308 |
| | 004pA004pA004pA004pA004pA007pG004pU007pC004pU004pU004 | | |
| | pG004pA004p001C004p001A004 | | |
| 654 | T005p001T005p001G004pC004pA004pG004pA007pU004pG007pC0 | SS | 1305 |
| | 07pU007pA004pG004pG004pU004pG004pU004pU004pC004pA005p | | |
| | T005px1085 | | |
| | A004p001U007p001G004pA004pA004pC007pA004pC004pC004pU0 | AS | 1309 |
| | 04pA004pG004pC004pA007pU004pC007pU004pG004pC004pA004p | | |
| | A004p001A004p001C004 | | |

X1085: L96

[chemical structure]

[1023] Combinations of dsRNA and ligands as described herein are not limited to the examples and embodiments discussed above.

[1024] In some embodiments, a double stranded RNAi agent including:
[1025] (i) a sense strand including a nucleotide sequence of SEQ ID NO: 1302; and
[1026] (ii) an antisense strand including a nucleotide sequence of SEQ ID NO: 1306,
[1027] wherein the ligand (L96) is conjugated to 3′ end of the sense strand to form the following schematic

[chemical structure]

[1028] or a pharmaceutically acceptable salt thereof,
   [1029] wherein W is —OH or —SH.

[1030] In some embodiments, W is —OH.

[1031] In some embodiments, a double stranded RNAi agent including:
[1032] (i) a sense strand including a nucleotide sequence of SEQ ID NO: 1303; and
[1033] (ii) an antisense strand including a nucleotide sequence of SEQ ID NO: 1307,
[1034] wherein the ligand (L96) is conjugated to 3′ end of the sense strand to form the following schematic:

[chemical structure]

[1035] or a pharmaceutically acceptable salt,
   [1036] wherein W is —OH or —SH.

[1037] In some embodiments, W is —OH.

[1038] In some embodiments, a double stranded RNAi agent including:
[1039] (i) a sense strand including a nucleotide sequence of SEQ ID NO: 1304; and
[1040] (ii) an antisense strand including a nucleotide sequence of SEQ ID NO: 1308,
[1041] wherein the ligand (L96) is conjugated to 3′ end of the sense strand to form the following schematic:

[chemical structure]

[1042] or a pharmaceutically acceptable salt,
   [1043] wherein W is —OH or —SH

[1044] In some embodiments, W is —OH.

[1045] In some embodiments, a double stranded RNAi agent including:
[1046] (i) a sense strand including a nucleotide sequence of SEQ ID NO: 1305; and
[1047] (ii) an antisense strand including a nucleotide sequence of SEQ ID NO: 1309,
[1048] wherein the ligand (L96) is conjugated to 3′ end of the sense strand to form the following schematic:

[chemical structure]

[1049] or a pharmaceutically acceptable salt,
[1050] wherein W is —OH or —SH.

[1051] In some embodiments, W is —OH.

[1052] In some embodiments, a double stranded RNAi agent including:
[1053] (i) a sense strand including a nucleotide sequence of SEQ ID NO: 1302; and
[1054] (ii) an antisense strand including a nucleotide sequence of SEQ ID NO: 1306, wherein the ligand (L96) is conjugated to 3′ end of the sense strand to form the following schematic:

[chemical structure]

[1055] or a pharmaceutically acceptable salt,
   [1056] wherein W is —OH.

[1057] In some embodiments, a double stranded RNAi agent including:
[1058] (i) a sense strand including a nucleotide sequence of SEQ ID NO: 1303; and
[1059] (ii) an antisense strand including a nucleotide sequence of SEQ ID NO: 1307,
[1060] wherein the ligand (L96) is conjugated to 3′ end of the sense strand to form the following schematic:

[chemical structure]

[1061] or a pharmaceutically acceptable salt,
[1062] wherein W is —OH.

[1063] In some embodiments, a double stranded RNAi agent including:
[1064] (i) a sense strand including a nucleotide sequence of SEQ ID NO: 1304; and
[1065] (ii) an antisense strand including a nucleotide sequence of SEQ ID NO: 1308,
[1066] wherein the ligand (L96) is conjugated to 3′ end of the sense strand to form the following schematic:

[chemical structure]

[1067] or a pharmaceutically acceptable salt,
[1068] wherein W is —OH.

[1069] In some embodiments, a double stranded RNAi agent including:
[1070] (i) a sense strand including a nucleotide sequence of SEQ ID NO: 1305; and
[1071] (ii) an antisense strand including a nucleotide sequence of SEQ ID NO: 1309,
[1072] wherein the ligand (L96) is conjugated to 3′ end of the sense strand to form the following schematic:

[chemical structure]

[1073] or a pharmaceutically acceptable salt,
[1074] wherein W is —OH.

[1075] In some embodiments, a double stranded RNAi agent including:
[1076] (i) a sense strand including a nucleotide sequence of SEQ ID NO: 1302; and
[1077] (ii) an antisense strand including a nucleotide sequence of SEQ ID NO: 1306,
[1078] wherein the ligand (L96) is conjugated to 5′ end of the sense strand to form the following schematic:

[chemical structure]

[1079] or a pharmaceutically acceptable salt,
[1080] wherein W is —OH or —SH.

[1081] In some embodiments, W is —OH.

[1082] In some embodiments, a double stranded RNAi agent including:
[1083] (i) a sense strand including a nucleotide sequence of SEQ ID NO: 1303; and
[1084] (ii) an antisense strand including a nucleotide sequence of SEQ ID NO: 1307;
[1085] wherein the ligand (L96) is conjugated to 5′ end of the sense strand to form the following schematic:

[chemical structure]

[1086] or a pharmaceutically acceptable salt,
[1087] wherein W is —OH or —SH.

[1088] In some embodiments, W is —OH.

[1089] In some embodiments, a double stranded RNAi agent including:
[1090] (i) a sense strand including a nucleotide sequence of SEQ ID NO: 1304; and
[1091] (ii) an antisense strand including a nucleotide sequence of SEQ ID NO: 1308;
[1092] wherein the ligand (L96) is conjugated to 5′ end of the sense strand to form the following schematic:

[chemical structure]

[1093] or a pharmaceutically acceptable salt,
[1094] wherein W is —OH or —SH.

[1095] In some embodiments, W is —OH.

[1096] In some embodiments, a double stranded RNAi agent including:
[1097] (i) a sense strand including a nucleotide sequence of SEQ ID NO: 1305; and
[1098] (ii) an antisense strand including a nucleotide sequence of SEQ ID NO: 1309,
[1099] wherein the ligand (L96) is conjugated to 5′ end of the sense strand to form the following schematic:

[chemical structure]

[1100] or a pharmaceutically acceptable salt,
[1101] wherein W is —OH or —SH.

[1102] In some embodiments, W is —OH.

[1103] In some embodiments, a double stranded RNAi agent including:
[1104] (i) a sense strand including a nucleotide sequence of SEQ ID NO: 1302; and
[1105] (ii) an antisense strand including a nucleotide sequence of SEQ ID NO: 1306,
[1106] wherein the ligand (L96) is conjugated to 5′ end of the sense strand to form the following schematic:

[chemical structure]

[1107] or a pharmaceutically acceptable salt,
[1108] wherein W is —OH.

[1109] In some embodiments, a double stranded RNAi agent including:
[1110] (i) a sense strand including a nucleotide sequence of SEQ ID NO: 1303, and
[1111] (ii) an antisense strand including a nucleotide sequence of SEQ ID NO: 1307,
[1112] wherein the ligand (L96) is conjugated to 5′ end of the sense strand to form the following schematic:

[chemical structure]

[1113] or a pharmaceutically acceptable salt,
[1114] wherein W is —OH.

[1115] In some embodiments, a double stranded RNAi agent including:
[1116] (i) a sense strand including a nucleotide sequence of SEQ ID NO: 1304, and
[1117] (ii) an antisense strand including a nucleotide sequence of SEQ ID NO: 1308,
[1118] wherein the ligand (L96) is conjugated to 5′ end of the sense strand to form the following schematic:

[chemical structure]

[1119] or a pharmaceutically acceptable salt,
[1120] wherein W is —OH.

[1121] In some embodiments, a double stranded RNAi agent including:
[1122] (i) a sense strand including a nucleotide sequence of SEQ ID NO: 1305; and
[1123] (ii) an antisense strand including a nucleotide sequence of SEQ ID NO: 1309,
[1124] wherein the ligand (L96) is conjugated to 5′ end of the sense strand to form the following schematic:

[chemical structure]

[1125] or a pharmaceutically acceptable salt,
[1126] wherein W is —OH.

[1127] In some embodiments, a double stranded RNAi agent including:
[1128] (i) a sense strand consisting of a nucleotide sequence of SEQ ID NO: 1302; and
[1129] (ii) an antisense strand consisting of a nucleotide sequence of SEQ ID NO: 1306;
[1130] wherein the ligand (L96) is conjugated to 3′ end of the sense strand to form the following schematic:

[chemical structure]

[1131] or a pharmaceutically acceptable salt,
   [1132] wherein W is —OH or —SH.

[1133] In some embodiments, W is —OH.

[1134] In some embodiments, a double stranded RNAi agent including:
[1135] (i) a sense strand consisting of a nucleotide sequence of SEQ ID NO: 1303; and
[1136] (ii) an antisense strand consisting of a nucleotide sequence of SEQ ID NO: 1307;
[1137] wherein the ligand (L96) is conjugated to 3′ end of the sense strand to form the following schematic:

[chemical structure]

[1138] or a pharmaceutically acceptable salt,
[1139] wherein W is —OH or —SH.

[1140] In some embodiments, W is —OH.

[1141] In some embodiments, a double stranded RNAi agent including:
[1142] (i) a sense strand consisting of a nucleotide sequence of SEQ ID NO: 1304; and
[1143] (ii) an antisense strand consisting of a nucleotide sequence of SEQ ID NO: 1308;
[1144] wherein the ligand (L96) is conjugated to 3′ end of the sense strand to form the following schematic:

[chemical structure]

[1145] or a pharmaceutically acceptable salt,
[1146] wherein W is —OH or —SH.

[1147] In some embodiments, W is —OH.

[1148] In some embodiments, a double stranded RNAi agent including:
[1149] (i) a sense strand consisting of a nucleotide sequence of SEQ ID NO: 1305; and
[1150] (ii) an antisense strand consisting of a nucleotide sequence of SEQ ID NO: 1309,
[1151] wherein the ligand (L96) is conjugated to 3′ end of the sense strand to form the following schematic:

[chemical structure]

[1152] or a pharmaceutically acceptable salt.
[1153] wherein W is —OH or —SH.

[1154] In some embodiments, W is —OH.

[1155] In some embodiments, a double stranded RNAi agent including:
[1156] (i) a sense strand consisting of a nucleotide sequence of SEQ ID NO: 1302; and
[1157] (ii) an antisense strand consisting of a nucleotide sequence of SEQ ID NO: 1306,
[1158] wherein the ligand (L96) is conjugated to 3′ end of the sense strand to form the following schematic:

[chemical structure]

[1159] or a pharmaceutically acceptable salt,
[1160] wherein W is —OH.

[1161] In some embodiments, a double stranded RNAi agent including:
[1162] (i) a sense strand consisting of a nucleotide sequence of SEQ ID NO: 1303; and
[1163] (ii) an antisense strand consisting of a nucleotide sequence of SEQ ID NO: 1307,
[1164] wherein the ligand (L96) is conjugated to 3′ end of the sense strand to form the following schematic:

[chemical structure]

[1165] or a pharmaceutically acceptable salt,
[1166] wherein W is —OH.

[1167] In some embodiments, a double stranded RNAi agent including:
[1168] (i) a sense strand consisting of a nucleotide sequence of SEQ ID NO: 1304; and
[1169] (ii) an antisense strand consisting of a nucleotide sequence of SEQ ID NO: 1308,
[1170] wherein the ligand (L96) is conjugated to 3′ end of the sense strand to form the following schematic:

[chemical structure]

[1171] or a pharmaceutically acceptable salt,
[1172] wherein W is —OH.

[1173] In some embodiments, a double stranded RNAi agent including:
[1174] (i) a sense strand consisting of a nucleotide sequence of SEQ ID NO: 1305; and
[1175] (ii) an antisense strand consisting of a nucleotide sequence of SEQ ID NO: 1309,
[1176] wherein the ligand (L96) is conjugated to 3′ end of the sense strand to form the following schematic:

[chemical structure]

[1177] or a pharmaceutically acceptable salt,
[1178] wherein W is —OH.

[1179] In some embodiments, a double stranded RNAi agent including:
[1180] (i) a sense strand consisting of a nucleotide sequence of SEQ ID NO: 1302; and
[1181] (ii) an antisense strand consisting of a nucleotide sequence of SEQ ID NO: 1306,
[1182] wherein the ligand (L96) is conjugated to 5′ end of the sense strand to form the following schematic:

[chemical structure]

[1183] or a pharmaceutically acceptable salt,
[1184] wherein W is —OH or —SH.

[1185] In some embodiments, W is —OH.

[1186] In some embodiments, a double stranded RNAi agent including:
[1187] (i) a sense strand consisting of a nucleotide sequence of SEQ ID NO: 1303; and
[1188] (ii) an antisense strand consisting of a nucleotide sequence of SEQ ID NO: 1307,
[1189] wherein the ligand (L96) is conjugated to 5′ end of the sense strand to form the following schematic:

[chemical structure]

[1190] or a pharmaceutically acceptable salt,
[1191] wherein W is —OH or —SH.

[1192] In some embodiments, W is —OH.

[1193] In some embodiments, a double stranded RNAi agent including:
[1194] (i) a sense strand consisting of a nucleotide sequence of SEQ ID NO: 1304, and
[1195] (ii) an antisense strand consisting of a nucleotide sequence of SEQ ID NO: 1308,
[1196] wherein the ligand (L96) is conjugated to 5′ end of the sense strand to form the following schematic:

[chemical structure]

[1197] or a pharmaceutically acceptable salt,
[1198] wherein W is —OH or —SH.

[1199] In some embodiments, W is —OH.

[1200] In some embodiments, a double stranded RNAi agent including:
[1201] (i) a sense strand consisting of a nucleotide sequence of SEQ ID NO: 1305; and
[1202] (ii) an antisense strand consisting of a nucleotide sequence of SEQ ID NO: 1309,
[1203] wherein the ligand (L96) is conjugated to 5′ end of the sense strand to form the following schematic:

[chemical structure]

[1204] or a pharmaceutically acceptable salt,
[1205] wherein W is —OH or —SH.

[1206] In some embodiments, W is —OH.

[1207] In some embodiments, a double stranded RNAi agent including:
[1208] (i) a sense strand consisting of a nucleotide sequence of SEQ ID NO: 1302; and
[1209] (ii) an antisense strand consisting of a nucleotide sequence of SEQ ID NO: 1306;
[1210] wherein the ligand (L96) is conjugated to 5′ end of the sense strand to form the following schematic:

[chemical structure]

[1211] or a pharmaceutically acceptable salt,
[1212] wherein W is —OH.

[1213] In some embodiments, a double stranded RNAi agent including:
[1214] (i) a sense strand consisting of a nucleotide sequence of SEQ ID NO: 1303; and
[1215] (ii) an antisense strand consisting of a nucleotide sequence of SEQ ID NO: 1307,
[1216] wherein the ligand (L96) is conjugated to 5′ end of the sense strand to form the following schematic:

[chemical structure]

[1217] or a pharmaceutically acceptable salt,
[1218] wherein W is —OH.

[1219] In some embodiments, a double stranded RNAi agent including:
[1220] (i) a sense strand consisting of a nucleotide sequence of SEQ ID NO: 1304; and
[1221] (ii) an antisense strand consisting of a nucleotide sequence of SEQ ID NO: 1308,
[1222] wherein the ligand (L96) is conjugated to 5′ end of the sense strand to form the following schematic:

[chemical structure]

[1223] or a pharmaceutically acceptable salt,
[1224] wherein W is —OH.

[1225] In some embodiments, a double stranded RNAi agent including:
[1226] (i) a sense strand consisting of a nucleotide sequence of SEQ ID NO: 1305; and
[1227] (ii) an antisense strand consisting of a nucleotide sequence of SEQ ID NO: 1309,
[1228] wherein the ligand (L96) is conjugated to 5′ end of the sense strand to form the following schematic:

[chemical structure]

[1229] or a pharmaceutically acceptable salt,
[1230] wherein W is —OH.

[1231] In some embodiments, a double stranded RNAi agent (e.g., siRNA agent) includes:

(i) a sense strand (SS) comprising a nucleotide sequence of
(SEQ ID NO: 1294)
5′-
T005p001G005p001U004pU004pG004pU004pC007pA004pA007pG007pA007pC004pU004
pU004pU004pU004pU004pC004pG004pA005pA005-3′;
(ii) an antisense strand (AS) comprising a nucleotide sequence of
(SEQ ID NO: 1298)
5′-
X033U1027p001U007p001C004pG004pA004pA007pA004pA004pA004pG004pU004pC004
pu004pU007pG004pA007pC004pA004pA004pC004pA004p001U004p001U004-3′;
and
(iii) a ligand (L96),

[1232] wherein:
   [1233] A004 is 2′-O-methyladenosine; U004 is 2′-O-methyluridine; C004 is 2′-O-methylcytidine; G004 is 2′-O-methylguanosine; A005 is 2′-O-methoxyethyl(MOE) adenosine; T005 is 2′-O-methoxyethyl(MOE)thymidine (or 5-methyl uridine); C005* is 2′-O-methoxyethyl(MOE)5-methyl-cytidine; G005 is 2′-O-methoxyethyl (MOE)guanosine; A007 is 2′-fluoroadenosine; U007 is 2′-fluorouridine; C007 is 2′-fluorocytidine; G007 is 2′-fluoroguanosine; X033U1027 is 5′-(E)-vinylphosphonate-2′-O-methyluridine; p is a phosphodiester linkage; and p001 is a phosphorothioate linkage,
[1234] wherein the ligand (L96) is

[chemical structure]

[1235] wherein the ligand is conjugated to 3′ end of the sense strand (SS), e.g., via a phosphodiester or phosphorothioate linkage to form the following schematic:

[chemical structure]

[1236] wherein W is —OH,
[1237] or a pharmaceutically acceptable salt thereof (e.g., sodium salt form).

[1238] In some embodiments, a double stranded RNAi agent (e.g., siRNA agent) includes:

(i) a sense strand (SS) consisting of a nucleotide sequence of:
(SEQ ID NO: 1294)
5′-
T005p001G005p001U004pU004pG004pU004pC007pA004pA007pG007pA007pC004pU004
pU004pU004pU004pU004pC004pG004pA005pA005-3′;
(ii) an antisense strand (AS) consisting of a nucleotide sequence of:
(SEQ ID NO: 1298)
5′-
X033U1027p001U007p001C004pG004pA004pA007pA004pA004pA004pG004pU004pC004
pU004pU007pG004pA007pC004pA004pA004pC004pA004p001U004p001U004-3′;
and
(iii) a ligand (L96),

[1239] wherein:
   [1240] A004 is 2′-O-methyladenosine; U004 is 2′-O-methyluridine; C004 is 2′-O-methylcytidine; G004 is 2′-O-methylguanosine; A005 is 2′-O-methoxyethyl(MOE) adenosine; T005 is 2′-O-methoxyethyl(MOE)thymidine (or 5-methyl uridine); C005* is 2′-O-methoxyethyl(MOE)5-methyl-cytidine; G005 is 2′-O-methoxyethyl (MOE)guanosine; A007 is 2′-fluoroadenosine; U007 is 2′-fluorouridine; C007 is 2′-fluorocytidine; G007 is 2′-fluoroguanosine; X033U1027 is 5′-(E)-vinylphosphonate-2′-O-methyluridine; p is a phosphodiester linkage; and p001 is a phosphorothioate linkage,
[1241] wherein the ligand (L96) is

[chemical structure]

[1242] wherein the ligand is conjugated to 3′ end of the sense strand (SS), e.g., via a phosphodiester or phosphorothioate linkage, to form the following schematic:

[chemical structure]

[1243] wherein W is —OH,
[1244] or a pharmaceutically acceptable salt thereof (e.g., sodium salt form).

[1245] In some embodiments, a double stranded RNAi agent (e.g., siRNA agent) includes:

(i)
a sense strand (SS) comprising a nucleotide sequence of
(SEQ ID NO: 1294)
5′-
T005p001G005p001U004pU004pG004pU004pC007pA004pA007pG007pA007pC004pU004
pU004pU004pU004pU004pC004pG004pA005pA005-3′;
(ii) an antisense strand (AS) comprising a nucleotide sequence of
(SEQ ID NO: 1298)
5′-
X033U1027p001U007p001C004pG004pA004pA007pA004pA004pA004pG004pU004pC004
pU004pU007pG004pA007pC004pA004pA004pC004pA004p001U004p001U004-3′;
and
(iii) a ligand (L96),

[1246] wherein:
   [1247] A004 is 2′-O-methyladenosine; U004 is 2′-O-methyluridine; C004 is 2′-O-methylcytidine; G004 is 2′-O-methylguanosine; A005 is 2′-O-methoxyethyl(MOE) adenosine; T005 is 2′-O-methoxyethyl(MOE)thymidine (or 5-methyl uridine); C005* is 2′-O-methoxyethyl(MOE)5-methyl-cytidine; G005 is 2′-O-methoxyethyl(MOE)guanosine; A007 is 2′-fluoroadenosine; U007 is 2′-fluorouridine; C007 is 2′-fluorocytidine; G007 is 2′-fluoroguanosine; X033U1027 is 5′-(E)-vinylphosphonate-2′-O-methyluridine; p is a phosphodiester linkage; and p001 is a phosphorothioate linkage,
[1248] wherein the ligand (L96) is

[chemical structure]

[1249] wherein the ligand is conjugated to 3′ end of the sense strand (SS) via a phosphodiester linkage to form the following schematic:

[chemical structure]

[1250] or a pharmaceutically acceptable salt thereof (e.g., sodium salt form).

[1251] In some embodiments, a double stranded RNAi agent (e.g., siRNA agent) includes:

(i) a sense strand (SS) consisting of a nucleotide sequence of:
(SEQ ID NO: 1294)
5′-
T005p001G005p001U004pU004pG004pU004pC007pA004pA007pG007pA007pC004pU004
pU004pU004pU004pU004pC004pG004pA005pA005-3′;
(ii) an antisense strand (AS) consisting of a nucleotide sequence of:
(SEQ ID NO: 1298)
5′-
X033U1027p001U007p001C004pG004pA004pA007pA004pA004pA004pG004pU004pC004
pU004pU007pG004pA007pC004pA004pA004pC004pA004p001U004p001U004-3′;
and
(iii) a ligand (L96),

[1252] wherein:
   [1253] A004 is 2′-O-methyladenosine; U004 is 2′-O-methyluridine; C004 is 2′-O-methylcytidine; G004 is 2′-O-methylguanosine; A005 is 2′-O-methoxyethyl(MOE) adenosine; T005 is 2′-O-methoxyethyl(MOE)thymidine (or 5-methyl uridine); C005* is 2′-O-methoxyethyl(MOE)5-methyl-cytidine; G005 is 2′-O-methoxyethyl (MOE)guanosine; A007 is 2′-fluoroadenosine; U007 is 2′-fluorouridine; C007 is 2′-fluorocytidine; G007 is 2′-fluoroguanosine; X033U1027 is 5′-(E)-vinylphosphonate-2′-O-methyluridine; p is a phosphodiester linkage; and p001 is a phosphorothioate linkage,
[1254] wherein the ligand (L96) is

[chemical structure]

[1255] wherein the ligand is conjugated to 3′ end of the sense strand (SS) via a phosphodiester linkage to form the following schematic:

[chemical structure]

[1256] or a pharmaceutically acceptable salt thereof (e.g., sodium salt form).

[1257] In some embodiments, a double stranded RNAi agent includes:

(i) a sense strand (SS) comprising a nucleotide sequence of
(SEQ ID NO: 1302)
5′-
T005p001G005p001U004pU004pG004pU004pC007pA004pA007pG007pA007pC004pU004
pU004pU004pU004pU004pC004pG004pA005pA005px1085-3′;
and
(ii) an antisense strand (AS) comprising a nucleotide sequence of
(SEQ ID NO: 1306)
5′-
X033U1027p001U007p001C004pG004pA004pA007pA004pA004pA004pG004pU004pC004
pU004pU007pG004pA007pC004pA004pA004pC004pA004p001U004p001U004-3′;

[1258] wherein:
   [1259] A004 is 2′-O-methyladenosine; U004 is 2′-O-methyluridine; C004 is 2′-O-methylcytidine; G004 is 2′-O-methylguanosine; A005 is 2′-O-methoxyethyl(MOE) adenosine; T005 is 2′-O-methoxyethyl(MOE)thymidine (or 5-methyl uridine); C005* is 2′-O-methoxyethyl(MOE)5-methyl-cytidine; G005 is 2′-O-methoxyethyl (MOE)guanosine; A007 is 2′-fluoroadenosine; U007 is 2′-fluorouridine; C007 is 2′-fluorocytidine; G007 is 2′-fluoroguanosine; X033U1027 is 5′-(E)-vinylphosphonate-2′-O-methyluridine; p is a phosphodiester linkage; p001 is a phosphorothioate linkage; and X1085 is a ligand (L96),
[1260] wherein the ligand (L96) is

[chemical structure]

[1261] wherein the dsRNAi has the following schematic:

[chemical structure]

[1262] or a pharmaceutically acceptable salt thereof (e.g., sodium salt form).

[1263] In some embodiments, a double stranded RNAi agent includes:

(i) a sense strand (SS) consisting of a nucleotide sequence of
(SEQ ID NO: 1302)
5′-
T005p001G005p001U004pU004pG004pU004pC007pA004pA007pG007pA007pC004pU004
pU004pU004pU004pU004pC004pG004pA005pA005px1085-3′;
and
(ii) an antisense strand (AS) consisting of a nucleotide sequence of
(SEQ ID NO: 1306)
5′-
X033U1027p001U007p001C004pG004pA004pA007pA004pA004pA004pG004pU004pC004
pU004pU007pG004pA007pC004pA004pA004pC004pA004p001U004p001U004-3′;

[1264] wherein:
   [1265] A004 is 2′-O-methyladenosine; U004 is 2′-O-methyluridine; C004 is 2′-O-methylcytidine; G004 is 2′-O-methylguanosine; A005 is 2′-O-methoxyethyl(MOE) adenosine; T005 is 2′-O-methoxyethyl(MOE)thymidine (or 5-methyl uridine); C005* is 2′-O-methoxyethyl(MOE)5-methyl-cytidine; G005 is 2′-O-methoxyethyl (MOE)guanosine; A007 is 2′-fluoroadenosine; U007 is 2′-fluorouridine; C007 is 2′-fluorocytidine; G007 is 2′-fluoroguanosine; X033U1027 is 5′-(E)-vinylphosphonate-2′-O-methyluridine; p is a phosphodiester linkage; p001 is a phosphorothioate linkage; and X1085 is a ligand (L96),
[1266] wherein the ligand (L96) is

[chemical structure]

[1267] wherein the dsRNAi has the following schematic:

[chemical structure]

[1268] or a pharmaceutically acceptable salt thereof (e.g., sodium salt form).

[1269] In some embodiments, a double stranded RNAi agent (e.g., siRNA agent) includes:

(i) a sense strand (SS) comprising
a nucleotide sequence of
(SEQ ID NO: 1295)
5′-T005p001T005p001G004pC004pA004pG004pA007pU
004pG007pC007pU007pA004pG004pG004pU004pG004pU
004pU004pC004pA005pA005-3′;
(ii) an antisense strand (AS) comprising
a nucleotide sequence of
(SEQ ID NO: 1299)
5′-X033U1027p001U007p001G004pA004pA004pC007pA
004pC004pC004pU004pA004pG004pC004pA007pU004pC
007pU004pG004pC004pA004pA004p001A004p001C004-3′;
and
(iii) a ligand (L96),

[1270] wherein:
   [1271] A004 is 2′-O-methyladenosine; U004 is 2′-O-methyluridine; C004 is 2′-O-methylcytidine; G004 is 2′-O-methylguanosine; A005 is 2′-O-methoxyethyl(MOE) adenosine; T005 is 2′-O-methoxyethyl(MOE)thymidine (or 5-methyl uridine); C005* is 2′-O-methoxyethyl(MOE)5-methyl-cytidine; G005 is 2′-O-methoxyethyl (MOE)guanosine; A007 is 2′-fluoroadenosine; U007 is 2′-fluorouridine; C007 is 2′-fluorocytidine; G007 is 2′-fluoroguanosine; X033U1027 is 5′-(E)-vinylphosphonate-2′-O-methyluridine; p is a phosphodiester linkage; and p001 is a phosphorothioate linkage,
[1272] wherein the ligand (L96) is

[chemical structure]

[1273] wherein the ligand is conjugated to 3′ end of the sense strand (SS), e.g., via a phosphodiester or phosphorothioate linkage, to form the following schematic:

[chemical structure]

[1274] wherein W is —OH,
[1275] or a pharmaceutically acceptable salt thereof.

[1276] In some embodiments, a double stranded RNAi agent (e.g., siRNA agent) includes:

(i) a sense strand (SS) consisting of
a nucleotide sequence of
(SEQ ID NO: 1295)
5′-T005p001T005p001G004pC004pA004pG004pA007pU
004pG007pC007pU007pA004pG004pG004pU004pG004pU
004pU004pC004pA005pA005-3′;
(ii) an antisense strand (AS) consisting of
a nucleotide sequence of
(SEQ ID NO: 1299)
5′-X033U1027p001U007p001G004pA004pA004pC007pA
004pC004pC004pU004pA004pG004pC004pA007pU004pC
007pU004pG004pC004pA004pA004p001A004p001C004-3′;
and
(iii) a ligand (L96),

[1277] wherein:
   [1278] A004 is 2′-O-methyladenosine; U004 is 2′-O-methyluridine; C004 is 2′-O-methylcytidine; G004 is 2′-O-methylguanosine; A005 is 2′-O-methoxyethyl(MOE) adenosine; T005 is 2′-O-methoxyethyl(MOE)thymidine (or 5-methyl uridine); C005* is 2′-O-methoxyethyl(MOE)5-methyl-cytidine; G005 is 2′-O-methoxyethyl (MOE)guanosine; A007 is 2′-fluoroadenosine; U007 is 2′-fluorouridine; C007 is 2′-fluorocytidine; G007 is 2′-fluoroguanosine; X033U1027 is 5′-(E)-vinylphosphonate-2′-O-methyluridine; p is a phosphodiester linkage; and p001 is a phosphorothioate linkage,
[1279] wherein the ligand (L96) is

[chemical structure]

[1280] wherein the ligand is conjugated to 3′ end of the sense strand (SS), e.g., via a phosphodiester or phosphorothioate linkage, to form the following schematic:

[chemical structure]

[1281] wherein W is —OH,
[1282] or a pharmaceutically acceptable salt thereof.

[1283] In some embodiments, a double stranded RNAi agent (e.g., siRNA agent) includes:

(i) a sense strand (SS) comprising
a nucleotide sequence of
(SEQ ID NO: 1295)
5′-T005p001T005p001G004pC004pA004pG004pA007pU004
pG007pC007pU007pA004pG004pG004pU004pG004pU004
pU004pC004pA005pA005-3′;
(ii) an antisense strand (AS) comprising
a nucleotide sequence of
(SEQ ID NO: 1299)
5′-X033U1027p001U007p001G004pA004pA004pC007pA
004pC004pC004pU004pA004pG004pC004pA007pU004pC
007pU004pG004pC004pA004pA004p001A004p001C004-3′;
and
(iii) a ligand (L96),

[1284] wherein:
   [1285] A004 is 2′-O-methyladenosine; U004 is 2′-O-methyluridine; C004 is 2′-O-methylcytidine; G004 is 2′-O-methylguanosine; A005 is 2′-O-methoxyethyl(MOE) adenosine; T005 is 2′-O-methoxyethyl(MOE)thymidine (or 5-methyl uridine); C005* is 2′-O-methoxyethyl(MOE)5-methyl-cytidine; G005 is 2′-O-methoxyethyl (MOE)guanosine; A007 is 2′-fluoroadenosine; U007 is 2′-fluorouridine; C007 is 2′-fluorocytidine; G007 is 2′-fluoroguanosine; X033U1027 is 5′-(E)-vinylphosphonate-2′-O-methyluridine; p is a phosphodiester linkage; and p001 is a phosphorothioate linkage,
[1286] wherein the ligand (L96) is

[chemical structure]

[1287] wherein the ligand is conjugated to 3′ end of the sense strand (SS) via a phosphodiester linkage to form the following schematic.

[chemical structure]

[1288] or a pharmaceutically acceptable salt thereof (e.g., sodium salt form).

[1289] In some embodiments, a double stranded RNAi agent (e.g., siRNA agent) includes:

(i) a sense strand (SS) consisting of
a nucleotide sequence of
(SEQ ID NO: 1295)
5′-T005p001T005p001G004pC004pA004pG004pA007pU
004pG007pC007pU007pA004pG004pG004pU004pG004pU
004pU004pC004pA005pA005-3′;
(ii) an antisense strand (AS) consisting of
a nucleotide sequence of
(SEQ ID NO: 1299)
5′-X033U1027p001U007p001G004pA004pA004pC007pA
004pC004pC004pU004pA004pG004pC004pA007pU004pC
007pU004pG004pC004pA004pA004p001A004p001C004-3′;
and
(iii) a ligand (L96),

[1290] wherein:
   [1291] A004 is 2′-O-methyladenosine; U004 is 2′-O-methyluridine; C004 is 2′-O-methylcytidine; G004 is 2′-O-methylguanosine; A005 is 2′-O-methoxyethyl(MOE) adenosine; T005 is 2′-O-methoxyethyl(MOE)thymidine (or 5-methyl uridine); C005* is 2′-O-methoxyethyl(MOE)5-methyl-cytidine; G005 is 2′-O-methoxyethyl (MOE)guanosine; A007 is 2′-fluoroadenosine; U007 is 2′-fluorouridine; C007 is 2′-fluorocytidine; G007 is 2′-fluoroguanosine; X033U1027 is 5′-(E)-vinylphosphonate-2′-O-methyluridine; p is a phosphodiester linkage; and p001 is a phosphorothioate linkage,
[1292] wherein the ligand (L96) is

[chemical structure]

[1293] wherein the ligand is conjugated to 3′ end of the sense strand (SS) via a phosphodiester linkage to form the following schematic:

[chemical structure]

[1294] or a pharmaceutically acceptable salt thereof (e.g., sodium salt form).

[1295] In some embodiments, a double stranded RNAi agent includes:

(i) a sense strand (SS) comprising
a nucleotide sequence of
(SEQ ID NO: 1303)
5′-T005p001T005p001G004pC004pA004pG004pA007pU
004pG007pC007pU007pA004pG004pG004pU004pG004pU
004pU004pC004pA005pA005pX1085-3′;
and
(ii) an antisense strand (AS) comprising
a nucleotide sequence of
(SEQ ID NO: 1307)
5′-X033U1027p001U007p001G004pA004pA004pC007pA
004pC004pC004pU004pA004pG004pC004pA007pU004pC
007pU004pG004pC004pA004pA004p001A004p001C004-3′;

[1296] wherein:
   [1297] A004 is 2′-O-methyladenosine; U004 is 2′-O-methyluridine; C004 is 2′-O-methylcytidine; G004 is 2′-O-methylguanosine; A005 is 2′-O-methoxyethyl(MOE) adenosine; T005 is 2′-O-methoxyethyl(MOE)thymidine (or 5-methyl uridine); C005* is 2′-O-methoxyethyl(MOE)5-methyl-cytidine; G005 is 2′-O-methoxyethyl (MOE)guanosine; A007 is 2′-fluoroadenosine; U007 is 2′-fluorouridine; C007 is 2′-fluorocytidine; G007 is 2′-fluoroguanosine; X033U1027 is 5′-(E)-vinylphosphonate-2′-O-methyluridine; p is a phosphodiester linkage; p001 is a phosphorothioate linkage; and X1085 is a ligand (L96),
[1298] wherein the ligand (L96) is

[chemical structure]

[1299] wherein the dsRNAi has the following schematic:

[chemical structure]

[1300] or a pharmaceutically acceptable salt thereof (e.g., sodium salt form).

[1301] In some embodiments, a double stranded RNAi agent includes:

(i) a sense strand (SS) consisting of
a nucleotide sequence of
(SEQ ID NO: 1303)
5′-T005p001T005p001G004pC004pA004pG004pA007pU
004pG007pC007pU007pA004pG004pG004pU004pG004pU
004pU004pC004pA005pA005px1085-3′;
and
(ii) an antisense strand (AS) consisting of
a nucleotide sequence of
(SEQ ID NO: 1307)
5′-X033U1027p001U007p001G004pA004pA004pC007pA
004pC004pC004pU004pA004pG004pC004pA007pU004pC
007pU004pG004pC004pA004pA004p001A004p001C004-3′;

[1302] wherein:
   [1303] A004 is 2′-O-methyladenosine; U004 is 2′-O-methyluridine; C004 is 2′-O-methylcytidine; G004 is 2′-O-methylguanosine; A005 is 2′-O-methoxyethyl(MOE) adenosine; T005 is 2′-O-methoxyethyl(MOE)thymidine (or 5-methyl uridine); C005* is 2′-O-methoxyethyl(MOE)5-methyl-cytidine; G005 is 2′-O-methoxyethyl (MOE)guanosine; A007 is 2′-fluoroadenosine; U007 is 2′-fluorouridine; C007 is 2′-fluorocytidine; G007 is 2′-fluoroguanosine; X033U1027 is 5′-(E)-vinylphosphonate-2′-O-methyluridine; p is a phosphodiester linkage; p001 is a phosphorothioate linkage; and X1085 is a ligand (L96),
[1304] wherein the ligand (L96) is

[chemical structure]

[1305] wherein the dsRNAi has the following schematic:

[chemical structure]

[1306] or a pharmaceutically acceptable salt thereof (e.g., sodium salt form).

[1307] In some embodiments, a double stranded RNAi agent (e.g., siRNA agent) includes:
[1308] (i) a sense strand (SS) comprising a nucleotide sequence of

(i) a sense strand (SS) comprising
a nucleotide sequence of
(SEQ ID NO: 1451)
5′-T005p001G005p001U004pA004pG004pC004pU007pA
004pC007pA007pA007pU004pG004pu004pU004pG004pU
004pC004pA004p001A005p001A005-3′;
(ii) an antisense strand (AS) comprising
a nucleotide sequence of
(SEQ ID NO: 1466)
5′-X033U1027p001U007p001U004pG004pA004pC007pA
004pA004pC004pA004pU004pU004pG004pU007pA004pG
007pC004pU004pA004pC004pA004p001G004p001A004-3′;
and
(iii) a ligand (L96),

[1309] wherein:
   [1310] A004 is 2′-O-methyladenosine; U004 is 2′-O-methyluridine; C004 is 2′-O-methylcytidine; G004 is 2′-O-methylguanosine; A005 is 2′-O-methoxyethyl(MOE) adenosine; T005 is 2′-O-methoxyethyl(MOE)thymidine (or 5-methyl uridine); C005* is 2′-O-methoxyethyl(MOE)5-methyl-cytidine; G005 is 2′-O-methoxyethyl (MOE)guanosine; A007 is 2′-fluoroadenosine; U007 is 2′-fluorouridine; C007 is 2′-fluorocytidine; G007 is 2′-fluoroguanosine; X033U1027 is 5′-(E)-vinylphosphonate-2′-O-methyluridine; p is a phosphodiester linkage; and p001 is a phosphorothioate linkage,
[1311] wherein the ligand (L96) is

[chemical structure]

[1312] wherein the ligand is conjugated to 3′ end of the sense strand (SS), e.g., via a phosphodiester or phosphorothioate linkage, to form the following schematic:

[chemical structure]

[1313] wherein W is —OH
   [1314] or a pharmaceutically acceptable salt thereof.

[1315] In some embodiments, a double stranded RNAi agent (e.g., siRNA agent) includes:

(i) a sense strand (SS) consisting of
a nucleotide sequence of
(SEQ ID NO: 1451)
5′-T005p001G005p001U004pA004pG004pC004pU007pA
004pC007pA007pA007pU004pG004pU004pU004pG004pU
004pC004pA004p001A005p001A005-3′;
(ii) an antisense strand (AS) consisting of
a nucleotide sequence of
(SEQ ID NO: 1466)
5′-X033U1027p001U007p001U004pG004pA004pC007pA
004pA004pC004pA004pU004pU004pG004pU007pA004pG
007pC004pU004pA004pC004pA004p001G004p001A004-3′;
and
(iii) a ligand (L96),

[1316] wherein:
   [1317] A004 is 2′-O-methyladenosine; U004 is 2′-O-methyluridine; C004 is 2′-O-methylcytidine; G004 is 2′-O-methylguanosine; A005 is 2′-O-methoxyethyl(MOE) adenosine; T005 is 2′-O-methoxyethyl(MOE)thymidine (or 5-methyl uridine); C005* is 2′-O-methoxyethyl(MOE)5-methyl-cytidine; G005 is 2′-O-methoxyethyl (MOE)guanosine; A007 is 2′-fluoroadenosine; U007 is 2′-fluorouridine; C007 is 2′-fluorocytidine; G007 is 2′-fluoroguanosine; X033U1027 is 5′-(E)-vinylphosphonate-2′-O-methyluridine; p is a phosphodiester linkage; and p001 is a phosphorothioate linkage,
[1318] wherein the ligand (L96) is

[chemical structure]

[1319] wherein the ligand is conjugated to 3′ end of the sense strand (SS), e.g., via a phosphodiester or phosphorothioate linkage, to form the following schematic:

[chemical structure]

[1320] wherein W is —OH,
[1321] or a pharmaceutically acceptable salt thereof.

[1322] In some embodiments, a double stranded RNAi agent (e.g., siRNA agent) includes:

(i) a sense strand (SS) comprising
a nucleotide sequence of
(SEQ ID NO: 1451)
5′-T005p001G005p001U004pA004pG004pC004pU007pA
004pC007pA007pA007pU004pG004pU004pU004pG004pU
004pC004pA004p001A005p001A005-3′;
(ii) an antisense strand (AS) comprising
a nucleotide sequence of
(SEQ ID NO: 1466)
5′-X033U1027p001U007p001U004pG004pA004pC007pA
004pA004pC004pA004pU004pU004pG004pU007pA004pG
007pC004pU004pA004pC004pA004p001G004p001A004-3′;
and
(iii) a ligand (L96),

[1323] wherein:
   [1324] A004 is 2′-O-methyladenosine; U004 is 2′-O-methyluridine; C004 is 2′-O-methylcytidine; G004 is 2′-O-methylguanosine; A005 is 2′-O-methoxyethyl(MOE) adenosine; T005 is 2′-O-methoxyethyl(MOE)thymidine (or 5-methyl uridine); C005* is 2′-O-methoxyethyl(MOE)5-methyl-cytidine; G005 is 2′-O-methoxyethyl (MOE)guanosine; A007 is 2′-fluoroadenosine; U007 is 2′-fluorouridine; C007 is 2′-fluorocytidine; G007 is 2′-fluoroguanosine; X033U1027 is 5′-(E)-vinylphosphonate-2′-O-methyluridine; p is a phosphodiester linkage; and p001 is a phosphorothioate linkage,
[1325] wherein the ligand (L96) is

[chemical structure]

[1326] wherein the ligand is conjugated to 3′ end of the sense strand (SS) via a phosphodiester linkage to form the following schematic:

[chemical structure]

[1327] or a pharmaceutically acceptable salt thereof (e.g., sodium salt form).

[1328] In some embodiments, a double stranded RNAi agent (e.g., siRNA agent) includes:

(i) a sense strand (SS) consisting of
a nucleotide sequence of
(SEQ ID NO: 1451)
5′-T005p001G005p001U004pA004pG004pC004pU007pA
004pC007pA007pA007pU004pG004pU004pU004pG004pU
004pC004pA004p001A005p001A005-3′;
(ii) an antisense strand (AS) comprising
a nucleotide sequence of
(SEQ ID NO: 1466)
5′-X033U1027p001U007p001U004pG004pA004pC007pA
004pA004pC004pA004pU004pU004pG004pU007pA004pG
007pC004pU004pA004pC004pA004p001G004p001A004-3′;
and
(iii) a ligand (L96),

[1329] wherein:
   [1330] A004 is 2′-O-methyladenosine; U004 is 2′-O-methyluridine; C004 is 2′-O-methylcytidine; G004 is 2′-O-methylguanosine; A005 is 2′-O-methoxyethyl(MOE) adenosine; T005 is 2′-O-methoxyethyl(MOE)thymidine (or 5-methyl uridine); C005* is 2′-O-methoxyethyl(MOE)5-methyl-cytidine; G005 is 2′-O-methoxyethyl (MOE)guanosine; A007 is 2′-fluoroadenosine; U007 is 2′-fluorouridine; C007 is 2′-fluorocytidine; G007 is 2′-fluoroguanosine; X033U1027 is 5′-(E)-vinylphosphonate-2′-O-methyluridine; p is a phosphodiester linkage; and p001 is a phosphorothioate linkage,
[1331] wherein the ligand (L96) is

[chemical structure]

[1332] wherein the ligand is conjugated to 3′ end of the sense strand (SS) via a phosphodiester linkage to form the following schematic:

[chemical structure]

[1333] or a pharmaceutically acceptable salt thereof (e.g., sodium salt form).

[1334] In some embodiments, a double stranded RNAi agent (e.g., siRNA agent) includes:

(i) a sense strand (SS) comprising
a nucleotide sequence of
(SEQ ID NO: 1456)
5′-A005p001A005p001G004pG004pA004pC004pU007pA
004pA007pC007pA007pU004pA004pA004pA004pA004pU
004pC004pU004p001G005p001T005-3′;
(ii) an antisense strand (AS) comprising
a nucleotide sequence of
(SEQ ID NO: 2601)
5′-X033A1027p001C007p001A042pG004pA004pU007pU
004pU004pU004pA004pU004pG004pU004pU007pA004pG
007pU004pC004pC004pU004pU004p001U004p001A004-3′;
and
(iii) a ligand (L96),

[1335] wherein:
   [1336] A004 is 2′-O-methyladenosine; U004 is 2′-O-methyluridine; C004 is 2′-O-methylcytidine; G004 is 2′-O-methylguanosine; A005 is 2′-O-methoxyethyl(MOE) adenosine; T005 is 2′-O-methoxyethyl(MOE)thymidine (or 5-methyl uridine); C005* is 2′-O-methoxyethyl(MOE)5-methyl-cytidine; G005 is 2′-O-methoxyethyl (MOE)guanosine; A007 is 2′-fluoroadenosine; U007 is 2′-fluorouridine; C007 is 2′-fluorocytidine; G007 is 2′-fluoroguanosine; A042 is TNA with adenine; X033A1027 is 5′-(E)-vinylphosphonate-2′-O-methyladenosine; p is a phosphodiester linkage; and p001 is a phosphorothioate linkage,
[1337] wherein the ligand (L96) is

[chemical structure]

[1338] wherein the ligand is conjugated to 3′ end of the sense strand (SS), e.g., via a phosphodiester or phosphorothioate linkage, to form the following schematic:

[chemical structure]

[1339] wherein W is —OH,
[1340] or a pharmaceutically acceptable salt thereof.

[1341] In some embodiments, a double stranded RNAi agent (e.g., siRNA agent) includes:

(1) a sense strand (SS) consisting of
a nucleotide sequence of
(SEQ ID NO: 1456)
5′-A005p001A005p001G004pG004pA004pC004pU007pA
004pA007pC007pA007pU004pA004pA004pA004pA004pU
004pC004pU004p001G005p001T005-3′;
(ii) an antisense strand (AS) consisting of
a nucleotide sequence of
(SEQ ID NO: 2601)
5′-X033A1027p001C007p001A042pG004pA004pU007pU
004pU004pU004pA004pU004pG004pU004pU007pA004pG
007pU004pC004pC004pU004pU004p001U004p001A004-3′;
and
(iii) a ligand (L96),

[1342] wherein:
   [1343] A004 is 2′-O-methyladenosine; U004 is 2′-O-methyluridine; C004 is 2′-O-methylcytidine; G004 is 2′-O-methylguanosine; A005 is 2′-O-methoxyethyl(MOE) adenosine; T005 is 2′-O-methoxyethyl(MOE)thymidine (or 5-methyl uridine); C005* is 2′-O-methoxyethyl(MOE)5-methyl-cytidine; G005 is 2′-O-methoxyethyl (MOE)guanosine; A007 is 2′-fluoroadenosine; U007 is 2′-fluorouridine; C007 is 2′-fluorocytidine; G007 is 2′-fluoroguanosine; A042 is TNA with adenosine; X033A1027 is 5′-(E)-vinylphosphonate-2′-O-methyladenosine; p is a phosphodiester linkage; and p001 is a phosphorothioate linkage,
[1344] wherein the ligand (L96) is

[chemical structure]

[1345] wherein the ligand is conjugated to 3′ end of the sense strand (SS), e.g., via a phosphodiester or phosphorothioate linkage, to form the following schematic:

[chemical structure]

[1346] wherein W is —OH,
[1347] or a pharmaceutically acceptable salt thereof.

[1348] In some embodiments, a double stranded RNAi agent (e.g., siRNA agent) includes:

(i) a sense strand (SS) comprising
a nucleotide sequence of
(SEQ ID NO: 1456)
5′-A005p001A005p001G004pG004pA004pC004pU007pA
004pA007pC007pA007pU004pA004pA004pA004pA004pU
004pC004pU004p001G005p001T005-3′;
(ii) an antisense strand (AS) comprising
a nucleotide sequence of
(SEQ ID NO: 2601)
5′-X033A1027p001C007p001A042pG004pA004pU007pU
004pU004pU004pA004pU004pG004pU004pU007pA004pG
007pU004pC004pC004pU004pU004p001U004p001A004-3′;
and
(iii) a ligand (L96),

[1349] wherein:
   [1350] A004 is 2′-O-methyladenosine; U004 is 2′-O-methyluridine; C004 is 2′-O-methylcytidine; G004 is 2′-O-methylguanosine; A005 is 2′-O-methoxyethyl(MOE) adenosine; T005 is 2′-O-methoxyethyl(MOE)thymidine (or 5-methyl uridine); C005* is 2′-O-methoxyethyl(MOE)5-methyl-cytidine; G005 is 2′-O-methoxyethyl (MOE)guanosine; A007 is 2′-fluoroadenosine; U007 is 2′-fluorouridine; C007 is 2′-fluorocytidine; G007 is 2′-fluoroguanosine; A042 is TNA with adenosine; X033A1027 is 5′-(E)-vinylphosphonate-2′-O-methyladenosine; p is a phosphodiester linkage; and p001 is a phosphorothioate linkage,
[1351] wherein the ligand (L96) is

[chemical structure]

[1352] wherein the ligand is conjugated to 3′ end of the sense strand (SS) via a phosphodiester linkage to form the following schematic:

[chemical structure]

[1353] or a pharmaceutically acceptable salt thereof (e.g., sodium salt form).

[1354] In some embodiments, a double stranded RNAi agent (e.g., siRNA agent) includes:

(i) a sense strand (SS) consisting of
a nucleotide sequence of
(SEQ ID NO: 1456)
5′-A005p001A005p001G004pG004pA004pC004pU007pA
004pA007pC007pA007pU004pA004pA004pA004pA004pU
004pC004pU004p001G005p001T005-3′;
(ii) an antisense strand (AS) consisting of
a nucleotide sequence of
(SEQ ID NO: 2601)
5′-X033A1027p001C007p001A042pG004pA004pU007pU
004pU004pU004pA004pU004pG004pU004pU007pA004pG
007pU004pC004pC004pU004pU004p001U004p001A004-3′;
and
(iii) a ligand (L96),

[1355] wherein:
   [1356] A004 is 2′-O-methyladenosine; U004 is 2′-O-methyluridine; C004 is 2′-O-methylcytidine; G004 is 2′-O-methylguanosine; A005 is 2′-O-methoxyethyl(MOE) adenosine; T005 is 2′-O-methoxyethyl(MOE)thymidine (or 5-methyl uridine); C005* is 2′-O-methoxyethyl(MOE)5-methyl-cytidine; G005 is 2′-O-methoxyethyl (MOE)guanosine; A007 is 2′-fluoroadenosine; U007 is 2′-fluorouridine; C007 is 2′-fluorocytidine; G007 is 2′-fluoroguanosine; A042 is TNA with adenosine; X033A1027 is 5′-(E)-vinylphosphonate-2′-O-methyladenosine; p is a phosphodiester linkage; and p001 is a phosphorothioate linkage,
[1357] wherein the ligand (L96) is

[chemical structure]

[1358] wherein the ligand is conjugated to 3′ end of the sense strand (SS) via a phosphodiester linkage to form the following schematic:

[chemical structure]

[1359] or a pharmaceutically acceptable salt thereof (e.g., sodium salt form).

[1360] Example compounds including the siRNAs and ligands as described herein are also listed in Table 5 below.

TABLE 5

| | Sequence | | |
|---|---|---|---|
| | Sense Strand | | Modification |
| Compound No. | Antisense Strand | Ligand | Pattern |
| 1 | SEQ ID NO: 1302 | L96 | D |
| | SEQ ID NO: 1306 | | |
| 2 | SEQ ID NO: 1303 | L96 | D |
| | SEQ ID NO: 1307 | | |
| 3 | SEQ ID NO: 1304 | L96 | E |
| | SEQ ID NO: 1308 | | |
| 4 | SEQ ID NO: 2613 | L96 | F |
| | SEQ ID NO: 2612 | | |
| 5 | SEQ ID NO: 284 | XC2000 | G-1 |
| | SEQ ID NO: 689 | | |
| 6 | SEQ ID NO: 284 | XC2000 | G-2 |
| | SEQ ID NO: 689 | | |
| 7 | SEQ ID NO: 284 | XC2000 | H |
| | SEQ ID NO: 689 | | |
| 8 | SEQ ID NO: 1295 | XC2000 | D |
| | SEQ ID NO: 1299 | | |
| 9 | SEQ ID NO: 284 | XC2001 | H |
| | SEQ ID NO: 689 | | |

### Combination

[1361] In an aspect, provided is a combination of a first agent (e.g., HMGCR inhibitor such as dsRNAi agent as described herein) and one or more additional therapeutic agents.

[1362] In an aspect, provided also is a combination of a first agent (e.g., HMGCR inhibitor such as dsRNAi agent as described herein) and a second agent. The term “additional therapeutic agent” and “second agent” may be interchangeably used in the context of their use in combination or combination therapy.

[1363] In certain aspects, the combination includes a first agent including the dsRNAi agent as described herein (e.g., HMGCR siRNA in Tables 1 to 5, 10 and 14-16) and a second agent. In certain aspects, the combination includes a first agent including one or more dsRNAi agents as described in WO2023/009687, WO2004/138105, and WO2024/260434.

[1364] The additional therapeutic agents suitable for the combination with the dsRNAi agents described herein may include a drug or agent that has been used or proven to be useful in treating a disorder of lipid metabolism (e.g., high cholesterol). In certain aspects, pharmaceutical compositions are formulated to administering the dsRNAi agents as described herein for the purpose of a combination with one or more additional therapeutic agents that has been used or proved to be useful in lowering LDL-C in a subject. In certain aspects, the additional therapeutic agent may suitably include selected from a HMGCR small molecule inhibitor (e.g., statins), a proprotein convertase subtilisin kexin 9 (PCSK9) inhibitor, a lysophosphatidic acid (LPA) receptor inhibitor, an angiotensinogen (AGT) inhibitor, a fibrate, a bile acid sequestrant, niacin, an antiplatelet agent, an angiotensin converting enzyme inhibitor, an angiotensin II receptor antagonist, an acyl-CoA cholesterol acetyltransferase (ACAT) inhibitor, a cholesterol absorption inhibitor, a cholesterol ester transfer protein (CETP) inhibitor, a microsomal triglyceride transfer protein (MTTP) inhibitor, a cholesterol modulator, a bile acid modulator, a peroxisome proliferation activated receptor (PPAR) agonist, a gene-based therapy, a composite vascular protectant, a glycoprotein IIb/IIIa inhibitor, aspirin or an aspirin-like compound, an IBAT inhibitor, a squalene synthase inhibitor, a monocyte chemoattractant protein (MCP)-I inhibitor, and a combination thereof.

[1365] In some embodiments, the additional therapeutic agent suitable for the combination with the dsRNAi agents described herein may include a lysophosphatidic acid (LPA) receptor inhibitor. In some embodiments, the additional therapeutic agent may include an angiotensinogen (AGT) inhibitor. In some embodiments, the additional therapeutic agent may include bile sequestering agents (e.g., cholestyramin E). In some embodiments, the additional therapeutic agent includes VLDL secretion inhibitors (e.g., niacin). In some embodiments, the additional therapeutic agent includes lipophilic antioxidants (e.g., Probucol). In some embodiments, the additional therapeutic agent includes acyl-CoA cholesterol acyl transferase inhibitors. In some embodiments, the additional therapeutic agent includes farnesoid X receptor antagonists. In some embodiments, the additional therapeutic agent includes sterol regulatory binding protein cleavage activating protein (SCAP) activators. In some embodiments, the additional therapeutic agent includes microsomal triglyceride transfer protein (MTP) inhibitors. In some embodiments, the additional therapeutic agent includes inhibitors to apolipoproteins (e.g., ApoA1, ApoB, ApoC3, ApoD, ApoE, ApoF, or ApoM). In some embodiments, the additional therapeutic agent includes and therapeutic antibodies against HMGCR. In some embodiments, the additional therapeutic agents may also include agents that raise high density lipoprotein (HDL). In some embodiments, the additional therapeutic agent includes such as cholesteryl ester transfer protein (CETP) inhibitors. In some embodiments, the additional therapeutic agents may also include dietary supplements, e.g., fish oil, and omega-3 oils. In some embodiments, the additional therapeutic agent does not include a HMGCR small molecule inhibitor (e.g., statins). In certain aspects, the additional therapeutic agent or the second agent is a second dsRNAi agent. In certain aspects, the additional therapeutic agent or the second agent is an antisense oligonucleotide (“ASO”) agent.

[1366] In some embodiments, the second dsRNAi agent is a dsRNAi agent or an ASO agent that targets one or more of the genes selected from the group consisting of PCSK9, LPA, AGT, ACE, ACE2, AGTR1, AGTR2, ApoA1, ApoB, ApoC3, ApoD, ApoE, ApoF, ApoM, ACAT, CETP, MTTP, PPAR, IBA T, FDFT1, ERG9, SQS1, Ccl2, CCR2, CCL7, CCL8, CCL13, and CCL16.

[1367] In some embodiments, the second agent is a second dsRNAi agent. In some embodiments, the second dsRNAi agent targets PCSK9 gene. In some embodiments, the second dsRNAi agent targets LPA gene. In some embodiments, the second dsRNAi agent targets AGT gene. In some embodiments, the second dsRNAi agent targets ACE gene. In some embodiments, the second dsRNAi agent targets ACE2 gene. In some embodiments, the second dsRNAi agent targets AGTR1 gene. In some embodiments, the second dsRNAi agent targets ApoA1 gene. In some embodiments, the second dsRNAi agent targets ApoB gene. In some embodiments, the second dsRNAi agent targets ApoC3 gene. In some embodiments, the second dsRNAi agent targets ApoD gene. In some embodiments, the second dsRNAi agent targets ApoE gene. In some embodiments, the second dsRNAi agent targets ApoF gene. In some embodiments, the second dsRNAi agent targets ApoMgene. In some embodiments, the second dsRNAi agent targets AGTR2 gene. In some embodiments, the second dsRNAi agent targets ACATgene. In some embodiments, the second dsRNAi agent targets CETP gene. In some embodiments, the second dsRNAi agent targets MTTP gene. In some embodiments, the second dsRNAi agent targets PPAR gene. In some embodiments, the second dsRNAi agent targets IBAT gene. In some embodiments, the second dsRNAi agent targets FDFT1 gene. In some embodiments, the second dsRNAi agent targets ERG9 gene. In some embodiments, the second dsRNAi agent targets SQS1 gene. In some embodiments, the second dsRNAi agent targets CCL2 gene. In some embodiments, the second dsRNAi agent targets CCR2 gene. In some embodiments, the second dsRNAi agent targets CCL7 gene. In some embodiments, the second dsRNAi agent targets CCL8 gene. In some embodiments, the second dsRNAi agent targets CCL13 gene. In some embodiments, the second dsRNAi agent targets CCL16 gene.

[1368] In some embodiments, the additional therapeutic agent includes the PCSK9 inhibitor. In some embodiments, the PCSK9 inhibitor may be a small molecule, antibody, peptide, or a therapeutic RNA interference agent (e.g., siRNA). In some embodiments, the additional therapeutic agent includes a dsRNAi agent (e.g., siRNA) targeting PCSK9. In some embodiments, the additional therapeutic agent is a second dsRNAi agent.

[1369] In some embodiments, the second dsRNAi agent includes inclisiran (e.g., Leqvio®).

[1370] In some embodiments, the second dsRNAi agent includes a sense strand having a nucleotide sequence of SEQ ID NO: 1478 (5′-csusagacCfuGfudTuugcuuuugu-3′) and an antisense strand having a nucleotide sequence of SEQ ID NO: 1479 (5′-asCfsaAfAfAfgCfaAfaAfcAfgGfuCfuagsasa-3′), wherein a, g, c and u are 2′-O-methyl (2′-OMe) A, G, C, or U; Af, Gf, Cf or Uf are 2′-fluoro A, G, C or U; dT is 2′-deoxythymidine; and s is a phosphorothioate linkage.

[1371] In some embodiments, the second dsRNAi agent includes a sense strand having a nucleotide sequence of SEQ ID NO: 1478 and an antisense strand having a nucleotide sequence of SEQ ID NO: 1479, wherein the sense strand is conjugated to L96 at 3′ end. In some embodiments, the second dsRNAi agent includes a sense strand having a nucleotide sequence of SEQ ID NO: 1480 and an antisense strand having a nucleotide sequence of SEQ ID NO: 1479.

[1372] In some embodiments, the second dsRNAi agent including a sense strand having a nucleotide sequence of SEQ ID NO: 1480 and an antisense strand having a nucleotide sequence of SEQ ID NO: 1479 is a pharmaceutically acceptable salt of inclisiran. In some embodiments, the second dsRNAi agent including a sense strand having a nucleotide sequence of SEQ ID NO: 1480 and an antisense strand having a nucleotide sequence of SEQ ID NO: 1479 is sodium salt of inclisiran.

TABLE 6a-1

| | Sequence (5′-3′) |
|---|---|
| SEQ ID: 1478 | 5′-csusagacCfuGfudTuugcuuuugu-3′ |
| (sense strand) | C004p001U004p001A004pG004pA004pC |
| | 004pC007pU004pG007pU004pT002pU00 |
| | 4pU004pG004pC004pU004pU004pU004p |
| | U004pG004pU004 |
| SEQ ID: 1480 | 5′-csusagacCfuGfudTuugcuuuugu-3′ |
| (sense strand) | C004p001U004p001A004pG004pA004p |
| | C004pC007pU004pG007pU004PT002pU |
| | 004pU004pG004pC004pU004pU004pU0 |
| | 04pU004pG004pU004pX1085 |
| SEQ ID: 1479 | 5′-asCfsaAfAfAfgCfaAfaAfcAfgGfuC |
| (antisense | fuagsasa-3′ |
| strand) | A004p001C007p001A004pA007pA007pA |
| | 007pG004pC007pA004pA007pA004pA00 |
| | 7pC004pA007pG004pG007pU004pC007p |
| | U004pA004pG004p001A004p001A004 |

[1373] Specific codes in the nucleotide sequences are indicated in above, e.g., Tables A and A-1.

[1374] Additional suitable second dsRNAi agent targeting PCSK9 in Table 6a-1, or variants thereof and synthesis thereof are also described in WO2014/089313, entire contents of which are incorporated herein by reference.

[1375] In some embodiment, the second dsRNAi agent may have a structure of

[chemical structure]

[1376] or a pharmaceutically acceptable salt thereof,
[1377] wherein the dsRNA includes any one of PCSK9 siRNA in Table 6a, the dsRNA includes:
   [1378] (i) a sense strand; and
   [1379] (ii) an antisense strand forming a duplex with the sense strand.

TABLE 6a-2

| PCSK9 | | | SEQ ID |
|---|---|---|---|
| SIRNA | Sequence (5′-3′) | Strand | NO |
| 1 | C004p0010004p001A004pG004pA004pC004pC007p0004pG007 | SS | 1488 |
| | pu004pT002pU004pU004pG004pC004pU004p0004pU004pU004 | | |
| | pG004pU004 | | |
| | A004p001C007p001A004pA007pA007pA007pG004pC007pA004 | AS | 1489 |
| | pA007pA004pA007pC004pA007pG004pG007p0004pC007pU004 | | |
| | pA004pG004p001A004p001A004 | | |
| 2 | C004p001U004pA004pG004pA004pC004pC007p0004pG007pU0 | SS | 1490 |
| | 04pT002pU004pU004pG004pC004p0004p0004pU004pU004pG0 | | |
| | 04pU004 | | |
| | A004p001C007p001A004pA007pA007pA007pG004pC007pA004 | AS | 1491 |
| | pA007pA004pA007pC004pA007pG004pG007p0004pC007p0004 | | |
| | pA004pG004p001A004p001A004 | | |
| 3 | C004p001U004p001A004pG004pA004pC004pC007pU004pG007 | SS | 1492 |
| | pU004pT002pU004pU004pG004pC004pU004pU004pU004pU004 | | |
| | pG004pU004 | | |
| | A004p001C007p001A004pA007pA007pA007pG004pC007pA004 | AS | 1493 |
| | pA007pA004pA007pC004pA007pG004pG007pU004pC007pU004 | | |
| | pA004pG004p001A004p001A004 | | |
| 4 | G004p001C004pC004pU004pG000pG000pA000pG000pU004pU0 | SS | 1494 |
| | 04pU004pA000pU004pU004pC004pG000pG000pA000pA000pT0 | | |
| | 02pT002 | | |
| | pU000pU000pC000pC000pG000pA000pA000pU000pA000pA000 | AS | 1495 |
| | pA000pC000pU000pC000pC000pA000pG000pG000pC000pT002 | | |
| | p001T002 | | |
| 5 | G000pC004pC004pU004pG000pG000pA000pG000pU004pU004p | SS | 1496 |
| | U004pA000pU004pU004pC004pG000pG000pA000pA000pT002p | | |
| | T002 | | |
| | pU004pU007pC004pC007pG004pA007pA004pU007pA004pA007 | AS | 1497 |
| | pA004pC007pU004pC007pC004pA007pG004pG007pC004pT002 | | |
| | pT002 | | |
| 6 | G000pC004pC004pU004pG000pG000pA000pG000pU004pU004p | SS | 1498 |
| | U004pA000pU004pU004pC004pG000pG000pA000pT002pT002 | | |
| | pU000pU000pC000pC000pG000pA000pA000pU000pA000pA000 | AS | 1499 |
| | pA000pC000pU000pC000pC000pA000pG000pG000pC000pT002 | | |
| | p001T002 | | |
| 7 | G000pC004pC004pU004pG000pG000pA000pG000pU004pU004p | SS | 1500 |
| | U004pA000pU004pU004pC004pG000pG000pA000pA000pT002p | | |
| | T002 | | |
| | pU000pU000pC000pC000pG000pA000pA000pU000pA000pA000 | AS | 1501 |
| | pA000pC000pU000pC000pC000pA000pG000pG000pC000pT002 | | |
| | p001T002 | | |
| 8 | G000pC004pC004pU004pG000pG000pA000pG000pU004pU004p | SS | 1502 |
| | U004pA000pU004pU004pC004pG000pG000pA000pA000pT002p | | |
| | T002 | | |
| | pU000pU000pC000pC000pG000pA000pA000pU000pA000pA000 | AS | 1503 |
| | pA000pC000pU000pC000pC000pA000pG000pG000pC000pT002 | | |
| | p001T002 | | |
| 9 | G000pC004pC004pU004pG000pG000pA000pG000pU004pU004p | SS | 1504 |
| | U004pA000pU004pU004pC004pG000pG000pA000pA000pT002p | | |
| | T002 | | |
| | pU004pU007pC004pC007pG004pA007pA004pU007pA004pA007 | AS | 1505 |
| | pA004pC007pU004pC007pC004pA007pG004pG007pC004pT002 | | |
| | pT002 | | |
| 10 | G000pC004pC004pU004pG000pG000pA000pG000pU004pU004p | SS | 1506 |
| | U004pA000pU004pU004pC004pG000pG000pA000pA000pT002p | | |
| | 001T002 | | |
| | pU000pU000pC000pC000pG000pA000pA000pU000pA000pA000 | AS | 1507 |
| | pA000pC000pU000pC000pC000pA000pG000pG000pC000pT002 | | |
| | p001T002 | | |
| 11 | G000pC004pC004pU004pG000pG000pA000pG000pU004pU004p | SS | 1508 |
| | U004pA000pU004pU004pC004pG000pG000pA000pA000pT002p | | |
| | 001T002 | | |
| | G000pC004pC004pU004pG000pG000pA000pG000pU004pU004p | AS | 1509 |
| | U004pA000pU004pU004pC004pG000pG000pA000pA000pT002p | | |
| | T002 | | |
| 12 | C004pU004pG007pU004pG007pC004pU004pA007pG007pC004p | SS | 1510 |
| | A002pA007pC004pA007pC004pC004pC004pA004pA004 | | |
| | U004p001U007p001G004pG007pG004pU007pG004pU004pU004 | AS | 1511 |
| | pG004pC007pU007pA004pG007pC004pA007pC004pA007pG004 | | |
| | p001C007p001C004 | | |
| 13 | C004pU004pG007pU004pG007pC004pU004pA007pG007pC004p | SS | 1512 |
| | A002pA007pC004pA004pC004pC004pC004pA004pA004 | | |
| | U004p001U007p001G004G007G004U007G004U004U004G004C0 | AS | 1513 |
| | 07U007A004G005C004A007C004A007G004p001C007p001C004 | | |
| 14 | C004pU004pG007pU004pG007pC004pU004pA007pG007pC004p | SS | 1514 |
| | A002pA007pC004pA004pC004pC004pC004pA004pA004 | | |
| | U004p001U007p001G004pG007pG004pU007pG004pU004pU004 | AS | 1515 |
| | pG004pC007pU007pA004pG007pC004pA007pC004pA007pG004 | | |
| | p001C007p001C004 | | |
| 15 | C004pU004pG007pU004pG007pC004pU004pA007pG007pC004p | SS | 1516 |
| | A002pA007pC004pA004pC004pC004pC004pA004pA004 | | |
| | U004p001U007pG004pG007pG004pU007pG004pU004pU004pG0 | AS | 1517 |
| | 04pC007pU007pA004pG007pC004pA007pC004pA007pG004p00 | | |
| | 1C007p001C004 | | |
| 16 | C004pU004pG007pU004pG007pC004pU004pA007pG007pC004p | SS | 1518 |
| | A002pA007pC004pA004pC004pC004pC004pA004pA004 | | |
| | U004p001U007pG004pG007pG004pU007pG004pU004pU004pG0 | AS | 1519 |
| | 04pC007pU007pA004pG007pC004pA007pC004pA007pG004pC0 | | |
| | 07p001C004 | | |
| 17 | C000pU000pG000pU000pG000pC000pU000pA000pG000pC000p | SS | 1520 |
| | A002pA000pC000pA000pC000pC000pC000pA000pA000 | | |
| | U007pU007pG007pG004pG007pU004pG007pU004pU004pG004p | AS | 1521 |
| | C007pU004pA007pG007pC007pA004pC007pA004pG007pC004p | | |
| | C007 | | |
| 18 | C000pU000pG000pU000pG000pC000pU000pA000pG000pC000p | SS | 1522 |
| | A002pA000pC000pA000pC000pC000pC000pA000pA000 | | |
| | U004U007G007G004G007U004G007U004U004G004C007U004A0 | AS | 1523 |
| | 07G007C007A004C007A004G007C004C007 | | |
| 19 | C000pU000pG000pU000pG000pC000pU000pA000pG000pC000p | SS | 1524 |
| | A002pA000pC000pA000pC000pC000pC000pA000pA000 | | |
| | U007pU004pG007pG004pG007pU004pG007pU004pU004pG004p | AS | 1525 |
| | C007pU004pA007pG007pC007pA004pC007pA004pG007pC004p | | |
| | C007 | | |
| 20 | C000pU000pG000pU000pG000pC000pU000pA000pG000pC000p | SS | 1526 |
| | A002pA000pC000pA000pC000pC000pC000pA000pA000 | | |
| | U007pU007pG004pG004pG007pU004pG007pU004pU004pG004p | AS | 1527 |
| | C007pU004pA007pG007pC007pA004pC007pA004pG007pC004p | | |
| | C007 | | |
| 21 | C000pU000pG000pU000pG000pC000pU000pA000pG000pC000p | SS | 1528 |
| | A002pA000pC000pA000pC000pC000pC000pA000pA000 | | |
| | U007pU007pG007pG004pG004pU004pG007pU004pU004pG004p | AS1 | 1529 |
| | C007pU004pA007pG007pC007pA004pC007pA004pG007pC004p | | |
| | C007 | | |
| 22 | C000pU000pG000pU000pG000pC000pU000pA000pG000pC000p | SS | 1530 |
| | A002pA000pC000pA000pC000pC000pC000pA000pA000 | | |
| | U007pU007pG007pG004pG007pU004pG004pU004pU004pG004p | AS | 1531 |
| | C007pU004pA007pG007pC007pA004pC007pA004pG007pC004p | | |
| | C007 | | |
| 23 | C000pU000pG000pU000pG000pC000pU000pA000pG000pC000p | SS | 1532 |
| | A002pA000pC000pA000pC000pC000pC000pA000pA000 | | |
| | U007pU007pG007pG004pG007pU004pG007pU004pU004pG004p | AS | 1533 |
| | C004pU004pA007pG007pC007pA004pC007pA004pG007pC004p | | |
| | C007 | | |
| 24 | C000pU000pG000pU000pG000pC000pU000pA000pG000pC000p | SS | 1534 |
| | A002pA000pC000pA000pC000pC000pC000pA000pA000 | | |
| | U007pU007pG007pG004pG007pU004pG007pU004pU004pG004p | AS | 1535 |
| | C007pU004pA004pG007pC007pA004pC007pA004pG007pC004p | | |
| | C007 | | |
| 25 | C000pU000pG000pU000pG000pC000pU000pA000pG000pC000p | SS | 1536 |
| | A002pA000pC000pA000pC000pC000pC000pA000pA000 | | |
| | U007pU007pG007pG004pG007pU004pG007pU004pU004pG004p | AS | 1537 |
| | C007pU004pA007pG004pC007pA004pC007pA004pG007pC004p | | |
| | C007 | | |
| 26 | C000pU000pG000pU000pG000pC000pU000pA000pG000pC000p | SS | 1538 |
| | A002pA000pC000pA000pC000pC000pC000pA000pA000 | | |
| | U007pU007pG007pG004pG007pU004pG007pU004pU004pG004p | AS | 1539 |
| | C007pU004pA007pG007pC004pA004pC007pA004pG007pC004p | | |
| | C007 | | |
| 27 | C000pU000pG000pU000pG000pC000pU000pA000pG000pC000p | SS | 1540 |
| | A002pA000pC000pA000pC000pC000pC000pA000pA000 | | |
| | U007pU007pG007pG004pG007pU004pG007pU004pU004pG004p | AS | 1541 |
| | C007pU004pA007pG007pC007pA004pC004pA004pG007pC004p | | |
| | C007 | | |
| 28 | C000pU000pG000pU000pG000pC000pU000pA000pG000pC000p | SS | 1542 |
| | A002pA000pC000pA000pC000pC000pC000pA000pA000 | | |
| | U007pU007pG007pG004pG007pU004pG007pU004pU004pG004p | AS | 1543 |
| | C007pU004pA007pG007pC007pA004pC007pA004pG004pC004C | | |
| | 007 | | |
| 29 | C000pU000pG000pU000pG000pC000pU000pA000pG000pC000p | SS | 1544 |
| | A002pA000pC000pA000pC000pC000pC000pA000pA000 | | |
| | U007pU007pG007pG004pG007pU004pG007pU004pU004pG004p | AS | 1545 |
| | C007pU004pA007pG007pC007pA004pC007pA004pG007pC004p | | |
| | C004 | | |
| 30 | C004p001U004p001A004G004A004C004C007U004G007U004T0 | SS | 1546 |
| | 02U004U004G004C004U004U004U004U004G004U004 | | |
| | A004p001C004p001A004pA007pA004pA007pG004pC007pA004 | AS | 1547 |
| | pA007pA004pA007pC004pA004pG004pG004pU004pC004pU004 | | |
| | pA004pG004p001A004p001A004 | | |
| 31 | C004p001U004p001A004pG004pA004pC004pC007pU004pG007 | SS | 1548 |
| | pU004PT002pU004pU004pG004pC004pU004pU004pU004pU004 | | |
| | pG004pU004 | | |
| | A004p001C007p001A004A000p001pA004pA007pG004pC007pA | AS | 1549 |
| | 004pA007pA004pA007pC004pA004pG004pG004pU004pC004pU | | |
| | 004pA004pG004p001A004p001A004 | | |
| 32 | C004p001U004p001A004pG004pA004pC004pC007pU004pG007 | SS | 1550 |
| | pU004PT002pU004pU004pG004pC004pU004pU004pU004pU004 | | |
| | pG004pU004 | | |
| | A004p001C004p001A004pA007pA004pA007pG004pC007pA004 | AS | 1551 |
| | pA007pA004pA007pC004pA007pG004pG004pU004pC004pU004 | | |
| | pA004pG004p001A004p001A004 | | |
| 33 | C004p001U004p001A004pG004pA004pC004pC007pU004pG007 | SS | 1552 |
| | pU004PT002pU004pU004pG004pC004pU004pU004pU004pU004 | | |
| | pG004pU004 | | |
| | A004p001C004p001A004A007A004A007G004C007A004A007A0 | AS | 1553 |
| | 04A007C004A004G004G007U004C004U004A004G004p001A004 | | |
| | p001A004 | | |
| 34 | C004p001U004p001A004pG004pA004pC004pC007pU004pG007 | SS | 1554 |
| | pU004pT002pU004pU004pG004pC004pU004pU004pU004pU004 | | |
| | pG004pU004 | | |
| | A004p001C004p001A004pA007pA004pA007pG004pC007pA004 | AS | 1555 |
| | pA007pA004pA007pC004pA004pG004pG004pU004pC007pU004 | | |
| | pA004pG004p001A004p001A004 | | |

[1380] Specific codes in the nucleotide sequences are indicated in above, e.g., Tables A and A-1.

[1381] Additional suitable second dsRNAi agent targeting PCSK9 in Table 6a-2, or variants thereof and synthesis thereof are also described in WO2022/266753, entire contents of which are incorporated herein by reference.

[1382] In some embodiment, the second dsRNAi agent may have a structure of

[chemical structure]

[chemical structure]

[chemical structure]

[chemical structure]

[chemical structure]

[chemical structure]

[chemical structure]

[chemical structure]

[1383] wherein the dsRNA includes any one of PCSK9 siRNA in Table 6b, the dsRNA includes.
[1384] (i) a sense strand; and
[1385] (ii) an antisense strand forming a duplex with the sense strand.

TABLE 6b

| PCSK9 | | | SEQ ID |
|---|---|---|---|
| SIRNA | Sequence (5′-3′) | Strand | NO |
| 35 | A000pA000pG000pC000pA000pA000pG000pC000pA000pG000p | SS | 1556 |
| | A000pC000pA000pU000pU000pU000pA000pU000pC000 | | |
| | G000pA000pU000pA000pA000pA000pU000pG000pU000pC000p | AS | 1557 |
| | U000pG000pC000pU000pU000pG000pC000pU000pU000pG000p | | |
| | G000 | | |
| 36 | C000pC000pA000pA000pG000pC000pA000pA000pG000pC000p | SS | 1558 |
| | A000pG000pA000pC000pA000pU000pU000pU000pA000pU000p | | |
| | C000 | | |
| | G000pA000pU000pA000pA000pA000pU000pG000pU000pC000p | AS | 1559 |
| | U000pG000pC000pU000pU000pG000pC000pU000pU000pG000p | | |
| | G000pG000pU000 | | |
| 37 | A004pA004pG004pC004pA004pA004pG007pC007pA007pG004p | SS | 1560 |
| | A004pC004pA004pU004pU004pU004pA004pU004pC004 | | |
| | G004pA007pU004pA004pA004pA007pU004pG004pU004pC004p | AS | 1561 |
| | U004pG004pC004pU007pU004pG007pC004pU004pU004pG004p | | |
| | G004 | | |
| 38 | A004pA004pG004pC004pA007pA004pG007pC007pA007pG004p | SS | 1562 |
| | A004pC004pA004pU004pU004pU004pA004pU004pC004 | | |
| | G004pA007pU004pA004pA004pA007pU004pG007pU007pC004p | AS | 1563 |
| | U004pG004pC004pU007pU004pG007pC004pU004pU004pG004p | | |
| | G004 | | |
| 39 | A004pA004pG004pC004pA007pA004pG007pC007pA007pG004p | SS | 1564 |
| | A004pC004pA004pU004pU004pU004pA004pU004pC004 | | |
| | G004pA007pU004pA004pA004pA007pU004pG004pU004pC004p | AS | 1565 |
| | U004pG004pC004pU007pU004pG007pC004pU004pU004pG004p | | |
| | G004 | | |
| 40 | C004pC004pA004pA004pG004pC004pA004pA004pG007pC007p | SS | 1566 |
| | A007pG004pA004pC004pA004pU004pU004pU004pA004pU004p | | |
| | C004 | | |
| | G004pA007pU004pA004pA004pA007pU004pG004pU004pC004p | AS | 1567 |
| | U004pG004pC004pU007pU004pG007pC004pU004pU004pG004p | | |
| | G004pG004pU004 | | |
| 41 | C004pC004pA004pA004pG004pC004pA007pA004pG007pC007p | SS | 1568 |
| | A007pG004pA004pC004pA004pU004pU004pU004pA004pU004p | | |
| | C004 | | |
| | G004pA007pU004pA004pA004pA007pU004pG007pU007pC004p | AS | 1569 |
| | U004pG004pC004pU007pU004pG007pC004pU004pU004pG004p | | |
| | G004pG004pU004 | | |
| 42 | C004pC004pA004pA004pG004pC004pA007pA004pG007pC007p | SS | 1570 |
| | A007pG004pA004pC004pA004pU004pU004pU004pA004pU004p | | |
| | C004 | | |
| | G004pA007pU004pA004pA004pA007pU004pG004pU004pC004p | AS | 1571 |
| | U004pG004pC004pU007pU004pG007pC004pU004pU004pG004p | | |
| | G004pG004pU004 | | |
| 43 | A004p001A004p001G004pC004pA004pA004pG007pC007pA007 | SS | 1572 |
| | pG004pA004pC004pA004pU004pU004pU004pA004pU004pC004 | | |
| | G004p001A007p001U004pA004pA004pA007pU004pG004pU004 | AS | 1573 |
| | pC004pU004pG004pC004pU007pU004pG007pC004pU004pU004 | | |
| | p001G004p001G004 | | |
| 44 | A004p001A004p001G004pC004pA007pA004pG007pC007pA007 | SS | 1574 |
| | pG004pA004pC004pA004pU004pU004pU004pA004pU004pC004 | | |
| | G004p001A007p001U004pA004pA004pA007pU004pG007pU007 | AS | 1575 |
| | pC004pU004pG004pC004pU007pU004pG007pC004pU004pU004 | | |
| | p001G004p001G004 | | |
| 45 | A004p001A004p001G004pC004pA007pA004pG007pC007pA007 | SS | 1576 |
| | pG004pA004pC004pA004pU004pU004pU004pA004pU004pC004 | | |
| | G004p001A007p001U004pA004pA004pA007pU004pG004pU004 | AS | 1577 |
| | pC004pU004pG004pC004pU007pU004pG007pC004pU004pU004 | | |
| | p001G004p001G004 | | |
| 46 | C004p001C004p001A004pA004pG004pC004pA004pA004pG007 | SS | 1578 |
| | pC007pA007pG004pA004pC004pA004pU004pU004pU004pA004 | | |
| | pU004pC004 | | |
| | G004p001A007p001U004pA004pA004pA007pU004pG004pU004 | AS | 1579 |
| | pc004pU004pG004pC004pU007pU004pG007pC004pU004pU004 | | |
| | pG004pG004p001G004p001U004 | | |
| 47 | C004p001C004p001A004pA004pG004pC004pA007pA004pG007 | SS | 1580 |
| | pC007pA007pG004pA004pC004pA004pU004pU004pU004pA004 | | |
| | pU004pC004 | | |
| | G004p001A007p001U004pA004pA004pA007pU004pG007pU007 | AS | 1581 |
| | pC004pU004pG004pC004pU007pU004pG007pC004pU004pU004 | | |
| | pG004pG004p001G004p001U004 | | |
| 48 | C004p001C004p001A004pA004pG004pC004pA007pA004pG007 | SS | 1582 |
| | pC007pA007pG004pA004pC004pA004pU004pU004pU004pA004 | | |
| | pU004pC004 | | |
| | G004p001A007p001U004pA004pA004pA007pU004pG004pU004 | AS | 1583 |
| | pC004pU004pG004pC004pU007pU004pG007pC004pU004pU004 | | |
| | pG004pG004p001G004p001U004 | | |
| 49 | A004pA004pG004pC004pA004pA004pG007pC007pA007pG004p | SS | 1584 |
| | A004pC004pA004pU004pU004pU004pA004pU004pC004 | | |
| | PG004pA007pU004pA004pA004pA007pU004pG004pU004pC004 | AS | 1585 |
| | pU004pG004pC004pU007pU004pG007pC004pU004pU004pG004 | | |
| | pG004 | | |
| 50 | A004pA004pG004pC004pA007pA004pG007pC007pA007pG004p | SS | 1586 |
| | A004pC004pA004pU004pU004pU004pA004pU004pC004 | | |
| | PG004pA007pU004pA004pA004pA007pU004pG007pU007pC004 | AS | 1587 |
| | pU004pG004pC004pU007pU004pG007pC004pU004pU004pG004 | | |
| | pG004 | | |
| 51 | A004pA004pG004pC004pA007pA004pG007pC007pA007pG004p | SS | 1588 |
| | A004pC004pA004pU004pU004pU004pA004pU004pC004 | | |
| | PG004pA007pU004pA004pA004pA007pU004pG004pU004pC004 | AS | 1589 |
| | pU004pG004pC004pU007pU004pG007pC004pU004pU004pG004 | | |
| | pG004 | | |
| 52 | C004pC004pA004pA004pG004pC004pA004pA004pG007pC007p | SS | 1590 |
| | A007pG004pA004pC004pA004pU004pU004pU004pA004pU004p | | |
| | C004 | | |
| | PG004pA007pU004pA004pA004pA007pU004pG004pU004pC004 | AS | 1591 |
| | pU004pG004pC004pU007pU004pG007pC004pU004pU004pG004 | | |
| | pG004pG004pU004 | | |
| 53 | C004pC004pA004pA004pG004pC004pA007pA004pG007pC007p | SS | 1592 |
| | A007pG004pA004pC004pA004pU004pU004pU004pA004pU004p | | |
| | C004 | | |
| | PG004pA007pU004pA004pA004pA007pU004pG007pU007pC004 | AS | 1593 |
| | pU004pG004pC004pU007pU004pG007pC004pU004pU004pG004 | | |
| | pG004pG004pU004 | | |
| 54 | C004pC004pA004pA004pG004pC004pA007pA004pG007pC007p | SS | 1594 |
| | A007pG004pA004pC004pA004pU004pU004pU004pA004pU004p | | |
| | C004 | | |
| | PG004pA007pU004pA004pA004pA007pU004pG004pU004pC004 | AS | 1595 |
| | pU004pG004pC004pU007pU004pG007pC004pU004pU004pG004 | | |
| | pG004pG004pU004 | | |
| 55 | A004p001A004p001G004pC004pA004pA004pG007pC007pA007 | SS | 1596 |
| | pG004pA004pC004pA004pU004pU004pU004pA004pU004pC004 | | |
| | PG004p001A007p001U004pA004pA004pA007pU004pG004pU00 | AS1 | 1597 |
| | 4pC004pU004pG004pC004pU007pU004pG007pC004pU004pU00 | | |
| | 4p001G004p001G004 | | |
| 56 | A004p001A004p001G004pC004pA007pA004pG007pC007pA007 | SS | 1598 |
| | pG004pA004pC004pA004pU004pU004pU004pA004pU004pC004 | | |
| | PG004p001A007p001U004pA004pA004pA007pU004pG007pU00 | AS | 1599 |
| | 7pC004pU004pG004pC004pU007pU004pG007pC004pU004pU00 | | |
| | 4p001G004p001G004 | | |
| 57 | A004p001A004p001G004pC004pA007pA004pG007pC007pA007 | SS | 1600 |
| | pG004pA004pC004pA004pU004pU004pU004pA004pU004pC004 | | |
| | PG004p001A007p001U004pA004pA004pA007pU004pG004pU00 | AS | 1601 |
| | 4pC004pU004pG004pC004pU007pU004pG007pC004pU004pU00 | | |
| | 4p001G004p001G004 | | |
| 58 | C004p001C004p001A004pA004pG004pC004pA004pA004pG007 | SS | 1602 |
| | pC007pA007pG004pA004pC004pA004pU004pU004pU004pA004 | | |
| | pU004pC004 | | |
| | PG004p001A007p001U004pA004pA004pA007pU004pG004pU00 | AS | 1603 |
| | 4pC004pU004pG004pC004pU007pU004pG007pC004pU004pU00 | | |
| | 4pG004pG004p001G004p001U004 | | |
| 59 | C004p001C004p001A004pA004pG004pC004pA007pA004pG007 | SS | 1604 |
| | pC007pA007pG004pA004pC004pA004pU004pU004pU004pA004 | | |
| | pU004pC004 | | |
| | PG004p001A007p001U004pA004pA004pA007pU004pG007pU00 | AS | 1605 |
| | 7pC004pU004pG004pC004pU007pU004pG007pC004pU004pU00 | | |
| | 4pG004pG004p001G004p001U004 | | |
| 60 | C004p001C004p001A004pA004pG004pC004pA007pA004pG007 | SS | 1606 |
| | pC007pA007pG004pA004pC004pA004pU004pU004pU004pA004 | | |
| | pU004pC004 | | |
| | PG004p001A007p001U004pA004pA004pA007pU004pG004pU00 | AS | 1607 |
| | 4pC004pU004pG004pC004pU007pU004pG007pC004pU004pU00 | | |
| | 4pG004pG004p001G004p001U004 | | |
| 61 | U000pU000pU000pG000pU000pA000pG000pC000pA000pU000p | SS | 1608 |
| | U000pU000pU000pU000pA000pU000pU000pA000pA000 | | |
| | U000pU000pA000pA000pU000pA000pA000pA000pA000pA000p | AS | 1609 |
| | U000pG000pC000pU000pA000pC000pA000pA000pA000pA000p | | |
| | C000 | | |
| 62 | G000pU000pU000pU000pU000pG000pU000pA000pG000pC000p | SS | 1610 |
| | A000pU000pU000pU000pU000pU000pA000pU000pU000pA000p | | |
| | A000 | | |
| | U000pU000pA000pA000pU000pA000pA000pA000pA000pA000p | AS | 1611 |
| | U000pG000pC000pU000pA000pC000pA000pA000pA000pA000p | | |
| | C000pC000pC000 | | |
| 63 | U004pU004pU004pG004pU004pA004pG007pC007pA007pU004p | SS | 1612 |
| | U004pU004pU004pU004pA004pU004pU004pA004pA004 | | |
| | U004pU007pA004pA004pU004pA007pA004pA004pA004pA004p | AS | 1613 |
| | U004pG007pC004pU007pA004pC004pA004pA004pA004pA004p | | |
| | C004 | | |
| 64 | U004pU004pU004pG004pU007pA004pG007pC007pA007pU004p | SS | 1614 |
| | U004pU004pU004pU004pA004pU004pU004pA004pA004 | | |
| | U004pU007pA004pA004pU004pA007pA004pA007pA007pA004p | AS | 1615 |
| | U004pG007pC004pU007pA004pC004pA004pA004pA004pA004p | | |
| | C004 | | |
| 65 | U004pU004pU004pG004pU007pA004pG007pC007pA007pU004p | SS | 1616 |
| | U004pU004pU004pU004pA004pU004pU004pA004pA004 | | |
| | U004pU007pA004pA004pU004pA007pA004pA004pA004pA004p | AS | 1617 |
| | U004pG007pC004pU007pA004pC004pA004pA004pA004pA004p | | |
| | C004 | | |
| 66 | G004pU004pU004pU004pU004pG004pU004pA004pG007pC007p | SS | 1618 |
| | A007pU004pU004pU004pU004pU004pA004pU004pU004pA004p | | |
| | A004 | | |
| | U004pU007pA004pA004pU004pA007pA004pA004pA004pA004p | AS | 1619 |
| | U004pG007pC004pU007pA004pC004pA004pA004pA004pA004p | | |
| | C004pC004pC004 | | |
| 67 | G004pU004pU004pU004pU004pG004pU007pA004pG007pC007p | SS | 1620 |
| | A007pU004pU004pU004pU004pU004pA004pU004pU004pA004p | | |
| | A004 | | |
| | U004pU007pA004pA004pU004pA007pA004pA007pA007pA004p | AS | 1621 |
| | U004pG007pC004pU007pA004pC004pA004pA004pA004pA004p | | |
| | C004pC004pC004 | | |
| 68 | G004pU004pU004pU004pU004pG004pU007pA004pG007pC007p | SS | 1622 |
| | A007pU004pU004pU004pU004pU004pA004pU004pU004pA004p | | |
| | A004 | | |
| | U004pU007pA004pA004pU004pA007pA004pA004pA004pA004p | AS | 1623 |
| | U004pG007pC004pU007pA004pC004pA004pA004pA004pA004p | | |
| | C004pC004pC004 | | |
| 69 | U004p001U004p001U004pG004pU004pA004pG007pC007pA007 | SS | 1624 |
| | pU004pU004pU004pU004pU004pA004pU004pU004pA004pA004 | | |
| | U004p001U007p001A004pA004pU004pA007pA004pA004pA004 | AS | 1625 |
| | pA004pU004pG007pC004pU007pA004pC004pA004pA004pA004 | | |
| | p001A004p001C004 | | |
| 70 | U004p001U004p001U004pG004pU007pA004pG007pC007pA007 | SS | 1626 |
| | pU004pU004pU004pU004pU004pA004pU004pU004pA004pA004 | | |
| | U004p001U007p001A004pA004pU004pA007pA004pA007pA007 | AS | 1627 |
| | pA004pU004pG007pC004pU007pA004pC004pA004pA004pA004 | | |
| | p001A004p001C004 | | |
| 71 | U004p001U004p001U004pG004pU007pA004pG007pC007pA007 | SS | 1628 |
| | pU004pU004pU004pU004pU004pA004pU004pU004pA004pA004 | | |
| | U004p001U007p001A004pA004pU004pA007pA004pA004pA004 | AS | 1629 |
| | pA004pU004pG007pC004pU007pA004pC004pA004pA004pA004 | | |
| | p001A004p001C004 | | |
| 72 | G004p001U004p001U004pU004pU004pG004pU004pA004pG007 | SS | 1630 |
| | pC007pA007pU004pU004pU004pU004pU004pA004pU004pU004 | | |
| | pA004pA004 | | |
| | U004p001U007p001A004pA004pU004pA007pA004pA004pA004 | AS | 1631 |
| | pA004pU004pG007pC004pU007pA004pC004pA004pA004pA004 | | |
| | pA004pC004p001C004p001C004 | | |
| 73 | G004p001U004p001U004pU004pU004pG004pU007pA004pG007 | SS | 1632 |
| | pC007pA007pU004pU004pU004pU004pU004pA004pU004pU004 | | |
| | pA004pA004 | | |
| | U004p001U007p001A004pA004pU004pA007pA004pA007pA007 | AS | 1633 |
| | pA004pU004pG007pC004pU007pA004pC004pA004pA004pA004 | | |
| | pA004pC004p001C004p001C004 | | |
| 74 | G004p001U004p001U004pU004pU004pG004pU007pA004pG007 | SS | 1634 |
| | pC007pA007pU004pU004pU004pU004pU004pA004pU004pU004 | | |
| | pA004pA004 | | |
| | U004p001U007p001A004pA004pU004pA007pA004pA004pA004 | AS | 1635 |
| | pA004pU004pG007pC004pU007pA004pC004pA004pA004pA004 | | |
| | pA004pC004p001C004p001C004 | | |
| 75 | U004pU004pU004pG004pU004pA004pG007pC007pA007pU004p | SS | 1636 |
| | U004pU004pU004pU004pA004pU004pU004pA004pA004 | | |
| | PU004pU007pA004pA004pU004pA007pA004pA004pA004pA004 | AS | 1637 |
| | pU004pG007pC004pU007pA004pC004pA004pA004pA004pA004 | | |
| | pC004 | | |
| 76 | U004pU004pU004pG004pU007pA004pG007pC007pA007pU004p | SS | 1638 |
| | U004pU004pU004pU004pA004pU004pU004pA004pA004 | | |
| | PU004pU007pA004pA004pU004pA007pA004pA007pA007pA004 | AS | 1639 |
| | pU004pG007pC004pU007pA004pC004pA004pA004pA004pA004 | | |
| | pC004 | | |
| 77 | U004pU004pU004pG004pU007pA004pG007pC007pA007pU004p | SS | 1640 |
| | U004pU004pU004pU004pA004pU004pU004pA004pA004p | | |
| | PU004pU007pA004pA004pU004pA007pA004pA004pA004pA004 | AS | 1641 |
| | pU004pG007pC004pU007pA004pC004pA004pA004pA004pA004 | | |
| | pC004 | | |
| 78 | G004pU004pU004pU004pU004pG004pU004pA004pG007pC007p | SS | 1642 |
| | A007pU004pU004pU004pU004pU004pA004pU004pU004pA004p | | |
| | A004 | | |
| | PU004pU007pA004pA004pU004pA007pA004pA004pA004pA004 | AS | 1643 |
| | pU004pG007pC004pU007pA004pC004pA004pA004pA004pA004 | | |
| | pC004pC004pC004 | | |
| 79 | G004pU004pU004pU004pU004pG004pU007pA004pG007pC007p | SS | 1644 |
| | A007pU004pU004pU004pU004pU004pA004pU004pU004pA004p | | |
| | A004 | | |
| | PU004pU007pA004pA004pU004pA007pA004pA007pA007pA004 | AS | 1645 |
| | pU004pG007pC004pU007pA004pC004pA004pA004pA004pA004 | | |
| | pc004pC004pC004 | | |
| 80 | G004pU004pU004pU004pU004pG004pU007pA004pG007pC007p | SS | 1646 |
| | A007pU004pU004pU004pU004pU004pA004pU004pU004pA004p | | |
| | A004 | | |
| | PU004pU007pA004pA004pU004pA007pA004pA004pA004pA004 | AS | 1647 |
| | pU004pG007pC004pU007pA004pC004pA004pA004pA004pA004 | | |
| | pC004pC004pC004 | | |
| 81 | U004p001U004p001U004pG004pU004pA004pG007pC007pA007 | SS | 1648 |
| | pU004pU004pU004pU004pU004pA004pU004pU004pA004pA004 | | |
| | PU004p001U007p001A004pA004pU004pA007pA004pA004pA00 | AS | 1649 |
| | 4pA004pU004pG007pC004pU007pA004pC004pA004pA004pA00 | | |
| | 4p001A004p001C004 | | |
| 82 | U004p001U004p001U004pG004pU007pA004pG007pC007pA007 | SS | 1650 |
| | pU004pU004pU004pU004pU004pA004pU004pU004pA004pA004 | | |
| | PU004p001U007p001A004pA004pU004pA007pA004pA007pA00 | AS | 1651 |
| | 7pA004pU004pG007pC004pU007pA004pC004pA004pA004pA00 | | |
| | 4p001A004p001C004 | | |
| 83 | U004p001U004p001U004pG004pU007pA004pG007pC007pA007 | SS | 1652 |
| | pU004pU004pU004pU004pU004pA004pU004pU004pA004pA004 | | |
| | PU004p001U007p001A004pA004pU004pA007pA004pA004pA00 | AS | 1653 |
| | 4pA004pU004pG007pC004pU007pA004pC004pA004pA004pA00 | | |
| | 4p001A004p001C004 | | |
| 84 | G004p001U004p001U004pU004pU004pG004pU004pA004pG007 | SS | 1654 |
| | pC007pA007pU004pU004pU004pU004pU004pA004pU004pU004 | | |
| | pA004pA004 | | |
| | PU004p001U007p001A004pA004pU004pA007pA004pA004pA00 | AS | 1655 |
| | 4pA004pU004pG007pC004pU007pA004pC004pA004pA004pA00 | | |
| | 4pA004pC004p001C004p001C004 | | |
| 85 | G004p001U004p001U004pU004pU004pG004pU007pA004pG007 | SS | 1656 |
| | pc007pA007pU004pU004pU004pU004pU004pA004pU004pU004 | | |
| | pA004pA004 | | |
| | pU004p001U007p001A004pA004pU004pA007pA004pA007pA00 | AS | 1657 |
| | 7pA004pU004pG007pC004pU007pA004pC004pA004pA004pA00 | | |
| | 4pA004pC004p001C004p001C004 | | |
| 86 | G000pC000pC000pU000pG000pG000pA000pG000pU000pU000p | SS | 1658 |
| | U000pA000pU000pU000pC000pG000pG000pA000pA000 | | |
| | U000pU000pC000pC000pG000pA000pA000pU000pA000pA000p | AS | 1659 |
| | A000pC000pU000pC000pC000pA000pG000pG000pC000pC000p | | |
| | U000 | | |
| 87 | A000pG000pG000pC000pC000pU000pG000pG000pA000pG000p | SS | 1660 |
| | U000pU000pU000pA000pU000pU000pC000pG000pG000pA000p | | |
| | A000 | | |
| | U000pU000pC000pC000pG000pA000pA000pU000pA000pA000p | AS | 1661 |
| | A000pC000pU000pC000pC000pA000pG000pG000pC000pC000p | | |
| | U000pA000pU000 | | |
| 88 | G004pC004pC004pU004pG004pG004pA007pG007pU007pU004p | SS | 1662 |
| | U004pA004pU004pU004pC004pG004pG004pA004pA004 | | |
| | U004pU007pC004pC004pG004pA007pA004pU004pA004pA004p | AS | 1663 |
| | A004pC004pU004pC007pC004pA007pG004pG004pC004pC004p | | |
| | U004 | | |
| 89 | G004pC004pC004pU004pG007pG004pA007pG007pU007pU004p | SS | 1664 |
| | U004pA004pU004pU004pC004pG004pG004pA004pA004 | | |
| | U004pU007pC004pC004pG004pA007pA004pU007pA007pA004p | AS | 1665 |
| | A004pC004pU004pC007pC004pA007pG004pG004pC004pC004p | | |
| | U004 | | |
| 90 | G004pC004pC004pU004pG007pG004pA007pG007pU007pU004p | SS | 1666 |
| | U004pA004pU004pU004pC004pG004pG004pA004pA004 | | |
| | U004pU007pC004pC004pG004pA007pA004pU004pA004pA004p | AS | 1667 |
| | A004pC004pU004pC007pC004pA007pG004pG004pC004pC004p | | |
| | U004 | | |
| 91 | A004pG004pG004pC004pC004pU004pG004pG004pA007pG007p | SS | 1668 |
| | U007pU004pU004pA004pU004pU004pC004pG004pG004pA004p | | |
| | A004 | | |
| | U004pU007pC004pC004pG004pA007pA004pU004pA004pA004p | AS | 1669 |
| | A004pC004pU004pC007pC004pA007pG004pG004pC004pC004p | | |
| | U004pA004pU004 | | |
| 92 | A004pG004pG004pC004pC004pU004pG007pG004pA007pG007p | SS | 1670 |
| | U007pU004pU004pA004pU004pU004pC004pG004pG004pA004p | | |
| | A004 | | |
| | U004pU007pC004pC004pG004pA007pA004pU007pA007pA004p | AS | 1671 |
| | A004pC004pU004pC007pC004pA007pG004pG004pC004pC004p | | |
| | U004pA004pU004 | | |
| 93 | A004pG004pG004pC004pC004pU004pG007pG004pA007pG007p | SS | 1672 |
| | U007pU004pU004pA004pU004pU004pC004pG004pG004pA004p | | |
| | A004 | | |
| | U004pU007pC004pC004pG004pA007pA004pU004pA004pA004p | AS | 1673 |
| | A004pC004pU004pC007pC004pA007pG004pG004pC004pC004p | | |
| | U004pA004pU004 | | |
| 94 | G004p001C004p001C004pU004pG004pG004pA007pG007pU007 | SS | 1674 |
| | pU004pU004pA004pU004pU004pC004pG004pG004pA004pA004 | | |
| | U004p001U007p001C004pC004pG004pA007pA004pU004pA004 | AS | 1675 |
| | pA004pA004pC004pU004pC007pC004pA007pG004pG004pC004 | | |
| | p001C004p001U004 | | |
| 95 | G004p001C004p001C004pU004pG007pG004pA007pG007pU007 | SS | 1676 |
| | pU004pU004pA004pU004pU004pC004pG004pG004pA004pA004 | | |
| | U004p001U007p001C004pC004pG004pA007pA004pU007pA007 | AS | 1677 |
| | pA004pA004pC004pU004pC007pC004pA007pG004pG004pC004 | | |
| | p001C004p001U004 | | |
| 96 | G004p001C004p001C004pU004pG007pG004pA007pG007pU007 | SS | 1678 |
| | pU004pU004pA004pU004pU004pC004pG004pG004pA004pA004 | | |
| | U004p001U007p001C004pC004pG004pA007pA004pU004pA004 | AS | 1679 |
| | pA004pA004pC004pU004pC007pC004pA007pG004pG004pC004 | | |
| | p001C004p0010004 | | |
| 97 | A004p001G004p001G004pC004pC004pU004pG004pG004pA007 | SS | 1680 |
| | pG007pU007pU004pU004pA004pU004pU004pC004pG004pG004 | | |
| | pA004pA004 | | |
| | U004p001U007p001C004pC004pG004pA007pA004pU004pA004 | AS | 1681 |
| | pA004pA004pC004pU004pC007pC004pA007pG004pG004pC004 | | |
| | pC004pU004p001A004p001U004 | | |
| 98 | A004p001G004p001G004pC004pC004pU004pG007pG004pA007 | SS | 1682 |
| | pG007pU007pU004pU004pA004pU004pU004pC004pG004pG004 | | |
| | pA004pA004 | | |
| | U004p001U007p001C004pC004pG004pA007pA004pU007pA007 | AS | 1683 |
| | pA004pA004pC004pU004pC007pC004pA007pG004pG004pC004 | | |
| | pC004pU004p001A004p001U004 | | |
| 99 | A004p001G004p001G004pC004pC004pU004pG007pG004pA007 | SS | 1684 |
| | pG007pU007pU004pU004pA004pU004pU004pC004pG004pG004 | | |
| | pA004pA004 | | |
| | U004p001U007p001C004pC004pG004pA007pA004pU004pA004 | AS | 1685 |
| | pA004pA004pC004pU004pC007pC004pA007pG004pG004pC004 | | |
| | pC004pU004p001A004p001U004 | | |
| 100 | G004pC004pC004pU004pG004pG004pA007pG007pU007pU004p | SS | 1686 |
| | U004pA004pU004pU004pC004pG004pG004pA004pA004 | | |
| | PU004pU007pC004pC004pG004pA007pA004pU004pA004pA004 | AS | 1687 |
| | pA004pC004pU004pC007pC004pA007pG004pG004pC004pC004 | | |
| | pU004 | | |
| 101 | G004pC004pC004pU004pG007pG004pA007pG007pU007pU004p | SS | 1688 |
| | U004pA004pU004pU004pC004pG004pG004pA004pA004 | | |
| | PU004pU007pC004pC004pG004pA007pA004pU007pA007pA004 | AS | 1689 |
| | pA004pC004pU004pC007pC004pA007pG004pG004pC004pC004 | | |
| | pU004 | | |
| 102 | G004pC004pC004pU004pG007pG004pA007pG007pU007pU004p | SS | 1690 |
| | U004pA004pU004pU004pC004pG004pG004pA004pA004 | | |
| | PU004pU007pC004pC004pG004pA007pA004pU004pA004pA004 | AS | 1691 |
| | pA004pC004pU004pC007pC004pA007pG004pG004pC004pC004 | | |
| | pU004 | | |
| 103 | A004pG004pG004pC004pC004pU004pG004pG004pA007pG007p | SS | 1692 |
| | U007pU004pU004pA004pU004pU004pC004pG004pG004pA004p | | |
| | A004 | | |
| | PU004pU007pC004pC004pG004pA007pA004pU004pA004pA004 | AS | 1693 |
| | pA004pC004pU004pC007pC004pA007pG004pG004pC004pC004 | | |
| | pU004pA004pU004 | | |
| 104 | A004pG004pG004pC004pC004pU004pG007pG004pA007pG007p | SS | 1694 |
| | U007pU004pU004pA004pU004pU004pC004pG004pG004pA004p | | |
| | A004 | | |
| | PU004pU007pC004pC004pG004pA007pA004pU007pA007pA004 | AS | 1695 |
| | pA004pC004pU004pC007pC004pA007pG004pG004pC004pC004 | | |
| | pU004pA004pU004 | | |
| 105 | A004pG004pG004pC004pC004pU004pG007pG004pA007pG007p | SS | 1696 |
| | U007pU004pU004pA004pU004pU004pC004pG004pG004pA004p | | |
| | A004 | | |
| | PU004pU007pC004pC004pG004pA007pA004pU004pA004pA004 | AS | 1697 |
| | pA004pC004pU004pC007pC004pA007pG004pG004pC004pC004 | | |
| | pU004pA004pU004 | | |
| 106 | G004p001C004p001C004pU004pG004pG004pA007pG007pU007 | SS | 1698 |
| | pU004pU004pA004pU004pU004pC004pG004pG004pA004pA004 | | |
| | PU004p001U007p001C004pC004pG004pA007pA004pU004pA00 | AS | 1699 |
| | 4pA004pA004pC004pU004pC007pC004pA007pG004pG004pC00 | | |
| | 4p001C004p001U004 | | |
| 107 | G004p001C004p001C004pU004pG007pG004pA007pG007pU007 | SS | 1700 |
| | pU004pU004pA004pU004pU004pC004pG004pG004pA004pA004 | | |
| | pU004p001U007p001C004pC004pG004pA007pA004pU007pA00 | AS | 1701 |
| | 7pA004pA004pC004pU004pC007pC004pA007pG004pG004pC00 | | |
| | 4p001C004p001U004 | | |
| 107 | G004p001C004p001C004pU004pG007pG004pA007pG007pU007 | SS | 1702 |
| | pU004pU004pA004pU004pU004pC004pG004pG004pA004pA004 | | |
| | pU004p001U007p001C004pC004pG004pA007pA004pU004pA00 | AS | 1703 |
| | 4pA004pA004pC004pU004pC007pC004pA007pG004pG004pC00 | | |
| | 4p001C004p001U004 | | |
| 109 | A004p001G004p001G004pC004pC004pU004pG004pG004pA007 | SS | 1704 |
| | pG007pU007pU004pU004pA004pU004pU004pC004pG004pG004 | | |
| | pA004pA004 | | |
| | pU004p001U007p001C004pC004pG004pA007pA004pU004pA00 | AS | 1705 |
| | 4pA004pA004pC004pU004pC007pC004pA007pG004pG004pC00 | | |
| | 4pC004pU004p001A004p001U004 | | |
| 110 | A004p001G004p001G004pC004pC004pU004pG007pG004pA007 | SS | 1706 |
| | pG007pU007pU004pU004pA004pU004pU004pC004pG004pG004 | | |
| | pA004pA004 | | |
| | PU004p001U007p001C004pC004pG004pA007pA004pU007pA00 | AS | 1707 |
| | 7pA004pA004pC004pU004pC007pC004pA007pG004pG004pC00 | | |
| | 4pC004pU004p001A004p001U004 | | |
| 111 | A004p001G004p001G004pC004pC004pU004pG007pG004pA007 | SS | 1708 |
| | pG007pU007pU004pU004pA004pU004pU004pC004pG004pG004 | | |
| | pA004pA004 | | |
| | pU004p001U007p001C004pC004pG004pA007pA004pU004pA00 | AS | 1709 |
| | 4pA004pA004pC004pU004pC007pC004pA007pG004pG004pC00 | | |
| | 4pC004pU004p001A004p001U004 | | |
| 112 | C000000G000pU000pU000pU000pU000pG000pC000pU000p | SS | 1710 |
| | U000pU000pU000pG000pU000pA000pA000pC000pU000 | | |
| | A000pG000pU000pU000pA000pC000pA000pA000pA000pA000p | AS | 1711 |
| | G000pC000pA000pA000pA000pA000pC000pA000pG000pG000p | | |
| | U000 | | |
| 113 | A000000000000pG000pU000pU000pU000pU000pG000p | SS | 1712 |
| | C000pU000pU000pU000pU000pG000pU000pA000pA000pC000p | | |
| | U000 | | |
| | A000pG000pU000pU000pA000pC000pA000pA000pA000pA000p | AS | 1713 |
| | G000pC000pA000pA000pA000pA000pC000pA000pG000pG000p | | |
| | U000pC000pU000 | | |
| 114 | C004pU004pG004pU004pU004pU004pU007pG007pC007pU004p | SS | 1714 |
| | U004pU004pU004pG004pU004pA004pA004pC004pU004p | | |
| | A004pG007pU004pU004pA004pC007pA004pA004pA004pA004p | AS | 1715 |
| | G004pC004pA004pA007pA004pA007pC004pA004pG004pG004p | | |
| | U004 | | |
| 115 | C004pU004pG004pU004pU007pU004pU007pG007pC007pU004p | SS | 1716 |
| | U004pU004pU004pG004pU004pA004pA004pC004pU004 | | |
| | A004pG007pU004pU004pA004pC007pA004pA007pA007pA004p | AS | 1717 |
| | G004pC004pA004pA007pA004pA007pC004pA004pG004pG004p | | |
| | U004 | | |
| 116 | C004pU004pG004pU004pU007pU004pU007pG007pC007pU004p | SS | 1718 |
| | U004pU004pU004pG004pU004pA004pA004pC004pU004 | | |
| | A004pG007pU004pU004pA004pC007pA004pA004pA004pA004p | AS | 1719 |
| | G004pC004pA004pA007pA004pA007pC004pA004pG004pG004p | | |
| | U004 | | |
| 117 | A004pC004pC004pU004pG004pU004pU004pU004pU007pG007p | SS | 1720 |
| | C007pU004pU004pU004pU004pG004pU004pA004pA004pC004p | | |
| | U004 | | |
| | A004pG007pU004pU004pA004pC007pA004pA004pA004pA004p | AS | 1721 |
| | G004pC004pA004pA007pA004pA007pC004pA004pG004pG004p | | |
| | U004pC004pU004 | | |
| 118 | A004pC004pC004pU004pG004pU004pU007pU004pU007pG007p | SS | 1722 |
| | C007pU004pU004pU004pU004pG004pU004pA004pA004pC004p | | |
| | U004 | | |
| | A004pG007pU004pU004pA004pC007pA004pA007pA007pA004p | AS | 1723 |
| | G004pC004pA004pA007pA004pA007pC004pA004pG004pG004p | | |
| | U004pC004pU004 | | |
| 119 | A004pC004pC004pU004pG004pU004pU007pU004pU007pG007p | SS | 1724 |
| | C007pU004pU004pU004pU004pG004pU004pA004pA004pC004p | | |
| | U004 | | |
| | A004pG007pU004pU004pA004pC007pA004pA004pA004pA004p | AS | 1725 |
| | G004pC004pA004pA007pA004pA007pC004pA004pG004pG004p | | |
| | U004pC004pU004 | | |
| 120 | C004p001U004p001G004pU004pU004pU004pU007pG007pC007 | SS | 1726 |
| | pU004pU004pU004pU004pG004pU004pA004pA004pC004pU004 | | |
| | A004p001G007p001U004pU004pA004pC007pA004pA004pA004 | AS | 1727 |
| | pA004pG004pC004pA004pA007pA004pA007pC004pA004pG004 | | |
| | p001G004p001U004 | | |
| 121 | C004p001U004p001G004pU004pU007pU004pU007pG007pC007 | SS | 1728 |
| | pU004pU004pU004pU004pG004pU004pA004pA004pC004pU004 | | |
| | A004p001G007p001U004pU004pA004pC007pA004pA007pA007 | AS | 1729 |
| | pA004pG004pC004pA004pA007pA004pA007pC004pA004pG004 | | |
| | p001G004p001U004 | | |
| 122 | C004p001U004p001G004pU004pU007pU004pU007pG007pC007 | SS | 1730 |
| | pU004pU004pU004pU004pG004pU004pA004pA004pC004pU004 | | |
| | A004p001G007p001U004pU004pA004pC007pA004pA004pA004 | AS | 1731 |
| | pA004pG004pC004pA004pA007pA004pA007pC004pA004pG004 | | |
| | p001G004p001U004 | | |
| 123 | A004p001C004p001C004pU004pG004pU004pU004pU004pU007 | SS | 1732 |
| | pG007pC007pU004pU004pU004pU004pG004pU004pA004pA004 | | |
| | pC004pU004 | | |
| | A004p001G007p001U004pU004pA004pC007pA004pA004pA004 | AS | 1733 |
| | pA004pG004pC004pA004pA007pA004pA007pC004pA004pG004 | | |
| | pG004pU004p001C004p001U004 | | |
| 124 | A004p001C004p001C004pU004pG004pU004pU007pU004pU007 | SS | 1734 |
| | pG007pC007pU004pU004pU004pU004pG004pU004pA004pA004 | | |
| | pC004pU004 | | |
| | A004p001G007p001U004pU004pA004pC007pA004pA007pA007 | AS | 1735 |
| | pA004pG004pC004pA004pA007pA004pA007pC004pA004pG004 | | |
| | pG004pU004p001C004p001U004 | | |
| 125 | A004p001C004p001C004pU004pG004pU004pU007pU004pU007 | SS | 1736 |
| | pG007pC007pU004pU004pU004pU004pG004pU004pA004pA004 | | |
| | pC004pU004 | | |
| | A004p001G007p001U004pU004pA004pC007pA004pA004pA004 | AS | 1737 |
| | pA004pG004pC004pA004pA007pA004pA007pC004pA004pG004 | | |
| | pG004pU004p001C004p001U004 | | |
| 126 | C004pU004pG004pU004pU004pU004pU007pG007pC007pU004p | SS | 1738 |
| | U004pU004pU004pG004pU004pA004pA004pC004pU004 | | |
| | pA004pG007pU004pU004pA004pC007pA004pA004pA004pA004 | AS | 1739 |
| | pG004pC004pA004pA007pA004pA007pC004pA004pG004pG004 | | |
| | pU004 | | |
| 127 | C004pU004pG004pU004pU007pU004pU007pG007pC007pU004p | SS | 1740 |
| | U004pU004pU004pG004pU004pA004pA004pC004pU004 | | |
| | pA004pG007pU004pU004pA004pC007pA004pA007pA007pA004 | AS | 1741 |
| | pG004pC004pA004pA007pA004pA007pC004pA004pG004pG004 | | |
| | pU004 | | |
| 128 | C004pU004pG004pU004pU007pU004pU007pG007pC007pU004p | SS | 1742 |
| | U004pU004pU004pG004pU004pA004pA004pC004pU004 | | |
| | PA004pG007pU004pU004pA004pC007pA004pA004pA004pA004 | AS | 1743 |
| | pG004pC004pA004pA007pA004pA007pC004pA004pG004pG004 | | |
| | pU004 | | |
| 129 | A004pC004pC004pU004pG004pU004pU004pU004pU007pG007p | SS | 1744 |
| | C007pU004pU004pU004pU004pG004pU004pA004pA004pC004p | | |
| | U004 | | |
| | pA004pG007pU004pU004pA004pC007pA004pA004pA004pA004 | AS | 1745 |
| | pG004pC004pA004pA007pA004pA007pC004pA004pG004pG004 | | |
| | pU004pC004pU004 | | |
| 130 | A004pC004pC004pU004pG004pU004pU007pU004pU007pG007p | SS | 1746 |
| | C007pU004pU004pU004pU004pG004pU004pA004pA004pC004p | | |
| | U004 | | |
| | pA004pG007pU004pU004pA004pC007pA004pA007pA007pA004 | AS | 1747 |
| | pG004pC004pA004pA007pA004pA007pC004pA004pG004pG004 | | |
| | pU004pC004pU004 | | |
| 131 | A004pC004pC004pU004pG004pU004pU007pU004pU007pG007p | SS | 1748 |
| | C007pU004pU004pU004pU004pG004pU004pA004pA004pC004p | | |
| | U004 | | |
| | pA004pG007pU004pU004pA004pC007pA004pA004pA004pA004 | AS | 1749 |
| | pG004pC004pA004pA007pA004pA007pC004pA004pG004pG004 | | |
| | pU004pC004pU004 | | |
| 132 | C004p001U004p001G004pU004pU004pU004pU007pG007pC007 | SS | 1750 |
| | pU004pU004pU004pU004pG004pU004pA004pA004pC004pU004 | | |
| | pA004p001G007p001U004pU004pA004pC007pA004pA004pA00 | AS | 1751 |
| | 4pA004pG004pC004pA004pA007pA004pA007pC004pA004pG00 | | |
| | 4p001G004p001U004 | | |
| 133 | C004p001U004p001G004pU004pU007pU004pU007pG007pC007 | SS | 1752 |
| | pU004pU004pU004pU004pG004pU004pA004pA004pC004pU004 | | |
| | pA004p001G007p001U004pU004pA004pC007pA004pA007pA00 | AS | 1753 |
| | 7pA004pG004pC004pA004pA007pA004pA007pC004pA004pG00 | | |
| | 4p001G004p001U004 | | |
| 134 | C004p001U004p001G004pU004pU007pU004pU007pG007pC007 | SS | 1754 |
| | pU004pU004pU004pU004pG004pU004pA004pA004pC004pU004 | | |
| | pA004p001G007p001U004pU004pA004pC007pA004pA004pA00 | AS | 1755 |
| | 4pA004pG004pC004pA004pA007pA004pA007pC004pA004pG00 | | |
| | 4p001G004p001U004 | | |
| 135 | A004p001C004p001C004pU004pG004pU004pU004pU004pU007 | SS | 1756 |
| | pG007pC007pU004pU004pU004pU004pG004pU004pA004pA004 | | |
| | pC004pU004 | | |
| | pA004p001G007p001U004pU004pA004pC007pA004pA004pA00 | AS | 1757 |
| | 4pA004pG004pC004pA004pA007pA004pA007pC004pA004pG00 | | |
| | 4pG004pU004p001C004p001U004 | | |
| 136 | A004p001C004p001C004pU004pG004pU004pU007pU004pU007 | SS | 1758 |
| | pG007pC007pU004pU004pU004pU004pG004pU004pA004pA004 | | |
| | pC004pU004 | | |
| | pA004p001G007p001U004pU004pA004pC007pA004pA007pA00 | AS | 1759 |
| | 7pA004pG004pC004pA004pA007pA004pA007pC004pA004pG00 | | |
| | 4pG004pU004p001C004p001U004 | | |
| 137 | A004p001C004p001C004pU004pG004pU004pU007pU004pU007 | SS | 1760 |
| | pG007pC007pU004pU004pU004pU004pG004pU004pA004pA004 | | |
| | pC004pU004 | | |
| | pA004p001G007p001U004pU004pA004pC007pA004pA004pA00 | AS | 1761 |
| | 4pA004pG004pC004pA004pA007pA004pA007pC004pA004pG00 | | |
| | 4pG004pU004p001C004p001U004 | | |
| 138 | G000pG000pU000pU000pU000pU000pG000pU000pA000pG000p | SS | 1762 |
| | C000pA000pU000pU000pU000pU000pU000pA000pU000 | | |
| | A000pU000pA000pA000pA000pA000pA000pU000pG000pC000p | AS | 1763 |
| | U000pA000pC000pA000pA000pA000pA000pC000pC000pC000p | | |
| | A000 | | |
| 139 | U000pG000pG000pG000pU000pU000pU000pU000pG000pU000p | SS | 1764 |
| | A000pG000pC000pA000pU000pU000pU000pU000pU000pA000p | | |
| | U000 | | |
| | A000pU000pA000pA000pA000pA000pA000pU000pG000pC000p | AS | 1765 |
| | U000pA000pC000pA000pA000pA000pA000pC000pC000pC000p | | |
| | A000pG000pA000 | | |
| 140 | G004pG004pU004pU004pU004pU004pG007pU007pA007pG004p | SS | 1766 |
| | C004pA004pU004pU004pU004pU004pU004pA004pU004 | | |
| | A004pU007pA004pA004pA004pA007pA004pU004pG004pC004p | AS | 1767 |
| | U004pA004pC004pA007pA004pA007pA004pC004pC004pC004p | | |
| | A004 | | |
| 141 | G004pG004pU004pU004pU007pU004pG007pU007pA007pG004p | SS | 1768 |
| | C004pA004pU004pU004pU004pU004pU004pA004pU004 | | |
| | A004pU007pA004pA004pA004pA007pA004pU007pG007pC004p | AS | 1769 |
| | U004pA004pC004pA007pA004pA007pA004pC004pC004pC004p | | |
| | A004 | | |
| 142 | G004pG004pU004pU004pU007pU004pG007pU007pA007pG004p | SS | 1770 |
| | C004pA004pU004pU004pU004pU004pU004pA004pU004 | | |
| | A004pU007pA004pA004pA004pA007pA004pU004pG004pC004p | AS | 1771 |
| | U004pA004pC004pA007pA004pA007pA004pC004pC004pC004p | | |
| | A004 | | |
| 143 | U004pG004pG004pG004pU004pU004pU004pU004pG007pU007p | SS | 1772 |
| | A007pG004pC004pA004pU004pU004pU004pU004pU004pA004p | | |
| | U004 | | |
| | A004pU007pA004pA004pA004pA007pA004pU004pG004pC004p | AS | 1773 |
| | U004pA004pC004pA007pA004pA007pA004pC004pC004pC004p | | |
| | A004pG004pA004 | | |
| 144 | U004pG004pG004pG004pU004pU004pU007pU004pG007pU007p | SS | 1774 |
| | A007pG004pC004pA004pU004pU004pU004pU004pU004pA004p | | |
| | U004 | | |
| | A004pU007pA004pA004pA004pA007pA004pU007pG007pC004p | AS | 1775 |
| | U004pA004pC004pA007pA004pA007pA004pC004pC004pC004p | | |
| | A004pG004pA004 | | |
| 145 | U004pG004pG004pG004pU004pU004pU007pU004pG007pU007p | SS | 1776 |
| | A007pG004pC004pA004pU004pU004pU004pU004pU004pA004p | | |
| | U004 | | |
| | A004pU007pA004pA004pA004pA007pA004pU004pG004pC004p | AS | 1777 |
| | U004pA004pC004pA007pA004pA007pA004pC004pC004pC004p | | |
| | A004pG004pA004 | | |
| 146 | G004p001G004p001U004pU004pU004pU004pG007pU007pA007 | SS | 1778 |
| | pG004pC004pA004pU004pU004pU004pU004pU004pA004pU004 | | |
| | A004p001U007p001A004pA004pA004pA007pA004pU004pG004 | AS | 1779 |
| | pC004pU004pA004pC004pA007pA004pA007pA004pC004pC004 | | |
| | p001C004p001A004 | | |
| 147 | G004p001G004p001U004pU004pU007pU004pG007pU007pA007 | SS | 1780 |
| | pG004pC004pA004pU004pU004pU004pU004pU004pA004pU004 | | |
| | A004p001U007p001A004pA004pA004pA007pA004pU007pG007 | AS | 1781 |
| | pC004pU004pA004pC004pA007pA004pA007pA004pC004pC004 | | |
| | p001C004p001A004 | | |
| 148 | G004p001G004p001U004pU004pU007pU004pG007pU007pA007 | SS | 1782 |
| | pG004pC004pA004pU004pU004pU004pU004pU004pA004pU004 | | |
| | A004p001U007p001A004pA004pA004pA007pA004pU004pG004 | AS | 1783 |
| | pC004pU004pA004pC004pA007pA004pA007pA004pC004pC004 | | |
| | p001C004p001A004 | | |
| 149 | U004p001G004p001G004pG004pU004pU004pU004pU004pG007 | SS | 1784 |
| | pU007pA007pG004pC004pA004pU004pU004pU004pU004pU004 | | |
| | pA004pU004 | | |
| | A004p001U007p001A004pA004pA004pA007pA004pU004pG004 | AS | 1785 |
| | pc004pU004pA004pC004pA007pA004pA007pA004pC004pC004 | | |
| | pC004pA004p001G004p001A004 | | |
| 150 | U004p001G004p001G004pG004pU004pU004pU007pU004pG007 | SS | 1786 |
| | pU007pA007pG004pC004pA004pU004pU004pU004pU004pU004 | | |
| | pA004pU004 | | |
| | A004p001U007p001A004pA004pA004pA007pA004pU007pG007 | AS | 1787 |
| | pC004pU004pA004pC004pA007pA004pA007pA004pC004pC004 | | |
| | pC004pA004p001G004p001A004 | | |
| 151 | U004p001G004p001G004pG004pU004pU004pU007pU004pG007 | SS | 1788 |
| | pU007pA007pG004pC004pA004pU004pU004pU004pU004pU004 | | |
| | pA004pU004 | | |
| | A004p001U007p001A004pA004pA004pA007pA004pU004pG004 | AS | 1789 |
| | pC004pU004pA004pC004pA007pA004pA007pA004pC004pC004 | | |
| | pC004pA004p001G004p001A004 | | |
| 152 | G004pG004pU004pU004pU004pU004pG007pU007pA007pG004p | SS | 1790 |
| | C004pA004pU004pU004pU004pU004pU004pA004pU004 | | |
| | pA004pU007pA004pA004pA004pA007pA004pU004pG004pC004 | AS | 1791 |
| | pU004pA004pC004pA007pA004pA007pA004pC004pC004pC004 | | |
| | pA004 | | |
| 152 | G004pG004pU004pU004pU007pU004pG007pU007pA007pG004p | SS | 1792 |
| | C004pA004pU004pU004pU004pU004pU004pA004pU004 | | |
| | pA004pU007pA004pA004pA004pA007pA004pU007pG007pC004 | AS | 1793 |
| | pU004pA004pC004pA007pA004pA007pA004pC004pC004pC004 | | |
| | pA004 | | |
| 153 | G004pG004pU004pU004pU007pU004pG007pU007pA007pG004p | SS | 1794 |
| | C004pA004pU004pU004pU004pU004pU004pA004pU004 | | |
| | PA004pU007pA004pA004pA004pA007pA004pU004pG004pC004 | AS | 1795 |
| | pU004pA004pC004pA007pA004pA007pA004pC004pC004pC004 | | |
| | pA004 | | |
| 154 | U004pG004pG004pG004pU004pU004pU004pU004pG007pU007p | SS | 1796 |
| | A007pG004pC004pA004pU004pU004pU004pU004pU004pA004p | | |
| | U004 | | |
| | pA004pU007pA004pA004pA004pA007pA004pU004pG004pC004 | AS | 1797 |
| | pU004pA004pC004pA007pA004pA007pA004pC004pC004pC004 | | |
| | pA004pG004pA004 | | |
| 154 | U004pG004pG004pG004pU004pU004pU007pU004pG007pU007p | SS | 1798 |
| | A007pG004pC004pA004pU004pU004pU004pU004pU004pA004p | | |
| | U004 | | |
| | PA004pU007pA004pA004pA004pA007pA004pU007pG007pC004 | AS | 1799 |
| | pU004pA004pC004pA007pA004pA007pA004pC004pC004pC004 | | |
| | pA004pG004pA004 | | |
| 155 | U004pG004pG004pG004pU004pU004pU007pU004pG007pU007p | SS | 1800 |
| | A007pG004pC004pA004pU004pU004pU004pU004pU004pA004p | | |
| | U004 | | |
| | PA004pU007pA004pA004pA004pA007pA004pU004pG004pC004 | AS | 1801 |
| | pU004pA004pC004pA007pA004pA007pA004pC004pC004pC004 | | |
| | pA004pG004pA004p | | |
| 156 | G004p001G004p001U004pU004pU004pU004pG007pU007pA007 | SS | 1802 |
| | pG004pC004pA004pU004pU004pU004pU004pU004pA004pU004 | | |
| | pA004p001U007p001A004pA004pA004pA007pA004pU004pG00 | AS | 1803 |
| | 4pC004pU004pA004pC004pA007pA004pA007pA004pC004pC00 | | |
| | 4p001C004p001A004 | | |
| 157 | G004p001G004p001U004pU004pU007pU004pG007pU007pA007 | SS | 1804 |
| | pG004pC004pA004pU004pU004pU004pU004pU004pA004pU004 | | |
| | pA004p001U007p001A004pA004pA004pA007pA004pU007pG00 | AS | 1805 |
| | 7pC004pU004pA004pC004pA007pA004pA007pA004pC004pC00 | | |
| | 4p001C004p001A004 | | |
| 158 | G004p001G004p001U004pU004pU007pU004pG007pU007pA007 | SS | 1806 |
| | pG004pC004pA004pU004pU004pU004pU004pU004pA004pU004 | | |
| | pA004p001U007p001A004pA004pA004pA007pA004pU004pG00 | AS | 1807 |
| | 4pC004pU004pA004pC004pA007pA004pA007pA004pC004pC00 | | |
| | 4p001C004p001A004 | | |
| 159 | U004p001G004p001G004pG004pU004pU004pU004pU004pG007 | SS | 1808 |
| | pU007pA007pG004pC004pA004pU004pU004pU004pU004pU004 | | |
| | pA004pU004 | | |
| | PA004p001U007p001A004pA004pA004pA007pA004pU004pG00 | AS | 1809 |
| | 4pC004pU004pA004pC004pA007pA004pA007pA004pC004pC00 | | |
| | 4pC004pA004p001G004p001A004 | | |
| 160 | U004p001G004p001G004pG004pU004pU004pU007pU004pG007 | SS | 1810 |
| | pU007pA007pG004pC004pA004pU004pU004pU004pU004pU004 | | |
| | pA004pU004 | | |
| | PA004p001U007p001A004pA004pA004pA007pA004pU007pG00 | AS | 1811 |
| | 7pC004pU004pA004pC004pA007pA004pA007pA004pC004pC00 | | |
| | 4pC004pA004p001G004p001A004 | | |
| 161 | U004p001G004p001G004pG004pU004pU004pU007pU004pG007 | SS | 1812 |
| | pU007pA007pG004pC004pA004pU004pU004pU004pU004pU004 | | |
| | pA004pU004 | | |
| | pA004p001U007p001A004pA004pA004pA007pA004pU004pG00 | AS | 1813 |
| | 4pC004pU004pA004pC004pA007pA004pA007pA004pC004pC00 | | |
| | 4pC004pA004p001G004p001A004 | | |
| 162 | G000pU000pG000pA000pC000pU000pU000pU000pU000pU000p | SS | 1814 |
| | A000pA000pA000pA000pU000pA000pA000pA000pA000 | | |
| | U000pU000pU000pU000pA000pU000pU000pU000pU000pA000p | | |
| | A000pA000pA000pA000pG000pU000pC000pA000pC000pC000p | AS | 1815 |
| | A000 | | |
| 163 | U000pG000pG000pU000pG000pA000pC000pU000pU000pU000p | SS | 1816 |
| | U000pU000pA000pA000pA000pA000pU000pA000pA000pA000p | | |
| | A000 | | |
| | U000pU000pU000pU000pA000pU000pU000pU000pU000pA000p | AS | 1817 |
| | A000pA000pA000pA000pG000pU000pC000pA000pC000pC000p | | |
| | A000pU000pA000 | | |
| 164 | G004pU004pG004pA004pC004pU004pU007pU007pU007pU004p | SS | 1818 |
| | A004pA004pA004pA004pU004pA004pA004pA004pA004 | | |
| | U004pU007pU004pU004pA004pU007pU004pU004pU004pA004p | AS | 1819 |
| | A004pA004pA004pA007pG004pU007pC004pA004pC004pC004p | | |
| | A004 | | |
| 165 | G004pU004pG004pA004pC007pU004pU007pU007pU007pU004p | SS | 1820 |
| | A004pA004pA004pA004pU004pA004pA004pA004pA004 | | |
| | U004pU007pU004pU004pA004pU007pU004pU007pU007pA004p | AS | 1821 |
| | A004pA004pA004pA007pG004pU007pC004pA004pC004pC004p | | |
| | A004 | | |
| 166 | G004pU004pG004pA004pC007pU004pU007pU007pU007pU004p | SS | 1822 |
| | A004pA004pA004pA004pU004pA004pA004pA004pA004 | | |
| | U004pU007pU004pU004pA004pU007pU004pU004pU004pA004p | AS | 1823 |
| | A004pA004pA004pA007pG004pU007pC004pA004pC004pC004p | | |
| | A004 | | |
| 167 | U004pG004pG004pU004pG004pA004pC004pU004pU007pU007p | SS | 1824 |
| | U007pU004pA004pA004pA004pA004pU004pA004pA004pA004p | | |
| | A004 | | |
| | U004pU007pU004pU004pA004pU007pU004pU004pU004pA004p | AS | 1825 |
| | A004pA004pA004pA007pG004pU007pC004pA004pC004pC004p | | |
| | A004pU004pA004 | | |
| 168 | U004pG004pG004pU004pG004pA004pC007pU004pU007pU007p | SS | 1826 |
| | U007pU004pA004pA004pA004pA004pU004pA004pA004pA004p | | |
| | A004 | | |
| | U004pU007pU004pU004pA004pU007pU004pU007pU007pA004p | AS | 1827 |
| | A004pA004pA004pA007pG004pU007pC004pA004pC004pC004p | | |
| | A004pU004pA004 | | |
| 169 | U004pG004pG004pU004pG004pA004pC007pU004pU007pU007p | SS | 1828 |
| | U007pU004pA004pA004pA004pA004pU004pA004pA004pA004p | | |
| | A004 | | |
| | U004pU007pU004pU004pA004pU007pU004pU004pU004pA004p | AS | 1829 |
| | A004pA004pA004pA007pG004pU007pC004pA004pC004pC004p | | |
| | A004pU004pA004 | | |
| 170 | G004p001U004p001G004pA004pC004pU004pU007pU007pU007 | SS | 1830 |
| | pU004pA004pA004pA004pA004pU004pA004pA004pA004pA004 | | |
| | U004p001U007p001U004pU004pA004pU007pU004pU004pU004 | AS | 1831 |
| | pA004pA004pA004pA004pA007pG004pU007pC004pA004pC004 | | |
| | p001C004p001A004 | | |
| 171 | G004p001U004p001G004pA004pC007pU004pU007pU007pU007 | SS | 1832 |
| | pU004pA004pA004pA004pA004pU004pA004pA004pA004pA004 | | |
| | U004p001U007p001U004pU004pA004pU007pU004pU007pU007 | AS | 1833 |
| | pA004pA004pA004pA004pA007pG004pU007pC004pA004pC004 | | |
| | p001C004p001A004 | | |
| 172 | G004p001U004p001G004pA004pC007pU004pU007pU007pU007 | SS | 1834 |
| | pU004pA004pA004pA004pA004pU004pA004pA004pA004pA004 | | |
| | U004p001U007p001U004pU004pA004pU007pU004pU004pU004 | AS | 1835 |
| | pA004pA004pA004pA004pA007pG004pU007pC004pA004pC004 | | |
| | p001C004p001A004 | | |
| 173 | U004p001G004p001G004pU004pG004pA004pC004pU004pU007 | SS | 1836 |
| | pU007pU007pU004pA004pA004pA004pA004pU004pA004pA004 | | |
| | pA004pA004 | | |
| | U004p001U007p001U004pU004pA004pU007pU004pU004pU004 | AS | 1837 |
| | pA004pA004pA004pA004pA007pG004pU007pC004pA004pC004 | | |
| | pC004pA004p001U004p001A004 | | |
| 174 | U004p001G004p001G004pU004pG004pA004pC007pU004pU007 | SS | 1838 |
| | pU007pU007pU004pA004pA004pA004pA004pU004pA004pA004 | | |
| | pA004pA004 | | |
| | U004p001U007p001U004pU004pA004pU007pU004pU007pU007 | AS | 1839 |
| | pA004pA004pA004pA004pA007pG004pU007pC004pA004pC004 | | |
| | pC004pA004p001U004p001A004 | | |
| 175 | U004p001G004p001G004pU004pG004pA004pC007pU004pU007 | SS | 1840 |
| | pu007pU007pU004pA004pA004pA004pA004pU004pA004pA004 | | |
| | pA004pA004 | | |
| | U004p001U007p001U004pU004pA004pU007pU004pU004pU004 | AS | 1841 |
| | pA004pA004pA004pA004pA007pG004pU007pC004pA004pC004 | | |
| | pC004pA004p001U004p001A004 | | |
| 176 | G004pU004pG004pA004pC004pU004pU007pU007pU007pU004p | SS | 1842 |
| | A004pA004pA004pA004pU004pA004pA004pA004pA004 | | |
| | PU004pU007pU004pU004pA004pU007pU004pU004pU004pA004 | AS | 1843 |
| | pA004pA004pA004pA007pG004pU007pC004pA004pC004pC004 | | |
| | pA004 | | |
| 177 | G004pU004pG004pA004pC007pU004pU007pU007pU007pU004p | SS | 1844 |
| | A004pA004pA004pA004pU004pA004pA004pA004pA004 | | |
| | PU004pU007pU004pU004pA004pU007pU004pU007pU007pA004 | AS | 1845 |
| | pA004pA004pA004pA007pG004pU007pC004pA004pC004pC004 | | |
| | pA004 | | |
| 178 | G004pU004pG004pA004pC007pU004pU007pU007pU007pU004p | SS | 1846 |
| | A004pA004pA004pA004pU004pA004pA004pA004pA004 | | |
| | PU004pU007pU004pU004pA004pU007pU004pU004pU004pA004 | AS | 1847 |
| | pA004pA004pA004pA007pG004pU007pC004pA004pC004pC004 | | |
| | pA004 | | |
| 179 | U004pG004pG004pU004pG004pA004pC004pU004pU007pU007p | SS | 1848 |
| | U007pU004pA004pA004pA004pA004pU004pA004pA004pA004p | | |
| | A004 | | |
| | PU004pU007pU004pU004pA004pU007pU004pU004pU004pA004 | AS | 1849 |
| | pA004pA004pA004pA007pG004pU007pC004pA004pC004pC004 | | |
| | pA004pU004pA004 | | |
| 180 | U004pG004pG004pU004pG004pA004pC007pU004pU007pU007p | SS | 1850 |
| | U007pU004pA004pA004pA004pA004pU004pA004pA004pA004p | | |
| | A004 | | |
| | PU004pU007pU004pU004pA004pU007pU004pU007pU007pA004 | AS | 1851 |
| | pA004pA004pA004pA007pG004pU007pC004pA004pC004pC004 | | |
| | pA004pU004pA004 | | |
| 181 | U004pG004pG004pU004pG004pA004pC007pU004pU007pU007p | SS | 1852 |
| | U007pU004pA004pA004pA004pA004pU004pA004pA004pA004p | | |
| | A004 | | |
| | PU004pU007pU004pU004pA004pU007pU004pU004pU004pA004 | AS | 1853 |
| | pA004pA004pA004pA007pG004pU007pC004pA004pC004pC004 | | |
| | pA004pU004pA004 | | |
| 182 | G004p001U004p001G004pA004pC004pU004pU007pU007pU007 | SS | 1854 |
| | pU004pA004pA004pA004pA004pU004pA004pA004pA004pA004 | | |
| | PU004p001U007p001U004pU004pA004pU007pU004pU004pU00 | AS | 1855 |
| | 4pA004pA004pA004pA004pA007pG004pU007pC004pA004pC00 | | |
| | 4p001C004p001A004 | | |
| 183 | G004p001U004p001G004pA004pC007pU004pU007pU007pU007 | SS | 1856 |
| | pU004pA004pA004pA004pA004pU004pA004pA004pA004pA004 | | |
| | PU004p001U007p001U004pU004pA004pU007pU004pU007pU00 | AS | 1857 |
| | 7pA004pA004pA004pA004pA007pG004pU007pC004pA004pC00 | | |
| | 4p001C004p001A004 | | |
| 184 | G004p001U004p001G004pA004pC007pU004pU007pU007pU007 | SS | 1858 |
| | pU004pA004pA004pA004pA004pU004pA004pA004pA004pA004 | | |
| | PU004p001U007p001U004pU004pA004pU007pU004pU004pU00 | AS | 1859 |
| | 4pA004pA004pA004pA004pA007pG004pU007pC004pA004pC00 | | |
| | 4p001C004p001A004 | | |
| 185 | U004p001G004p001G004pU004pG004pA004pC004pU004pU007 | SS | 1860 |
| | pU007pU007pU004pA004pA004pA004pA004pU004pA004pA004 | | |
| | pA004pA004 | | |
| | PU004p001U007p001U004pU004pA004pU007pU004pU004pU00 | AS | 1861 |
| | 4pA004pA004pA004pA004pA007pG004pU007pC004pA004pC00 | | |
| | 4pC004pA004p001U004p001A004 | | |
| 186 | U004p001G004p001G004pU004pG004pA004pC007pU004pU007 | SS | 1862 |
| | pU007pU007pU004pA004pA004pA004pA004pU004pA004pA004 | | |
| | pA004pA004 | | |
| | PU004p001U007p001U004pU004pA004pU007pU004pU007pU00 | AS | 1863 |
| | 7pA004pA004pA004pA004pA007pG004pU007pC004pA004pC00 | | |
| | 4pC004pA004p001U004p001A004 | | |

[1386] Specific codes in the nucleotide sequences are indicated in above, e.g., Tables A and A-1.

[1387] Additional suitable second dsRNAi agent targeting PCSK9 in Table 6b, or variants thereof and synthesis thereof are also described in WO2020/233655, entire contents of which are incorporated herein by reference.

[1388] In some embodiments, the second dsRNAi agent may have a structure of siRNA

[chemical structure]

or a pharmaceutically acceptable salt thereof,
[1389] wherein at least one of Y1 and Y2 is a dsRNA including any one of PCSK9 siRNA in Table 6c, the dsRNA includes:
   [1390] (i) a sense strand; and
   [1391] (ii) an antisense strand forming a duplex with the sense strand.

TABLE 6c

| PCSK9 | | | SEQ ID |
|---|---|---|---|
| siRNA | Sequence (5′-3′) | Strand | NO. |
| 187 | A004p001G004p001A004pC004pC004pU004pG007p0004pU007 | SS | 1864 |
| | pU004p0007pG004pC004p0004pU004pU004pU004pG004pU004 | | |
| | pA004pA004p | | |
| | U004p0010007p001A004pC004pA004pA004pA004pA004pG004 | AS | 1865 |
| | pC004pA004pA007pA004pA007pC004pA007pG004pG004pU004 | | |
| | pC004pU004p001A004p001G004p | | |
| 188 | U004p001U004p001U004pU004pG004pC004pU007pU004pU007 | SS | 1866 |
| | pU004pG007pU004pA004pA004pC004pU004pU004pG004pA004 | | |
| | pA004pA004p | | |
| | U004p001U007p001U004pC004pA004pA004pG004pU004pU004 | AS | 1867 |
| | pA004pC004pA007pA004pA007pA004pG007pC004pA004pA004 | | |
| | pA004pA004p001C004p001A004p | | |
| 189 | C004p001U004p001U004pU004pU004pG004pU007pA004pA007 | SS | 1868 |
| | pC004pU007pU004pG004pA004pA004pG004pA004pU004pA004 | | |
| | pU004 pU004 | | |
| | A004p001A007p001U004pA004pU004pC004pU004pU004pC004 | AS | 1869 |
| | pA004pA004pG007pU004pU007pA004pC007pA004pA004pA004 | | |
| | pA004pG004p001C004p001A004 | | |
| 190 | U004p001U004p001U004pU004pG004pU004pA007pG004pC007 | SS | 1870 |
| | pA004pU007pU004pU004pU004pU004pA004pU004pU004pA004 | | |
| | pA004pU004 | | |
| | A004p001U007p001U004pA004pA004pU004pA004pA004pA004 | AS | 1871 |
| | pA004pA004pU007pG004pC007pU004pA007pC004pA004pA004 | | |
| | pA004pA004p001C004p001C004 | | |
| 191 | U004p001U004p001G004pU004pA004pG004pC007pA004pU007 | SS | 1872 |
| | pU004pU007pU004pU004pA004pU004pU004pA004pA004pU004 | | |
| | pA004pU004 | | |
| | A004p001U007p001A004pU004pU004pA004pA004pU004pA004 | AS | 1873 |
| | pA004pA004pA007pA004pU007pG004pC007pU004pA004pC004 | | |
| | pA004pA004p001A004p001A004 | | |
| 192 | C004p001U004p001A004pG004pA004pC004pC007pU004pG007 | SS | 1874 |
| | pU004PT002pU004pU004pG004pC004pU004pU004pU004pU004 | | |
| | pG004pU004 | | |
| | A004p001C007p001A004pA007pA007pA007pG004pC007pA004 | AS | 1875 |
| | pA007pA004pA007pC004pA007pG004pG007pU004pC007pU004 | | |
| | pA004pG004p001A004p001A004 | | |
| 193 | C004p001C004p001U004pC004pA004pC004pC007pA004pA007 | SS | 1876 |
| | pG007pA007pU004pC004pC004pU004pG004pC004pA004pU004 | | |
| | pG004pU004 | | |
| | A004p001C007p001A004pU004pG004pC004pA007pG004pG004 | AS | 1877 |
| | pA004pU004pC007pU004pU007pG004pG007pU004pG004pA004 | | |
| | pG004pG004p001U004p001A004 | | |
| 194 | C004p001A004p001C004pC004pA004pA004pG007pA004pU007 | SS | 1878 |
| | pC007pC007pU004pG004pC004pA004pU004pG004pU004pC004 | | |
| | pU004pU004 | | |
| | A004p001A007p001G004pA004pC004pA004pU007pG004pC004 | AS | 1879 |
| | pA004pG004pG007pA004pU007pC004pU007pU004pG004pG004 | | |
| | pU004pG004p001A004p001G004 | | |
| 195 | C004p001A004p001A004pG004pA004pU004pC007pC004pU007 | SS | 1880 |
| | pG007pC007pA004pU004pG004pU004pC004pU004pU004pC004 | | |
| | pC004pA004 | | |
| | U004p001G007p001G004pA004pA004pG004pA007pC004pA004 | AS | 1881 |
| | pU004pG004pC007pA004pG007pG004pA007pU004pC004pU004 | | |
| | pU004pG004p001G004p001U004 | | |
| 196 | U004p001C004p001C004pU004pG004pG004pC007pU004pU007 | SS | 1882 |
| | pC007pC007pU004pG004pG004pU004pG004pA004pA004pG004 | | |
| | pA004pU004 | | |
| | A004p001U007p001C004pU004pU004pC004pA007pC004pC004 | AS | 1883 |
| | pA004pG004pG007pA004pA007pG004pC007pC004pA004pG004 | | |
| | pG004pA004p001A004p001G004 | | |
| 197 | C004p001U004p001G004pG004pC004pU004pU007pC004pC007 | SS | 1884 |
| | pU007pG007pG004pU004pG004pA004pA004pG004pA004pU004 | | |
| | pG004pA004 | | |
| | U004p001C007p001A004pU004pC004pU004pU007pC004pA004 | AS | 1885 |
| | pC004pC004pA007pG004pG007pA004pA007pG004pC004pC004 | | |
| | pA004pG004p001G004p001A004 | | |
| 198 | G004p001G004p001C004pU004pU004pC004pC007pU004pG007 | SS | 1886 |
| | pG007pU007pG004pA004pA004pG004pA004pU004pG004pA004 | | |
| | pG004pU004 | | |
| | A004p001C007p001U004pC004pA004pU004pC007pU004pU004 | AS | 1887 |
| | pC004pA004pC007pC004pA007pG004pG007pA004pA004pG004 | | |
| | pC004pC004p001A004p001G004 | | |
| 199 | G004p001C004p001U004pU004pC004pC004pU007pG004pG007 | SS | 1888 |
| | pU007pG007pA004pA004pG004pA004pU004pG004pA004pG004 | | |
| | pU004pG004 | | |
| | C004p001A007p001C004pU004pC004pA004pU007pC004pU004 | AS | 1889 |
| | pU004pC004pA007pC004pC007pA004pG007pG004pA004pA004 | | |
| | pG004pC004p001C004p001A004 | | |
| 200 | U004p001G004p001G004pA004pG004pC004pU007pG004pG007 | SS | 1890 |
| | pC007pC007pU004pU004pG004pA004pA004pG004pU004pU004 | | |
| | pG004pC004 | | |
| | G004p001C007p001A004pA004pC004pU004pU007pC004pA004 | AS | 1891 |
| | pA004pG004pG007pC004pC007pA004pG007pC004pU004pC004 | | |
| | pC004pA004p001G004p001C004 | | |
| 201 | A004p001G004p001U004pU004pG004pC004pC007pC004pC007 | SS | 1892 |
| | pA007pU007pG004pU004pC004pG004pA004pC004pU004pA004 | | |
| | pC004pA004 | | |
| | U004p001G007p001U004pA004pG004pU004pC007pG004pA004 | AS | 1893 |
| | pC004pA004pU007pG004pG007pG004pG007pC004pA004pA004 | | |
| | pC004pU004p001U004p001C004 | | |
| 202 | U004p001G004p001C004pC004pC004pC004pA007pU004pG007 | SS | 1894 |
| | pU007pC007pG004pA004pC004pU004pA004pC004pA004pU004 | | |
| | pC004pG004 | | |
| | C004p001G007p001A004pU004pG004pU004pA007pG004pU004 | AS | 1895 |
| | pC004pG004pA007pC004pA007pU004pG007pG004pG004pG004 | | |
| | pC004pA004p001A004p001C004 | | |
| 203 | C004p001G004p001G004pU004pA004pC004pC007pG004pG007 | SS | 1896 |
| | pG007pC007pG004pG004pA004pU004pG004pA004pA004pU004 | | |
| | pA004pC004 | | |
| | G004p001U007p001A004pU004pU004pC004pA007pU004pC004 | AS | 1897 |
| | pC004pG004pC007pC004pC007pG004pG007pU004pA004pC004 | | |
| | pC004pG004p001U004p001G004p | | |
| 204 | G004p001G004p001U004pA004pC004pC004pG007pG004pG007 | SS | 1898 |
| | pC007pG007pG004pA004pU004pG004pA004pA004pU004pA004 | | |
| | pC004pC004 | | |
| | G004p001G007p001U004pA004pU004pU004pC007pA004pU004 | AS | 1899 |
| | pC004pC004pG007pC004pC007pC004pG007pG004pU004pA004 | | |
| | pC004pC004p001G004p001U004 | | |
| 205 | G004p001G004p001C004pA004pG004pC004pC007pU004pG007 | SS | 1900 |
| | pG007pU007pG004pG004pA004pG004pG004pU004pG004pU004 | | |
| | pA004pU004 | | |
| | A004p001U007p001A004pC004pA004pC004pC007pU004pC004 | AS | 1901 |
| | pC004pA004pC007pC004pA007pG004pG007pC004pU004pG004 | | |
| | pC004pC004p001U004p001C004 | | |
| 206 | C004p001A004p001G004pC004pC004pU004pG007pG004pU007 | SS | 1902 |
| | pG007pG007pA004pG004pG004pU004pG004pU004pA004pU004 | | |
| | pC004pU004 | | |
| | A004p001G007p001A004pU004pA004pC004pA007pC004pC004 | AS | 1903 |
| | pU004pC004pC007pA004pC007pC004pA007pG004pG004pC004 | | |
| | pU004pG004p001C004p001C004 | | |
| 207 | A004p001G004p001C004pC004pU004pG004pG007pU004pG007 | SS | 1904 |
| | pG007pA007pG004pG004pU004pG004pU004pA004pU004pC004 | | |
| | pU004pC004 | | |
| | G004p001A007p001G004pA004pU004pA004pC007pA004pC004 | AS | 1905 |
| | pC004pU004pC007pC004pA007pC004pC007pA004pG004pG004 | | |
| | pC004pU004p001G004p001C004 | | |
| 208 | G004p001C004p001C004pU004pG004pG004pU007pG004pG007 | SS | 1906 |
| | pA007pG007pG004pU004pG004pU004pA004pU004pC004pU004 | | |
| | pC004pC004 | | |
| | G004p001G007p001A004pG004pA004pU004pA007pC004pA004 | AS | 1907 |
| | pC004pC004pU007pC004pC007pA004pC007pC004pA004pG004 | | |
| | pG004pC004p001U004p001G004 | | |
| 209 | G004p001U004p001A004pU004pC004pU004pC007pC004pU007 | SS | 1908 |
| | pA007pG007pA004pC004pA004pC004pC004pA004pG004pC004 | | |
| | pA004pU004 | | |
| | A004p001U007p001G004pC004pU004pG004pG007pU004pG004 | AS | 1909 |
| | pU004pC004pU007pA004pG007pG004pA007pG004pA004pU004 | | |
| | pA004pC004p001A004p001C004 | | |
| 210 | A004p001U004p001C004pU004pC004pC004pU007pA004pG007 | SS | 1910 |
| | pA007pC007pA004pC004pC004pA004pG004pC004pA004pU004 | | |
| | pA004pC004 | | |
| | G004p001U007p001A004pU004pG004pC004pU007pG004pG004 | AS | 1911 |
| | pU004pG004pU007pC004pU007pA004pG007pG004pA004pG004 | | |
| | pA004pU004p001A004p001C004 | | |
| 211 | U004p001C004p001C004pU004pA004pG004pA007pC004pA007 | SS | 1912 |
| | pc007pC007pA004pG004pC004pA004pU004pA004pC004pA004 | | |
| | pG004pA004 | | |
| | U004p001C007p001U004pG004pU004pA004pU007pG004pC004 | AS | 1913 |
| | pU004pG004pG007pU004pG007pU004pC007pU004pA004pG004 | | |
| | pG004pA004p001G004p001A004 | | |
| 212 | C004p001U004p001A004pG004pA004pC004pA007pC004pC007 | SS | 1914 |
| | pA007pG007pC004pA004pU004pA004pC004pA004pG004pA004 | | |
| | pG004pU004 | | |
| | A004p001C007p001U004pC004pU004pG004pU007pA004pU004 | AS | 1915 |
| | pG004pC004pU007pG004pG007pU004pG007pU004pC004pU004 | | |
| | pA004pG004p001G004p001A004 | | |
| 213 | A004p001U004p001G004pG004pU004pC004pA007pC004pC007 | SS | 1916 |
| | pG007pA007pC004pU004pU004pC004pG004pA004pG004pA004 | | |
| | pA004pU004 | | |
| | A004p001U007p001U004pC004pU004pC004pG007pA004pA004 | AS | 1917 |
| | pG004pU004pC007pG004pG007pU004pG007pA004pC004pC004 | | |
| | pA004pU004p001G004p001A004 | | |
| 214 | U004p001C004p001A004pC004pC004pG004pA007pC004pU007 | SS | 1918 |
| | pU007pC007pG004pA004pG004pA004pA004pU004pG004pU004 | | |
| | pG004pC004 | | |
| | G004p001C007p001A004pC004pA004pU004pU007pC004pU004 | AS | 1919 |
| | pC004pG004pA007pA004pG007pU004pC007pG004pG004pU004 | | |
| | pG004pA004p001C004p001C004 | | |
| 215 | C004p001C004p001U004pC004pA004pU004pA007pG004pG007 | SS | 1920 |
| | pC007pC007pU004pG004pG004pA004pG004pU004pU004pU004 | | |
| | pA004pU004 | | |
| | A004p001U007p001A004pA004pA004pC004pU007pC004pC004 | AS | 1921 |
| | pA004pG004pG007pC004pC007pU004pA007pU004pG004pA004 | | |
| | pG004pG004p001G004p001U004 | | |
| 216 | G004p001G004p001C004pC004pU004pG004pG007pA004pG007 | SS | 1922 |
| | pU007pU007pU004pA004pU004pU004pC004pG004pG004pA004 | | |
| | pA004pA004 | | |
| | U004p001U007p001U004pC004pC004pG004pA007pA004pU004 | AS | 1923 |
| | pA004pA004pA007pC004pU007pC004pC007pA004pG004pG004 | | |
| | pC004pC004p001U004p001A004 | | |
| 217 | G004p001C004p001C004pU004pG004pG004pA007pG004pU007 | SS | 1924 |
| | pU007pU007pA004pU004pU004pC004pG004pG004pA004pA004 | | |
| | pA004pA004 | | |
| | U004p001U007p001U004pU004pC004pC004pG007pA004pA004 | AS | 1925 |
| | pU004pA004pA007pA004pC007pU004pC007pC004pA004pG004 | | |
| | pG004pC004p001C004p001U004 | | |
| 218 | U004p001U004p001G004pU004pG004pU004pC007pA004pC007 | SS | 1926 |
| | pA007pG007pA004pG004pU004pG004pG004pG004pA004pC004 | | |
| | pA004pU004 | | |
| | A004p001U007p001G004pU004pC004pC004pC007pA004pC004 | AS | 1927 |
| | pU004pC004pU007pG004pU007pG004pA007pC004pA004pC004 | | |
| | pA004pA004p001A004p001G004 | | |
| 219 | C004p001U004p001G004pA004pU004pC004pC007pA004pC007 | SS | 1928 |
| | pU007pU007pC004pU004pC004pU004pG004pC004pC004pA004 | | |
| | pA004pA004 | | |
| | U004p001U007p001U004pG004pG004pC004pA007pG004pA004 | AS | 1929 |
| | pG004pA004pA007pG004pU007pG004pG007pA004pU004pC004 | | |
| | pA004pG004p001U004p001C004 | | |
| 220 | A004p001U004p001C004pC004pA004pC004pU007pU004pC007 | SS | 1930 |
| | pU007pC007pU004pG004pC004pC004pA004pA004pA004pG004 | | |
| | pA004pU004 | | |
| | A004p001U007p001C004pU004pU004pU004pG007pG004pC004 | AS | 1931 |
| | pA004pG004pA007pG004pA007pA004pG007pU004pG004pG004 | | |
| | pA004pU004p001C004p001A004 | | |
| 221 | U004p001C004p001U004pC004pU004pG004pC007pC004pA007 | SS | 1932 |
| | pA007pA007pG004pA004pU004pG004pU004pC004pA004pU004 | | |
| | pC004pA004 | | |
| | U004p001G007p001A004pU004pG004pA004pC007pA004pU004 | AS | 1933 |
| | pC004pU004pU007pU004pG007pG004pC007pA004pG004pA004 | | |
| | pG004pA004p001A004p001G004 | | |
| 222 | U004p001G004p001U004pC004pA004pU004pC007pA004pA007 | SS | 1934 |
| | pU007pG007pA004pG004pG004pC004pC004pU004pG004pG004 | | |
| | pU004pU004 | | |
| | A004p001A007p001C004pC004pA004pG004pG007pC004pC004 | AS | 1935 |
| | pU004pC004pA007pU004pU007pG004pA007pU004pG004pA004 | | |
| | pC004pA004p001U004p001C004 | | |
| 223 | A004p001G004p001C004pU004pG004pU004pU007pU004pU007 | SS | 1936 |
| | pG007pC007pA004pG004pG004pA004pC004pU004pG004pU004 | | |
| | pA004pU004 | | |
| | A004p001U007p001A004pC004pA004pG004pU007pC004pC004 | AS | 1937 |
| | pU004pG004pC007pA004pA007pA004pA007pC004pA004pG004 | | |
| | pC004pU004p001G004p001C004 | | |
| 224 | C004p001U004p001G004pU004pU004pU004pU007pG004pC007 | SS | 1938 |
| | pA007pG007pG004pA004pC004pU004pG004pU004pA004pU004 | | |
| | pG004pG004 | | |
| | C004p001C007p001A004pU004pA004pC004pA007pG004pU004 | AS | 1939 |
| | pC004pC004pU007pG004pC007pA004pA007pA004pA004pC004 | | |
| | pA004pG004p001C004p001U004 | | |
| 225 | G004p001G004p001A004pC004pU004pG004pU007pA004pU007 | SS | 1940 |
| | pG007pG007pU004pC004pA004pG004pC004pA004pC004pA004 | | |
| | pC004pU004 | | |
| | A004p001G007p001U004pG004pU004pG004pC007pU004pG004 | AS | 1941 |
| | pA004pC004pC007pA004pU007pA004pC007pA004pG004pU004 | | |
| | pC004pC004p001U004p001G004 | | |
| 226 | A004p001C004p001U004pG004pU004pA004pU007pG004pG007 | SS | 1942 |
| | pU007pC007pA004pG004pC004pA004pC004pA004pC004pU004 | | |
| | pC004pG004 | | |
| | C004p001G007p001A004pG004pU004pG004pU007pG004pC004 | AS | 1943 |
| | pU004pG004pA007pC004pC007pA004pU007pA004pC004pA004 | | |
| | pG004pU004p001C004p001C004 | | |
| 227 | C004p001C004p001C004pA004pG004pG004pU007pC004pU007 | SS | 1944 |
| | pG007pG007pA004pA004pU004pG004pC004pA004pA004pA004 | | |
| | pG004pU004 | | |
| | A004p001C007p001U004pU004pU004pG004pC007pA004pU004 | AS | 1945 |
| | pU004pC004pC007pA004pG007pA004pC007pC004pU004pG004 | | |
| | pG004pG004p001G004p001C004 | | |
| 228 | U004p001C004p001U004pG004pG004pA004pA007pU004pG007 | SS | 1946 |
| | pC007pA007pA004pA004pG004pU004pC004pA004pA004pG004 | | |
| | pG004pA004 | | |
| | U004p001C007p001C004pU004pU004pG004pA007pC004pU004 | AS | 1947 |
| | pU004pU004pG007pC004pA007pU004pU007pC004pC004pA004 | | |
| | pG004pA004p001C004p001C004 | | |
| 229 | U004p001A004p001G004pA004pC004pA004pA007pC004pA007 | SS | 1948 |
| | pC007pG007pU004pG004pU004pG004pU004pA004pG004pU004 | | |
| | pC004pA004 | | |
| | U004p001G007p001A004pC004pU004pA004pC007pA004pC004 | AS | 1949 |
| | pA004pC004pG007pU004pG007pU004pU007pG004pU004pC004 | | |
| | pU004pA004p001C004p001G004 | | |
| 230 | C004p001U004p001G004pG004pG004pG004pC007pU004pG007 | SS | 1950 |
| | pA007pG007pC004pU004pU004pU004pA004pA004pA004pA004 | | |
| | pU004pG004 | | |
| | C004p001A007p001U004pU004pU004pU004pA007pA004pA004 | AS | 1951 |
| | pG004pC004pU007pC004pA007pG004pC007pC004pC004pC004 | | |
| | pA004pG004p001C004p001C004 | | |
| 231 | U004p001G004p001G004pG004pG004pC004pU007pG004pA007 | SS | 1952 |
| | pG007pC007pU004pU004pU004pA004pA004pA004pA004pU004 | | |
| | pG004pG004 | | |
| | C004p001C007p001A004pU004pU004pU004pU007pA004pA004 | AS | 1953 |
| | pA004pG004pC007pU004pC007pA004pG007pC004pC004pC004 | | |
| | pC004pA004p001G004p001C004 | | |
| 232 | C004p001C004p001C004pU004pC004pA004pC007pU004pG007 | SS | 1954 |
| | pU007pG007pG004pG004pG004pC004pA004pU004pU004pU004 | | |
| | pC004pA004 | | |
| | U004p001G007p001A004pA004pA004pU004pG007pC004pC004 | AS | 1955 |
| | pC004pC004pA007pC004pA007pG004pU007pG004pA004pG004 | | |
| | pG004pG004p001A004p001G004 | | |
| 233 | C004p001A004p001C004pU004pG004pU004pG007pG004pG007 | SS | 1956 |
| | pG007pC007pA004pU004pU004pU004pC004pA004pC004pC004 | | |
| | pA004pU004 | | |
| | A004p001U007p001G004pG004pU004pG004pA007pA004pA004 | AS | 1957 |
| | pU004pG004pC007pC004pC007pC004pA007pC004pA004pG004 | | |
| | pU004pG004p001A004p001G004 | | |
| 234 | C004p001U004p001G004pU004pG004pG004pG007pG004pC007 | SS | 1958 |
| | pA007pU007pU004pU004pC004pA004pC004pC004pA004pU004 | | |
| | pU004pC004 | | |
| | G004p001A007p001A004pU004pG004pG004pU007pG004pA004 | AS | 1959 |
| | pA004pA004pU007pG004pC007pC004pC007pC004pA004pC004 | | |
| | pA004pG004p001U004p001G004 | | |
| 235 | U004p001G004p001G004pG004pG004pC004pA007pU004pU007 | SS | 1960 |
| | pU007pC007pA004pC004pC004pA004pU004pU004pC004pA004 | | |
| | pA004pA004 | | |
| | U004p001U007p001U004pG004pA004pA004pU007pG004pG004 | AS | 1961 |
| | pU004pG004pA007pA004pA007pU004pG007pC004pC004pC004 | | |
| | pC004pA004p001C004p001A004 | | |
| 236 | G004p001C004p001A004pU004pU004pU004pC007pA004pC007 | SS | 1962 |
| | pc007pA007pU004pU004pC004pA004pA004pA004pC004pA004 | | |
| | pG004pG004 | | |
| | C004p001C007p001U004pG004pU004pU004pU007pG004pA004 | AS | 1963 |
| | pA004pU004pG007pG004pU007pG004pA007pA004pA004pU004 | | |
| | pG004pC004p001C004p001C004 | | |
| 237 | U004p001U004p001U004pA004pU004pU004pG007pA004pG007 | SS | 1964 |
| | pc007pU007pC004pU004pU004pG004pU004pU004pC004pC004 | | |
| | pG004pU004 | | |
| | A004p001C007p001G004pG004pA004pA004pC007pA004pA004 | AS | 1965 |
| | pG004pA004pG007pC004pU007pC004pA007pA004pU004pA004 | | |
| | pA004pA004p001A004p001G004 | | |
| 238 | C004p001C004p001C004pU004pC004pA004pU007pC004pU007 | SS | 1966 |
| | pc007pC007pA004pG004pC004pU004pA004pA004pC004pU004 | | |
| | pG004pU004 | | |
| | A004p001C007p001A004pG004pU004pU004pA007pG004pC004 | AS | 1967 |
| | pU004pG004pG007pA004pG007pA004pU007pG004pA004pG004 | | |
| | pG004pG004p001C004p001C004 | | |
| 239 | A004p001C004p001U004pG004pA004pG004pC007pC004pA007 | SS | 1968 |
| | pG007pA007pA004pA004pC004pG004pC004pA004pG004pA004 | | |
| | pU004pU004 | | |
| | A004p001A007p001U004pC004pU004pG004pC007pG004pU004 | AS | 1969 |
| | pU004pU004pC007pU004pG007pG004pC007pU004pC004pA004 | | |
| | pG004pU004p001U004p001C004 | | |
| 240 | U004p001G004p001A004pG004pC004pC004pA007pG004pA007 | SS | 1970 |
| | pA007pA007pC004pG004pC004pA004pG004pA004pU004pU004 | | |
| | pG004pG004 | | |
| | C004p001C007p001A004pA004pU004pC004pU007pG004pC004 | AS | 1971 |
| | pG004pU004pU007pU004pC007pU004pG007pG004pC004pU004 | | |
| | pC004pA004p001G004p001U004 | | |
| 241 | G004p001A004p001A004pG004pC004pC004pA007pA004pG007 | SS | 1972 |
| | pC007pC007pU004pC004pU004pU004pC004pU004pU004pA004 | | |
| | pC004pU004 | | |
| | A004p001G007p001U004pA004pA004pG004pA007pA004pG004 | AS | 1973 |
| | pA004pG004pG007pC004pU007pU004pG007pG004pC004pU004 | | |
| | pU004pC004p001A004p001G004 | | |
| 242 | A004p001G004p001C004pC004pA004pA004pG007pC004pC007 | SS | 1974 |
| | pU007pC007pU004pU004pC004pU004pU004pA004pC004pU004 | | |
| | pU004pC004 | | |
| | G004p001A007p001A004pG004pU004pA004pA007pG004pA004 | AS | 1975 |
| | pA004pG004pA007pG004pG007pC004pU007pU004pG004pG004 | | |
| | pc004pU004p001U004p001C004 | | |
| 243 | C004p001C004p001C004pA004pA004pG004pC007pA004pA007 | SS | 1976 |
| | pG007pC007pA004pG004pA004pC004pA004pU004pU004pU004 | | |
| | pA004pU004 | | |
| | A004p001U007p001A004pA004pA004pU004pG007pU004pC004 | AS | 1977 |
| | pU004pG004pC007pU004pU007pG004pC007pU004pU004pG004 | | |
| | pG004pG004p001U004p001G004 | | |
| 244 | C004p001C004p001A004pA004pG004pC004pA007pA004pG007 | SS | 1978 |
| | pC007pA007pG004pA004pC004pA004pU004pU004pU004pA004 | | |
| | pU004pC004 | | |
| | G004p001A007p001U004pA004pA004pA004pU007pG004pU004 | AS | 1979 |
| | pC004pU004pG007pC004pU007pU004pG007pC004pU004pU004 | | |
| | pG004pG004p001G004p001U004 | | |
| 245 | U004p001U004p001U004pU004pG004pG004pG007pU004pC007 | SS | 1980 |
| | pU007pG007pU004pC004pC004pU004pC004pU004pC004pU004 | | |
| | pG004pU004 | | |
| | A004p001C007p001A004pG004pA004pG004pA007pG004pG004 | AS | 1981 |
| | pA004pC004pA007pG004pA007pC004pC007pC004pA004pA004 | | |
| | pA004pA004p001G004p001A004 | | |
| 246 | U004p001C004p001U004pG004pU004pC004pC007pU004pC007 | SS | 1982 |
| | pU007pC007pU004pG004pU004pU004pG004pC004pC004pU004 | | |
| | pU004pU004 | | |
| | A004p001A007p001A004pG004pG004pC004pA007pA004pC004 | AS | 1983 |
| | pA004pG004pA007pG004pA007pG004pG007pA004pC004pA004 | | |
| | pG004pA004p001C004p001C004 | | |
| 247 | C004p001U004p001G004pU004pC004pC004pU007pC004pU007 | SS | 1984 |
| | pC007pU007pG004pU004pU004pG004pC004pC004pU004pU004 | | |
| | pU004pU004 | | |
| | A004p001A007p001A004pA004pG004pG004pC007pA004pA004 | AS | 1985 |
| | pC004pA004pG007pA004pG007pA004pG007pG004pA004pC004 | | |
| | pA004pG004p001A004p001C004 | | |
| 248 | U004p001G004p001U004pC004pC004pU004pC007pU004pC007 | SS | 1986 |
| | pU007pG007pU004pU004pG004pC004pC004pU004pU004pU004 | | |
| | pU004pU004 | | |
| | A004p001A007p001A004pA004pA004pG007pC004pA004pA004 | AS | 1987 |
| | pC004pA007pG004pA007pG004pA007pG004pG004pA004pC004 | | |
| | pA004p001G004p001A004 | | |
| 249 | G004p001U004p001C004pC004pU004pC004pU007pC004pU007 | SS | 1988 |
| | pG007pU007pU004pG004pC004pC004pU004pU004pU004pU004 | | |
| | pU004pA004 | | |
| | U004p001A007p001A004pA004pA004pA004pG007pG004pC004 | AS | 1989 |
| | pA004pA004pC007pA004pG007pA004pG007pA004pG004pG004 | | |
| | pA004pC004p001A004p001G004 | | |
| 250 | C004p001C004p001U004pC004pU004pC004pU007pG004pU007 | SS | 1990 |
| | pU007pG007pC004pC004pU004pU004pU004pU004pU004pA004 | | |
| | pC004pA004 | | |
| | U004p001G007p001U004pA004pA004pA004pA007pA004pG004 | AS | 1991 |
| | pG004pC004pA007pA004pC007pA004pG007pA004pG004pA004 | | |
| | pG004pG004p001A004p001C004 | | |
| 251 | G004p001U004p001U004pG004pC004pC004pU007pU004pU007 | SS | 1992 |
| | pU007pU007pA004pC004pA004pG004pC004pC004pA004pA004 | | |
| | pC004pU004 | | |
| | A004p001G007p001U004pU004pG004pG004pC007pU004pG004 | AS | 1993 |
| | pU004pA004pA007pA004pA007pA004pG007pG004pC004pA004 | | |
| | pA004pC004p001A004p001G004 | | |
| 252 | U004p001G004p001C004pC004pU004pU004pU007pU004pU007 | SS | 1994 |
| | pA007pC007pA004pG004pC004pC004pA004pA004pC004pU004 | | |
| | pU004pU004 | | |
| | A004p001A007p001A004pG004pU004pU004pG007pG004pC004 | AS | 1995 |
| | pU004pG004pU007pA004pA007pA004pA007pA004pG004pG004 | | |
| | pC004pA004p001A004p001C004 | | |
| 253 | C004p001C004p001U004pU004pU004pU004pU007pA004pC007 | SS | 1996 |
| | pA007pG007pC004pC004pA004pA004pC004pU004pU004pU004 | | |
| | pU004pC004 | | |
| | G004p001A007p001A004pA004pA004pG004pU007pU004pG004 | AS | 1997 |
| | pG004pC004pU007pG004pU007pA004pA007pA004pA004pA004 | | |
| | pG004pG004p001C004p001A004 | | |
| 254 | U004p001U004p001U004pU004pA004pC004pA007pG004pC007 | SS | 1998 |
| | pC007pA007pA004pC004pU004pU004pU004pU004pC004pU004 | | |
| | pA004pG004 | | |
| | C004p001U007p001A004pG004pA004pA004pA007pA004pG004 | AS | 1999 |
| | pU004pU004pG007pG004pC007pU004pG007pU004pA004pA004 | | |
| | pA004pA004p001A004p001G004 | | |
| 255 | G004p001C004p001C004pA004pA004pC004pU007pU004pU007 | SS | 2000 |
| | pU007pC007pU004pA004pG004pA004pC004pC004pU004pG004 | | |
| | pU004pU004 | | |
| | A004p001A007p001C004pA004pG004pG004pU007pC004pU004 | AS | 2001 |
| | pA004pG004pA007pA004pA007pA004pG007pU004pU004pG004 | | |
| | pG004pC004p001U004p001G004 | | |
| 256 | C004p001C004p001A004pA004pC004pU004pU007pU004pU007 | SS | 2002 |
| | pC007pU007pA004pG004pA004pC004pC004pU004pG004pU004 | | |
| | pU004pU004 | | |
| | A004p001A007p001A004pC004pA004pG004pG007pU004pC004 | AS | 2003 |
| | pU004pA004pG007pA004pA007pA004pA007pG004pU004pU004 | | |
| | pG004pG004p001C004p001U004 | | |
| 257 | C004p001A004p001A004pC004pU004pU004pU007pU004pC007 | SS | 2004 |
| | pU007pA007pG004pA004pC004pC004pU004pG004pU004pU004 | | |
| | pU004pU004 | | |
| | A004p001A007p001A004pA004pC004pA004pG007pG004pU004 | AS | 2005 |
| | pC004pU004pA007pG004pA007pA004pA007pA004pG004pU004 | | |
| | pU004pG004p001G004p001C004 | | |
| 258 | A004p001C004p001U004pU004pU004pU004pC007pU004pA007 | SS | 2006 |
| | pG007pA007pC004pC004pU004pG004pU004pU004pU004pU004 | | |
| | pG004pC004 | | |
| | G004p001C007p001A004pA004pA004pA004pC007pA004pG004 | AS | 2007 |
| | pG004pU004pC007pU004pA007pG004pA007pA004pA004pA004 | | |
| | pG004pU004p001U004p001G004 | | |
| 259 | U004p001U004p001U004pU004pC004pU004pA007pG004pA007 | SS | 2008 |
| | pC007pC007pU004pG004pU004pU004pU004pU004pG004pC004 | | |
| | pU004pU004 | | |
| | A004p001A007p001G004pC004pA004pA004pA007pA004pC004 | AS | 2009 |
| | pA004pG004pG007pU004pC007pU004pA007pG004pA004pA004 | | |
| | pA004pA004p001G004p001U004 | | |
| 260 | U004p001U004p001U004pC004pU004pA004pG007pA004pC007 | SS | 2010 |
| | pC007pU007pG004pU004pU004pU004pU004pG004pC004pU004 | | |
| | pU004pU004 | | |
| | A004p001A007p001A004pG004pC004pA004pA007pA004pA004 | AS | 2011 |
| | pC004pA004pG007pG004pU007pC004pU007pA004pG004pA004 | | |
| | pA004pA004p001A004p001G004 | | |
| 261 | U004p001C004p001U004pA004pG004pA004pC007pC004pU007 | SS | 2012 |
| | pG007pU007pU004pU004pU004pG004pC004pU004pU004pU004 | | |
| | pU004pG004 | | |
| | C004p001A007p001A004pA004pA004pG004pC007pA004pA004 | AS | 2013 |
| | pA004pA004pC007pA004pG007pG004pU007pC004pU004pA004 | | |
| | pG004pA004p001A004p001A004 | | |
| 262 | C004p001U004p001A004pG004pA004pC004pC007pU004pG007 | SS | 2014 |
| | pU007pU007pU004pU004pG004pC004pU004pU004pU004pU004 | | |
| | pG004pU004 | | |
| | A004p001C007p001A004pA004pA004pA004pG007pC004pA004 | AS | 2015 |
| | pA004pA004pA007pC004pA007pG004pG007pU004pC004pU004 | | |
| | pA004pG004p001A004p001A004 | | |
| 263 | U004p001A004p001G004pA004pC004pC004pU007pG004pU007 | SS | 2016 |
| | pU007pU007pU004pG004pC004pU004pU004pU004pU004pG004 | | |
| | pU004pA004 | | |
| | U004p001A007p001C004pA004pA004pA004pA007pG004pC004 | AS | 2017 |
| | pA004pA004pA007pA004pC007pA004pG007pG004pU004pC004 | | |
| | pU004pA004p001G004p001A004 | | |
| 264 | A004p001G004p001A004pC004pC004pU004pG007pU004pU007 | SS | 2018 |
| | pU007pU007pG004pC004pU004pU004pU004pU004pG004pU004 | | |
| | pA004pA004 | | |
| | U004p001U007p001A004pC004pA004pA004pA007pA004pG004 | AS | 2019 |
| | pC004pA004pA007pA004pA007pC004pA007pG004pG004pU004 | | |
| | pC004pU004p001A004p001G004 | | |
| 265 | G004p001A004p001C004pC004pU004pG004pU007pU004pU007 | SS | 2020 |
| | pU007pG007pC004pU004pU004pU004pU004pG004pU004pA004 | | |
| | pA004pC004 | | |
| | G004p001U007p001U004pA004pC004pA004pA007pA004pA004 | AS | 2021 |
| | pG004pC004pA007pA004pA007pA004pC007pA004pG004pG004 | | |
| | pU004pC004p001U004p001A004 | | |
| 266 | A004p001C004p001C004pU004pG004pU004pU007pU004pU007 | SS | 2022 |
| | pG007pC007pU004pU004pU004pU004pG004pU004pA004pA004 | | |
| | pC004pU004 | | |
| | A004p001G007p001U004pU004pA004pC004pA007pA004pA004 | AS | 2023 |
| | pA004pG004pC007pA004pA007pA004pA007pC004pA004pG004 | | |
| | pG004pU004p001C004p001U004 | | |
| 267 | C004p001U004p001G004pU004pU004pU004pU007pG004pC007 | SS | 2024 |
| | pU007pU007pU004pU004pG004pU004pA004pA004pC004pU004 | | |
| | pU004pG004 | | |
| | C004p001A007p001A004pG004pU004pU004pA007pC004pA004 | AS | 2025 |
| | pA004pA004pA007pG004pC007pA004pA007pA004pA004pC004 | | |
| | pA004pG004p001G004p001U004 | | |
| 268 | G004p001U004p001U004pU004pU004pG004pC007pU004pU007 | SS | 2026 |
| | pU007pU007pG004pU004pA004pA004pC004pU004pU004pG004 | | |
| | pA004pA004 | | |
| | U004p001U007p001C004pA004pA004pG004pU007pU004pA004 | AS | 2027 |
| | pC004pA004pA007pA004pA007pG004pC007pA004pA004pA004 | | |
| | pA004pC004p001A004p001G004 | | |
| 269 | U004p001U004p001U004pG004pC004pU004pU007pU004pU007 | SS | 2028 |
| | pG007pU007pA004pA004pC004pU004pU004pG004pA004pA004 | | |
| | pG004pA004 | | |
| | U004p001C007p001U004pU004pC004pA004pA007pG004pU004 | AS | 2029 |
| | pU004pA004pC007pA004pA007pA004pA007pG004pC004pA004 | | |
| | pA004pA004p001A004p001C004 | | |
| 270 | U004p001U004p001G004pC004pU004pU004pU007pU004pG007 | SS | 2030 |
| | pU007pA007pA004pC004pU004pU004pG004pA004pA004pG004 | | |
| | pA004pU004 | | |
| | A004p001U007p001C004pU004pU004pC004pA007pA004pG004 | AS | 2031 |
| | pU004pU004pA007pC004pA007pA004pA007pA004pG004pC004 | | |
| | pA004pA004p001A004p001A004 | | |
| 271 | C004p001U004p001U004pU004pU004pG004pU007pA004pA007 | SS | 2032 |
| | pC007pU007pU004pG004pA004pA004pG004pA004pU004pA004 | | |
| | pU004pU004 | | |
| | A004p001A007p001U004pA004pU004pC004pU007pU004pC004 | AS | 2033 |
| | pA004pA004pG007pU004pU007pA004pC007pA004pA004pA004 | | |
| | pA004pG004p001C004p001A004 | | |
| 272 | U004p001U004p001U004pU004pG004pU004pA007pA004pC007 | SS | 2034 |
| | pU007pU007pG004pA004pA004pG004pA004pU004pA004pU004 | | |
| | pU004pU004 | | |
| | A004p001A007p001A004pU004pA004pU004pC007pU004pU004 | AS | 2035 |
| | pC004pA004pA007pG004pU007pU004pA007pC004pA004pA004 | | |
| | pA004pA004p001G004p001C004 | | |
| 273 | U004p001U004p001U004pG004pU004pA004pA007pC004pU007 | SS | 2036 |
| | pU007pG007pA004pA004pG004pA004pU004pA004pU004pU004 | | |
| | pU004pA004 | | |
| | U004p001A007p001A004pA004pU004pA004pU007pC004pU004 | AS | 2037 |
| | pU004pC004pA007pA004pG007pU004pU007pA004pC004pA004 | | |
| | pA004pA004p001A004p001G004 | | |
| 274 | U004p001A004p001A004pC004pU004pU004pG007pA004pA007 | SS | 2038 |
| | pG007pA007pU004pA004pU004pU004pU004pA004pU004pU004 | | |
| | pC004pU004 | | |
| | A004p001G007p001A004pA004pU004pA004pA007pA004pU004 | AS | 2039 |
| | pA004pU004pC007pU004pU007pC004pA007pA004pG004pU004 | | |
| | pU004pA004p001C004p001A004 | | |
| 275 | A004p001A004p001C004pU004pU004pG004pA007pA004pG007 | SS | 2040 |
| | pA007pU007pA004pU004pU004pU004pA004pU004pU004pC004 | | |
| | pU004pG004 | | |
| | C004p001A007p001G004pA004pA004pU004pA007pA004pA004 | AS | 2041 |
| | pU004pA004pU007pC004pU007pU004pC007pA004pA004pG004 | | |
| | pU004pU004p001A004p001C004 | | |
| 276 | A004p001A004p001G004pA004pU004pA004pU007pU004pU007 | SS | 2042 |
| | pA007pU007pU004pC004pU004pG004pG004pG004pU004pU004 | | |
| | pU004pU004 | | |
| | A004p001A007p001A004pA004pC004pC004pC007pA004pG004 | AS | 2043 |
| | pA004pA004pU007pA004pA007pA004pU007pA004pU004pC004 | | |
| | pU004pU004p001C004p001A004 | | |
| 277 | A004p001G004p001A004pU004pA004pU004pU007pU004pA007 | SS | 2044 |
| | pU007pU007pC004pU004pG004pG004pG004pU004pU004pU004 | | |
| | pU004pG004 | | |
| | C004p001A007p001A004pA004pA004pC004pC007pC004pA004 | AS | 2045 |
| | pG004pA004pA007pU004pA007pA004pA007pU004pA004pU004 | | |
| | pC004pU004p001U004p001C004 | | |
| 278 | A004p001U004p001A004pU004pU004pU004pA007pU004pU007 | SS | 2046 |
| | pc007pU007pG004pG004pG004pU004pU004pU004pU004pG004 | | |
| | pU004pA004 | | |
| | U004p001A007p001C004pA004pA004pA004pA007pC004pC004 | AS | 2047 |
| | pC004pA004pG007pA004pA007pU004pA007pA004pA004pU004 | | |
| | pA004pU004p001C004p001U004 | | |
| 279 | U004p001A004p001U004pU004pU004pA004pU007pU004pC007 | SS | 2048 |
| | pU007pG007pG004pG004pU004pU004pU004pU004pG004pU004 | | |
| | pA004pG004 | | |
| | C004p001U007p001A004pC004pA004pA004pA007pA004pC004 | AS | 2049 |
| | pC004pC004pA007pG004pA007pA004pU007pA004pA004pA004 | | |
| | pU004pA004p001U004p001C004 | | |
| 280 | U004p001U004p001C004pU004pG004pG004pG007pU004pU007 | SS | 2050 |
| | pU007pU007pG004pU004pA004pG004pC004pA004pU004pU004 | | |
| | pU004pU004 | | |
| | A004p001A007p001A004pA004pU004pG004pC007pU004pA004 | AS | 2051 |
| | pC004pA004pA007pA004pA007pC004pC007pC004pA004pG004 | | |
| | pA004pA004p001U004p001A004 | | |
| 281 | G004p001G004p001U004pU004pU004pU004pG007pU004pA007 | SS | 2052 |
| | pG007pC007pA004pU004pU004pU004pU004pU004pA004pU004 | | |
| | pU004pA004 | | |
| | U004p001A007p001A004pU004pA004pA004pA007pA004pA004 | AS | 2053 |
| | pU004pG004pC007pU004pA007pC004pA007pA004pA004pA004 | | |
| | pC004pC004p001C004p001A004 | | |
| 282 | G004p001U004p001U004pU004pU004pG004pU007pA004pG007 | SS | 2054 |
| | pC007pA007pU004pU004pU004pU004pU004pA004pU004pU004 | | |
| | pA004pA004 | | |
| | U004p001U007p001A004pA004pU004pA004pA007pA004pA004 | AS | 2055 |
| | pA004pU004pG007pC004pU007pA004pC007pA004pA004pA004 | | |
| | pA004pC004p001C004p001C004 | | |
| 283 | U004p001U004p001U004pU004pG004pU004pA007pG004pC007 | SS | 2056 |
| | pA007pU007pU004pU004pU004pU004pA004pU004pU004pA004 | | |
| | pA004pU004 | | |
| | A004p001U007p001U004pA004pA004pU004pA007pA004pA004 | AS | 2057 |
| | pA004pA004pU007pG004pC007pU004pA007pC004pA004pA004 | | |
| | pA004pA004p001C004p001C004 | | |
| 284 | A004p001U004p001U004pU004pU004pU004pA007pU004pU007 | SS | 2058 |
| | pA007pA007pU004pA004pU004pG004pG004pU004pG004pA004 | | |
| | pC004pU004 | | |
| | A004p001G007p001U004pC004pA004pC004pC007pA004pU004 | AS | 2059 |
| | pA004pU004pU007pA004pA007pU004pA007pA004pA004pA004 | | |
| | pA004pU004p001G004p001C004 | | |
| 285 | U004p001U004p001U004pU004pU004pA004pU007pU004pA007 | SS | 2060 |
| | pA007pU007pA004pU004pG004pG004pU004pG004pA004pC004 | | |
| | pU004pU004 | | |
| | A004p001A007p001G004pU004pC004pA004pC007pC004pA004 | AS | 2061 |
| | pU004pA004pU007pU004pA007pA004pU007pA004pA004pA004 | | |
| | pA004pA004p001U004p001G004 | | |
| 286 | U004p001U004p001U004pU004pG004pC004pU007pU004pU007 | SS | 2062 |
| | pU007pG007pU004pA004pA004pC004pU004pU004pG004pA004 | | |
| | pA004pG004 | | |
| | C004p001U007p001U004pC004pA004pA004pG007pU004pU004 | AS | 2063 |
| | pA004pC004pA007pA004pA007pA004pG007pC004pA004pA004 | | |
| | pA004pA004p001C004p001A004 | | |
| 287 | U004p001U004p001G004pU004pA004pG004pC007pA004pU007 | SS | 2064 |
| | pU007pU007pU004pU004pA004pU004pU004pA004pA004pU004 | | |
| | pA004pU004 | | |
| | A004p001U007p001A004pU004pU004pA004pA007pU004pA004 | AS | 2065 |
| | pA004pA004pA007pA004pU007pG004pC007pU004pA004pC004 | | |
| | pA004pA004p001A004p001A004 | | |

[1392] Specific codes in the nucleotide sequences are indicated in above, e.g., Tables A and A-1.

[1393] In some embodiments, in Formula (Z-3-a), Y1 is the dsRNA as described in Table 6c, and Y2 is hydroxy group or a salt. In some embodiments, in Formula (Z-3-a), Y2 is the dsRNA as described in Table 6c, and Y1 is hydroxy group or a salt. In some embodiments, in Formula (Z-3-a), each Y1 and Y2 is independently the dsRNA as described in Table 6c.

[1394] Additional suitable second dsRNAi agent targeting PCSK9 in Table 6c and synthesis thereof are also described in WO202/3049294, entire contents of which are incorporated herein by reference.

[1395] In some embodiments, the second dsRNAi agent may have a structure of

[chemical structure]

[1396] wherein the dsRNA includes any one of PCSK9 siRNA in Table 6d, the dsRNA includes:
   [1397] (i) a sense strand; and
   [1398] (ii) an antisense strand forming a duplex with the sense strand.

TABLE 6d

| PCSK9 | | | SEQ ID |
|---|---|---|---|
| SiRNA | Sequence (5′-3′) | Strand | NO |
| 288 | U007p001G004p001U007pC004pC007pU004pC007pU004pC007 | AS | 2066 |
| | pU007pG007pU004pU007pG004pC007pC004pU007pU004pU007 | | |
| | pU004pU007 | | |
| | A004p001A007p001A004pA007pA004pG007pG004pC007pA004 | SS | 2067 |
| | pA007pC004pA004pG004pA007pG004pA007pG004pG007pA004 | | |
| | pC007pA004p001G004p001A004 | | |
| 289 | G007p001U004p001C007pC004pU007pC004pU007pC004pU007 | AS | 2068 |
| | pG007pU007pU004pG007pC004pC007pU004pU007pU004pU007 | | |
| | pU004pA007 | | |
| | U004p001A007p001A004pA007pA004pA007pG004pG007pC004 | SS | 2069 |
| | pA007pA004pC004pA004pG007pA004pG007pA004pG007pG004 | | |
| | pA007pC004p001A004p001G004 | | |
| 290 | A007p001G004p001A007pC004pC007pU004pG007pU004pU007 | AS | 2070 |
| | pU007pU007pG004pC007pU004pU007pU004pU007pG004pU007 | | |
| | pA004pA007 | | |
| | U004p001U007p001A004pC007pA004pA007pA004pA007pG004 | SS | 2071 |
| | pC007pA004pA004pA007pC004pA007pG004pG007pU004pC007 | | |
| | pU004p001A004p001G004 | | |
| 291 | G007p001A004p001C007pC004pU007pG004pU007pU004pU007 | AS | 2072 |
| | pU007pG007pC004pU007pU004pU007pU004pG007pU004pA007 | | |
| | pA004pC007 | | |
| | G004p001U007p001U004pA007pC004pA007pA004pA007pA004 | SS | 2073 |
| | pG007pC004pA004pA007pA004pC007pA004pG007pG004pU007 | | |
| | pC004p001U004p001A004 | | |
| 292 | A007p001C004p001C007pU004pG007pU004pU007pU004pU007 | AS | 2074 |
| | pG007pC007pU004pU007pU004pU007pG004pU007pA004pA007 | | |
| | pc004pU007 | | |
| | A004p001G007p001U004pU007pA004pC007pA004pA007pA004 | SS | 2075 |
| | pA007pG004pC004pA004pA007pA004pA007pC004pA007pG004 | | |
| | pG007pU004p001C004p001U004 | | |
| 293 | C007p001U004p001G007pU004pU007pU004pU007pG004pC007 | AS | 2076 |
| | pU007pU007pU004pU007pG004pU007pA004pA007pC004pU007 | | |
| | pU004pG007 | | |
| | C004p001A007p001A004pG007pU004pU007pA004pC007pA004 | SS | 2077 |
| | pA007pA004pA004pG004pC007pA004pA007pA004pA007pC004 | | |
| | pA007pG004p001G004p001U004 | | |
| 294 | U007p001U004p001U007pG004pU007pA004pA007pC004pU007 | AS | 2078 |
| | pU007pG007pA004pA007pG004pA007pU004pA007pU004pU007 | | |
| | pU004pA007 | | |
| | U004p001A007p001A004pA007pU004pA007pU004pC007pU004 | SS | 2079 |
| | pU007pC004pA004pA004pG007pU004pU007pA004pC007pA004 | | |
| | pA007pA004p001A004p001G004 | | |
| 295 | U007p001U004p001G007p0004pA007pA004pC007pU004pU007 | AS | 2080 |
| | pG007pA007pA004pG007pA004pU007pA004p0007p0004pU007 | | |
| | pA004pU007 | | |
| | A004p0010007p001A004pA007pA004pU007pA004pU007pC004 | SS | 2081 |
| | pU007pU004pC004pA004pA007pG004pU007pU004pA007pC004 | | |
| | pA007pA004p001A004p001A004 | | |
| 296 | U007p001G004p0010007pA004pA007pC004pU007p0004pG007 | AS | 2082 |
| | pA007pA007pG004pA007pU004pA007pU004pU007pU004pA007 | | |
| | pU004p0007 | | |
| | A004p001A007p001U004pA007pA004pA007pU004pA007pU004 | SS | 2083 |
| | pC007pU004pU004pC004pA007pA004pG007pU004p0007pA004 | | |
| | pC007pA004p001A004p001A004 | | |
| 297 | G007p001U004p001A007pA004pC007pU004p0007pG004pA007 | AS | 2084 |
| | pA007pG007pA004p0007pA004pU007pU004p0007pA004pU007 | | |
| | p0004pC007 | | |
| | G004p001A007p001A004pU007pA004pA007pA004p0007pA004 | SS | 2085 |
| | p0007pC004pU004p0004pC007pA004pA007pG004pU007pU004 | | |
| | pA007pC004p001A004p001A004 | | |
| 298 | A007p001U004p001A007pU004pU007pU004pA007p0004pU007 | AS | 2086 |
| | pc007pU007pG004pG007pG004pU007pU004pU007p0004pG007 | | |
| | pU004pA007 | | |
| | U004p001A007p001C004pA007pA004pA007pA004pC007pC004 | SS | 2087 |
| | pC007pA004pG004pA004pA007pU004pA007pA004pA007pU004 | | |
| | pA007pU004p001C004p001U004 | | |
| 299 | U007p001U004p0010007pA004pU007pU004pC007p0004pG007 | AS | 2088 |
| | pG007pG007pU004pU007pU004pU007pG004pU007pA004pG007 | | |
| | pC004pA007 | | |
| | U004p001G007p001C004p0007pA004pC007pA004pA007pA004 | SS | 2089 |
| | pA007pC004pC004pC004pA007pG004pA007pA004pU007pA004 | | |
| | pA007pA004p001U004p001A004 | | |
| 300 | A007p001U004p0010007pC004pU007pG004pG007pG004p0007 | AS | 2090 |
| | pU007pU007pU004pG007p0004pA007pG004pC007pA004pU007 | | |
| | pU004pU007 | | |
| | A004p001A007p001A004p0007pG004pC007p0004pA007pC004 | SS | 2091 |
| | pA007pA004pA004pA004pC007pC004pC007pA004pG007pA004 | | |
| | pA007pU004p001A004p001A004 | | |
| 301 | C007p001U004p001G007pG004pG007pU004pU007pU004p0007 | AS | 2092 |
| | pG007pU007pA004pG007pC004pA007pU004p0007pU004p0007 | | |
| | pU004pA007 | | |
| | U004p001A007p001A004pA007pA004pA007pU004pG007pC004 | SS | 2093 |
| | pU007pA004pC004pA004pA007pA004pA007pC004pC007pC004 | | |
| | pA007pG004p001A004p001A004 | | |
| 302 | U007p001G004p001G007pG004pU007pU004p0007p0004pG007 | AS | 2094 |
| | p0007pA007pG004pC007pA004pU007pU004p0007p0004pU007 | | |
| | pA004pU007 | | |
| | A004p0010007p001A004pA007pA004pA007pA004pU007pG004 | SS | 2095 |
| | pC007pU004pA004pC004pA007pA004pA007pA004pC007pC004 | | |
| | pC007pA004p001G004p001A004 | | |
| 303 | G007p001G004p001G007pC004pU007pG004pA007pG004pC007 | AS | 2096 |
| | pU007pU007pU004pA007pA004pA007pA004pU007pG004pG007 | | |
| | pU004pU007 | | |
| | A004p001A007p001C004pC007pA004pU007pU004p0007p0004 | SS | 2097 |
| | pA007pA004pA004pG004pC007pU004pC007pA004pG007pC004 | | |
| | pC007pC004p001C004p001A004 | | |
| 304 | A007p001U004p001A007pC004pC007pU004pG007pU004pU007 | AS | 2098 |
| | pU007pU007pG004pC007pU004pU007pU004p0007pG004pU007 | | |
| | pA004pA007 | | |
| | U004p0010007p001A004pC007pA004pA007pA004pA007pG004 | SS | 2099 |
| | pC007pA004pA004pA007pC004pA007pG004pG007pU004pC007 | | |
| | p004p001A004p001G004 | | |
| 305 | A007p001G004p001A007pC004pC007pU004pG007p0004pU007 | AS | 2100 |
| | pU007pU007pG004pC007pU004pU007pU004p0007pG004pU007 | | |
| | pA004pA007 | | |
| | U004p0010007p001A004pC007pA004pA007pA004pA007pG004 | SS | 2101 |
| | pC007pA004pA004pA007pC004pA007pG004pG007p0004pC007 | | |
| | pU004p001A004p001G004 | | |
| 306 | A007p001G004p001A007pC004pC007pU004pG007p0004pU007 | AS | 2102 |
| | pU007pU007pG004pC007pU004p0007pU004p0007pG004pU007 | | |
| | pA004pA007 | | |
| | U004p0010007p001A004pC007pA004pA007pA004pA007pG004 | SS | 2103 |
| | pC007pA004pA004pA007pC004pA007pG004pG007pU004pC007 | | |
| | pU004p001A004p001G004 | | |
| 307 | A007p001G004p001A007pC004pC007pU004pG007pU004pU007 | AS | 2104 |
| | pU007pU007pG004pC007pU004pU007pU004p0007pG004pU007 | | |
| | pA004pA007 | | |
| | U004p0010007p001A004pC007pA004pA007pA004pA007pG004 | SS | 2105 |
| | pC007pA004pA004pA007pC004pA007pG004pG007p0004pC007 | | |
| | pU004p001A004p001G004 | | |
| 308 | A007p001G004p001A007pC004pC007pU004pG007pU004p0007 | AS | 2106 |
| | pU007pU007pG004pC007p0004pU007pU004p0007pG004pU007 | | |
| | pA004pA007 | | |
| | U004p0010007p001A004pC007pA004pA007pA004pA007pG004 | SS | 2107 |
| | pC007pA004pA004pA007pC004pA007pG004pG007pU004pC007 | | |
| | pU004p001A004p001G004 | | |
| 309 | A007p001G004p001A007pC004pC007pU004pG007p0004pU007 | AS | 2108 |
| | pU007pU007pU007pG004pC007pU004pU007pU004pU007pG004 | | |
| | pU007pA004pA007pG004pC004pA004pG004pC004pC004pG002 | | |
| | pA002pG004pG004pC004pU004p001G004p001C004 | | |
| | U004p0010007p001A004pC007pA004pA007pA004pA007pG004 | SS | 2109 |
| | pC007pA004pA004pA007pC004pA007pG004pG007pU004pC007 | | |
| | pU004p001A004p001G004 | | |
| 310 | A007p001G004p001A007pC004pC007pU004pG007pU004pU007 | AS | 2110 |
| | pU007pU007pG004pC007pU004pU007pU004pU007pG004pU007 | | |
| | pA004pA007 | | |
| | U004p0010007p001A004pC007pA004pA007pA004pA007pG004 | SS | 2111 |
| | pC007pA004pA004pA007pC004pA007pG004pG007pU004pC007 | | |
| | pU004p001A007p001G004 | | |
| 311 | A007p001G004p001A007pC004pC007pU004pG007p0004pU007 | AS | 2112 |
| | pU007pU007pG004pC007pU004pU004pU004pU004pG004pU004 | | |
| | pA004pA004 | | |
| | U004p0010007p001A004pC007pA004pA004pA007pG004pC007 | SS | 2113 |
| | pA004pA004pA007pC004pA007pG004pG004pU004pC007pU004 | | |
| | p001A004p001G004 | | |
| 312 | A004p001G004p001A004pC004pC004pU004pG007p0004pU007 | AS | 2114 |
| | p0004pU004pG004pC004pU004pU004pU004pU004p@004pU004 | | |
| | pA004pA004 | | |
| | U004p0010007p001A004pC007pA004pA004pA007pG004pC007 | SS | 2115 |
| | pA004pA004pA007pC004pA007pG004pG004pU004pC007p0004 | | |
| | p001A004p001G004 | | |
| 313 | A004p001G004p001A004pC004pC004pU004pG007pU004pU007 | AS | 2116 |
| | p0004pU004pG004pC004pU004pU004pU004pU004pG004pU004 | | |
| | pA004pA004 | | |
| | U004p0010007p001A004pC007pA007pA007pA007pA007pG004 | SS | 2117 |
| | pC007pA004pA007pA004pA007pC004pA007pG004pG007pU004 | | |
| | pC004pU004p001A004p001G004 | | |
| 314 | A004p001G004p001A004pC004pC004pU004pG007p0004pU007 | AS | 2118 |
| | pU004pT002pG004pC004pU004pU004pU004p0004pG004pU004 | | |
| | pA004pA004 | | |
| | U004p0010007p001A004pC007pA007pA007pA007pA007pG004 | SS | 2119 |
| | pC007pA004pA007pA004pA007pC004pA007pG004pG007pU004 | | |
| | pC004pU004p001A004p001G004 | | |
| 315 | C007p001U004p001G007p0004pU007pU004p0007pG004pC007 | AS | 2120 |
| | pU007p0007pU004p0007pG004pU007pA004pA007pC004pU007 | | |
| | pU004pG007 | | |
| | C004p001A007p001A004pG007pU004pU007pA004pC007pA004 | SS | 2121 |
| | pA007pA004pA004pG004pC007pA004pA007pA004pA007pC004 | | |
| | pA007pG004p001G007p001U004 | | |
| 316 | C007p001U004p001G007pU004pU007pU004pU007pG004pC007 | AS | 2122 |
| | pU007pU007pU004pU007pG004pU004pA004pA004pC004pU004 | | |
| | pU004pG004 | | |
| | C004p001A007p001A004pG007pU004pU004pA004pC007pA004 | SS | 2123 |
| | pA007pA004pA004pG004pC007pA004pA007pA004pA004pC004 | | |
| | pA007pG004p001G004p001U004 | | |
| 317 | C004p001U004p001G004p0004pU004pU004pU007pG004pC007 | AS | 2124 |
| | pU004pU004pU004pU004pG004pU004pA004pA004pC004p0004 | | |
| | pU004pG004 | | |
| | C004p001A007p001A004pG007pU004pU004pA004pC007pA004 | SS | 2125 |
| | pA007pA004pA004pG004pC007pA004pA007pA004pA004pC004 | | |
| | pA007pG004p001G004p001U004 | | |
| 318 | C004p001U004p001G004pU004pU004pU004pU007pG004pC007 | AS | 2126 |
| | pU004pU004pU004pU004pG004pU004pA004pA004pC004pU004 | | |
| | pU004pG004 | | |
| | C004p001A007p001A004pG007pU007pU007pA004pC007pA004 | SS | 2127 |
| | pA007pA004pA007pG004pC007pA004pA007pA004pA007pC004 | | |
| | pA004pG004p001G004p001U004 | | |
| 319 | C004p001U004p001G004p0004pU004pU004pU007pG004pC007 | AS | 2128 |
| | pU004pT002pU004p0004pG004pU004pA004pA004pC004pU004 | | |
| | pU004pG004 | | |
| | C004p001A007p001A004pG007pU007pU007pA004pC007pA004 | SS | 2129 |
| | pA007pA004pA007pG004pC007pA004pA007pA004pA007pC004 | | |
| | pA004pG004p0016004p001U004 | | |
| 320 | C004p001U004p001G004pU004pU004pU004pU007pG004pC007 | AS | 2130 |
| | p0007pU007pU004p0004pG004p0004pA004pA004pC004pU004 | | |
| | pU004pG004 | | |
| | C004p001A007p001A004pG004pU004pU007pA004pC007pA007 | SS | 2131 |
| | pA004pA004pA004pG004pC007pA004pA007pA004pA004pC004 | | |
| | pA004pG004p001G004p001U004 | | |
| 321 | C004p001U004p001G004p0004pU004pU004p0007pG004pC007 | AS | 2132 |
| | p0007pU007pU004pU004pG004pU004pA004pA004pC004pU004 | | |
| | pU004pG004 | | |
| | C004p001A007p001A004pG004pU004pU007pA004pC004pA004 | SS | 2133 |
| | pA004pA004pG004pC007pA004pA007pA004pA004pC004pA004 | | |
| | pG004p001G004p001U004 | | |
| 322 | C004p001U004p001G004p0004pU004pU004p0007pG004pC007 | AS | 2134 |
| | pU007p0007pU004p0004p@004pU004pA004pA004pC004pU004 | | |
| | pU004pG004 | | |
| | C004p001A007p001A004pG004pU004pU004pA004pC004pA004 | SS | 2135 |
| | pA004pA004pG004pC007pA004pA007pA004pA004pC004pA004 | | |
| | pG004p001G004p001U004 | | |

[1399] Specific codes in the nucleotide sequences are indicated in above, e.g., Tables A and A-1.

[1400] Additional suitable second dsRNAi agent targeting PCSK9 in Table 6d, or variants thereof and synthesis thereof are also described in WO2023/134609, entire contents of which are incorporated herein by reference.

[1401] In some embodiments, the second dsRNAi agent may have a structure of

[chemical structure]

[chemical structure]

[chemical structure]

[chemical structure]

[chemical structure]

[chemical structure]

[chemical structure]

[chemical structure]

[chemical structure]

[chemical structure]

[chemical structure]

[1402] or pharmaceutically acceptable thereof,
[1403] wherein the dsRNA includes any one of PCSK9 siRNA in Table 6e, the dsRNA includes:
   [1404] (i) a sense strand; and
   [1405] (ii) an antisense strand forming a duplex with the sense strand.

TABLE 6e

| PCSK9 | | | SEQ ID |
|---|---|---|---|
| SIRNA | Sequence (5′-3′) | Strand | NO |
| 323 | C004p001U004p001A004pG004pA004pC004pC007pU004pG007 | SS | 2136 |
| | pU004PT002pU004pU004pG004pC004pU004pU004pU004pU004 | | |
| | pG004pU004 | | |
| | A004p001C007p001A004pA007pA007pA007pG004pC007pA004 | AS | 2137 |
| | pA007pA004pA007pC004pA007pG004pG007pU004pC007pU004 | | |
| | pA004pG004p001A004p001A004 | | |
| 324 | C004p001U004p001A004pG004pA004pC004pC007pU004pG007 | SS | 2138 |
| | pU004pT002pU004pU004pG004pC004pU004pU004pU004pU004 | | |
| | pG004p001U004 | | |
| | A004p001C007p001A004pA007pA007pA007pG004pC007pA004 | AS | 2139 |
| | pA007pA004pA007pC004pA007pG004pG007pU004pC007pU004 | | |
| | pA004pG004p001A004p001A004 | | |
| 325 | U004p001G004p001U004pU004pU004pU004pG007pC007pU007 | SS | 2140 |
| | pU004pU004pU004pG004pU004pA004pA004pC004p001U004p0 | | |
| | 01U004 | | |
| | A004p001A007p001G004pU007pU004pA007pC004pA007pA004 | AS | 2141 |
| | pA007pA004pG007pC004pA007pA004pA007pA004pC007pA004 | | |
| | p001G007p001G004 | | |
| 326 | U004p001G004p001U004pU004pU004pU004pG007pC007pU007 | SS | 2142 |
| | pU004pU004pU004pG004pU004pA004pA004pC004pU004p001U | | |
| | 004 | | |
| | A004p001A007p001G004pU007pU004pA007pC004pA007pA004 | AS | 2143 |
| | pA007pA004pG007pC004pA007pA004pA007pA004pC007pA004 | | |
| | p001G007p001G004 | | |
| 327 | G004p001U004p001U004pU004pU004pG004pC007pU007pU007 | SS | 2144 |
| | pU004pU004pG004pU004pA004pA004pC004pU004p001U004p0 | | |
| | 01A004 | | |
| | U004p001A007p001A004pG007pU004pU007pA004pC007pA004 | AS | 2145 |
| | pA007pA004pA007pG004pC007pA004pA007pA004pA007pC004 | | |
| | p001A007p001G004 | | |
| 328 | G004p001U004p001U004pU004pU004pG004pC007pU007pU007 | SS | 2146 |
| | pU004pU004pG004pU004pA004pA004pC004pU004p001U004p0 | | |
| | 01A004 | | |
| | U004p001A007p001A004pG007pU004pU007pA004pC007pA004 | AS | 2147 |
| | pA007pA004pA007pG004pC007pA004pA007pA004pA007pC004 | | |
| | p001A007p001G004 | | |
| 329 | G004p001U004p001U004pU004pU004pG004pC007pU007pU007 | SS | 2148 |
| | pU004pU004pG004pU004pA004pA004pC004pU004pU004p001A | | |
| | 004 | | |
| | U004p001A007p001A004pG007pU004pU007pA004pC007pA004 | AS | 2149 |
| | pA007pA004pA007pG004pC007pA004pA007pA004pA007pC004 | | |
| | p001A007p001G004 | | |
| 330 | G004p001U004p001U004pU004pU004pG004pC007pU007pU007 | SS | 2150 |
| | pU004pU004pG004pU004pA004pA004pC004pU004pU004pA004 | | |
| | U004p001A007p001A004pG007pU004pU007pA004pC007pA004 | AS | 2151 |
| | pA007pA004pA007pG004pC007pA004pA007pA004pA007pC004 | | |
| | p001A007p001G004 | | |
| 331 | U004p001U004p001U004pU004pG004pC004pU007pU007pU007 | SS | 2152 |
| | pU004pG004pU004pA004pA004pC004pU004pU004p001G004p0 | | |
| | 01A004 | | |
| | U004p001C007p001A004pA007pG004pU007pU004pA007pC004 | AS | 2153 |
| | pA007pA004pA007pA004pG007pC004pA007pA004pA007pA004 | | |
| | p001C007p001A004 | | |
| 332 | U004p001U004p001U004pU004pG004pC004pU007pU007pU007 | SS | 2154 |
| | pU004pG004pU004pA004pA004pC004pU004pU004p001G004p0 | | |
| | 01A004 | | |
| | U004p001C007p001A004pA007pG004pU007pU004pA007pC004 | AS | 2155 |
| | pA007pA004pA007pA004pG007pC004pA007pA004pA007pA004 | | |
| | p001C007p001A004 | | |
| 333 | U004p001G004p001C004pU004pU004pU004pU007pG007pU007 | SS | 2156 |
| | pA004pA004pC004pU004pU004pG004pA004pA004p001G004p0 | | |
| | 01A004 | | |
| | U004p001C007p001U004pU007pC004pA007pA004pG007pU004 | AS | 2157 |
| | pU007pA004pC007pA004pA007pA004pA007pG004pC007pA004 | | |
| | p001A007p001A004 | | |
| 334 | G004p001C004p001U004pU004pU004pU004pG007pU007pA007 | SS | 2158 |
| | pA004pC004pU004pU004pG004pA004pA004pG004p001A004p0 | | |
| | 01U004 | | |
| | A004p001U007p001C004pU007pU004pC007pA004pA007pG004 | AS | 2159 |
| | pU007pU004pA007pC004pA007pA004pA007pA004pG007pC004 | | |
| | p001A007p001A004 | | |
| 335 | C004p001U004p001U004pU004pU004pG004pU007pA007pA007 | SS | 2160 |
| | pC004pU004pU004pG004pA004pA004pG004pA004p001U004p0 | | |
| | 01A004 | | |
| | U004p001A007p001U004pC007pU004pU007pC004pA007pA004 | AS | 2161 |
| | pG007pU004pU007pA004pC007pA004pA007pA004pA007pG004 | | |
| | p001C007p001A004 | | |
| 336 | U004p001U004p001U004pU004pG004pU004pA007pA007pC007 | SS | 2162 |
| | pU004pU004pG004pA004pA004pG004pA004pU004p001A004p0 | | |
| | 01U004 | | |
| | A004p001U007p001A004pU007pC004pU007pU004pC007pA004 | AS | 2163 |
| | pA007pG004pU007pU004pA007pC004pA007pA004pA007pA004 | | |
| | p001G007p001C004 | | |

[1406] Specific codes in the nucleotide sequences are indicated in above, e.g., Tables A and A-1.

[1407] Additional suitable second dsRNAi agent targeting PCSK9 in Table 6e, or variants thereof and synthesis thereof are also described in WO2023/241591, entire contents of which are incorporated herein by reference.

[1408] In some embodiment, the second dsRNAi agent may have a structure of

[chemical structure]

or a pharmaceutically acceptable salt thereof,
[1409] wherein W is —SH or —OH, and
[1410] the dsRNA includes:
[1411] (i) a sense strand including a nucleotide sequence in Table 6f-1; and
[1412] (ii) an antisense strand forming a duplex with the sense strand and including a nucleotide sequence in Table 6f-2.

TABLE 6f-1

| | SEQ |
|---|---|
| | ID |
| Sense strand Sequence (5′-3′) | NO |
| IgT3p-IgT3p-IgT3p- | 2164 |
| U007pA004pU007pG004pG007pU004pG007pA004pC007 | |
| pU004pU007pU004pU007pU004pA007pA004pA007p001 | |
| A004p001U007 | |
| IgT3p-IgT3p-IgT3p- | 2165 |
| U004pA004pU004pG004pG007pU004pG007pA007pC007 | |
| pU004pU004pU004pU004pU004pA004pA004pA004 | |
| pA004pU004 | |
| IgT3p-IgT3p-IgT3p- | 2166 |
| U1017pA1017pU004pG004pG007pU004pG007pA007 | |
| pC007pU004pU004pU004pU004pU004pA004pA004 | |
| pA004pA004pU004p-IT4p-IT4 | |
| IgT3p-IgT3p-IgT3p- | 2167 |
| U007pU004pA007pU004pU007pA004pA007pU004pA007 | |
| pU004pG007pG004pU007pG004pA007pC004pU007p001 | |
| U004p001U007 | |
| IgT3p-IgT3p-IgT3p- | 2168 |
| U004pU004pA004pU004pU007pA004pA007pU007pA007 | |
| pU004pG004pG004pU004pG004pA004pC004pU004p001 | |
| U004p001U004 | |
| IgT3p-IgT3p-IgT3p- | 2169 |
| U1017pU1017pA004pU004pU007pA004pA007pU007 | |
| pA007pU004pG004pG004pU004pG004pA004pC004 | |
| pU004p001U004p001U004 | |
| IgT3p-IgT3p-IgT3p- | 2170 |
| U004pU004pA004pU004pU007pA004pA007pU007pA007 | |
| pU004pG004pG004pU004pG004pA004pC004pU004 | |
| pU004pU004p-IT4p-IT4 | |

TABLE 6f-2

| | SEQ |
|---|---|
| | ID |
| Antisense Strand Sequence (5′-3′) | NO |
| A007p001U007p001U004pU007pU004pA007pA004 | 2171 |
| pA007pA004pA007pG004pU007pC004pA007pC004 | |
| pC007pA004pU007pA004p001T002p001T002 | |
| A004p001U007p001U004pU004pU004pA007pA004 | 2172 |
| pA004pA004pA004pG004pU004pC004pA007pC004 | |
| pC007pA004pU004pA004p001A004p001A004 | |
| A007p001A007p001A004pG007pU004pC007pA004 | 2173 |
| pC007pC004pA007pU004pA007pU004pU007pA004 | |
| pA007pU004pA007pA004p001T002p001T002 | |
| A004p001A007p001A004pG007pU004pC004pA004 | 2174 |
| pC004pC004pA004pU004pA004pU004pU007pA004 | |
| pA007pU004pA004pA004p001A004p001A004 | |
| A004p001A007p001A004pG007pU004pC004pA004 | 2175 |
| pC007pC007pA004pU004pA004pU004pU007pA004 | |
| pA007pU004pA004pA004p001A004p001A004 | |
| A004p001A007p001A004pG007pU004pC004pA004 | 2176 |
| pC004pC007pA004pU004pA004pU004pU007pA004 | |
| pA007pU004pA004pA004p001A004p001A004 | |
| A004p001A007p001A004pG007pU004pC004pA004 | 2177 |
| pC007pC007pA004pU004pA004pU004pU007pA004 | |
| pA007pU004pA004pA004p001A1017p001A1017 | |
| A004p001A007p001A004pG007pU004pC004pA004 | 2178 |
| pC004pC007pA004pU004pA004pU004pU007pA004 | |
| pA007pU004pA004pA004p001A1017p001A1017 | |

[1413] Specific codes in the nucleotide sequences are indicated in above, e.g., Tables A and A-1.

[1414] In some embodiment, the second dsRNAi agent may have a structure of

[chemical structure]

or a pharmaceutically acceptable salt thereof,
[1415] wherein the dsRNA includes any one of PCSK9 siRNA in Table 6f-3, the dsRNA includes:
   [1416] (i) a sense strand; and
   [1417] (ii) an antisense strand forming a duplex with the sense strand.

TABLE 6f-3

| PCSK9 | | | SEQ ID |
|---|---|---|---|
| siRNA | Sequence (5′-3′) | Strand | NO |
| 337 | IgT3pIgT3pIgT3pU007pA004pU007pG004pG007pU004pG007pA | SS | 2179 |
| | 004pC007pU004pU007pU004pU007pU004pA007pA004pA007p00 | | |
| | 1A004p001U007 | | |
| | A007p001U007p001U004pU007pU004pA007pA004pA007pA004p | AS | 2180 |
| | A007pG004pU007pC004pA007pC004pC007pA004pU007pA004p0 | | |
| | 01T002p001T002 | | |
| 338 | IgT3pIgT3pIgT3pU007pU004pA007pU004pU007pA004pA007pU | SS | 2181 |
| | 004pA007pU004pG007pG004pU007pG004pA007pC004pU007p00 | | |
| | 1U004p0010007 | | |
| | A007p001A007p001A004pG007pU004pC007pA004pC007pC004p | AS | 2182 |
| | A007pU004pA007pU004pU007pA004pA007pU004pA007pA004p0 | | |
| | 01T002p001T002 | | |
| 339 | IgT3pIgT3pIgT3pU004pA004pU004pG004pG007pU004pG007pA | SS | 2183 |
| | 007pC007pU004pU004pU004pU004pU004pA004pA004pA004pA0 | | |
| | 04pU004pIT4pIT4 | | |
| | A004p001U007p001U004pU004pU004pA007pA004pA004pA004p | AS | 2184 |
| | A004pG004pU004pC004pA007pC004pC007pA004pU004pA004p0 | | |
| | 01A004p001A004 | | |
| 340 | IgT3pIgT3pIgT3pU1017pA1017pU004pG004pG007pU004pG007 | SS | 2185 |
| | pA007pC007pU004pU004pU004pU004pU004pA004pA004pA004p | | |
| | A004pU004pIT4pIT4 | | |
| | A004p001U007p001U004pU004pU004pA007pA004pA004pA004p | AS | 2186 |
| | A004pG004pU004pC004pA007pC004pC007pA004pU004pA004p0 | | |
| | 01A004p001A004 | | |
| 341 | IgT3pIgT3pIgT3pU004pU004pA004pU004pU007pA004pA007pU | SS | 2187 |
| | 007pA007pU004pG004pG004pU004pG004pA004pC004pU004p00 | | |
| | 1U004p001U004 | | |
| | A004p001A007p001A004pG007pU004pC004pA004pC007pC007p | AS | 2188 |
| | A004pU004pA004pU004pU007pA004pA007pU004pA004pA004p0 | | |
| | 01A004p001A004 | | |
| 342 | IgT3pIgT3pIgT3pU1017pU1017pA004pU004pU007pA004pA007 | SS | 2189 |
| | pU007pA007pU004pG004pG004pU004pG004pA004pC004pU004p | | |
| | 001U004p001U004 | | |
| | A004p001A007p001A004pG007pU004pC004pA004pC004pC004p | AS | 2190 |
| | A004pU004pA004pU004pU007pA004pA007pU004pA004pA004p0 | | |
| | 01A004p001A004 | | |
| 343 | IgT3pIgT3pIgT3pU1017pU1017pA004pU004pU007pA004pA007 | SS | 2191 |
| | pU007pA007pU004pG004pG004pU004pG004pA004pC004pU004p | | |
| | 001U004p001U004 | | |
| | A004p001A007p001A004pG007pU004pC004pA004pC007pC007p | AS | 2192 |
| | A004pU004pA004pU004pU007pA004pA007pU004pA004pA004p0 | | |
| | 01A004p001A004 | | |
| 344 | IgT3pIgT3pIgT3pU1017pA004pU004pU007pA004pA007pU007p | SS | 2193 |
| | A007pU004pG004pG004pU004pG004pA004pC004pU004p001U00 | | |
| | 4p001U004 | | |
| | A004p001A007p001A004pG007pU004pC004pA004pC004pC007p | AS | 2194 |
| | A004pU004pA004pU004pU007pA004pA007pU004pA004pA004p0 | | |
| | 01A004p001A004 | | |
| 345 | IgT3pIgT3pIgT3pU004pU004pA004pU004pU007pA004pA007pU | SS | 2195 |
| | 007pA007pU004pG004pG004pU004pG004pA004pC004pU004pU0 | | |
| | 04pU004pIT4pIT4 | | |
| | A004p001A007p001A004pG007pU004pC004pA004pC007pC007p | AS | 2196 |
| | A004pU004pA004pU004pU007pA004pA007pU004pA004pA004p0 | | |
| | 01A1017p001A1017 | | |
| 346 | IgT3pIgT3pIgT3pU004pU004pA004pU004pU007pA004pA007pU | SS | 2197 |
| | 007pA007pU004pG004pG004pU004pG004pA004pC004pU004pU0 | | |
| | 04pU004pIT4pIT4 | | |
| | A004p001A007p001A004pG007pU004pC004pA004pC004pC007p | AS | 2198 |
| | A004pU004pA004pU004pU007pA004pA007pU004pA004pA004p0 | | |
| | 01A1017p001A1017 | | |

IgT3: [chemical structure]
IT4:

[chemical structure]

[1418] Specific codes in the nucleotide sequences are indicated in above, e.g., Tables A and A-1.

[1419] Additional suitable second dsRNAi agent targeting PCSK9 according to Tables 6f-1 to 3, or variants thereof and synthesis thereof are also described in WO2021/037972, entire contents of which are incorporated herein by reference.

[1420] In some embodiment, the second dsRNAi agent may have a structure of

[chemical structure]

[1421] wherein W is S or O and the dsRNA includes any one of PCSK9 siRNA in Table 6f-3, the dsRNA includes:
   [1422] (i) a sense strand; and
   [1423] (ii) an antisense strand forming a duplex with the sense strand.

TABLE 6g

| PCSK9 | | | SEQ ID |
|---|---|---|---|
| SIRNA | Sequence (5′-3′) | Strand | NO |
| 347 | A004p001G004p001A004pA004pU004pG004pA007pC004pU007p | SS | 2199 |
| | U004pU004pU004pA004pU004pU004pG004pA004pG004pC004pU | | |
| | 004pC004 | | |
| | A004p001A007p001G004pA007pG007pC007pU004pC007pA004p | AS | 2200 |
| | A007pU004pA007pA004pA007pA004pG007pU004pC007pA004p0 | | |
| | 01U004p001U004 | | |
| 348 | A004p001U004p001U004pU004pC004pA004pC007pC004pA007p | SS | 2201 |
| | U004pU004pC004pA004pA004pA004pC004pA004pG004pG004pU | | |
| | 004pC004 | | |
| | U004p001C007p001G004pA007pC007pC007pU004pG007pU004p | AS | 2202 |
| | U007pU004pG007pA004pA007pU004pG007pG004pU007pG004p0 | | |
| | 01A004p001A004 | | |
| 349 | C004p001G004p001A004pU004pG004pU004pC007pC004pG007p | SS | 2203 |
| | U004pG004pG004pG004pC004pA004pG004pA004pA004pU004pG | | |
| | 004pA004 | | |
| | A004p001G007p001U004pC007pA007pU007pU004pC007pU004p | AS | 2204 |
| | G007pC004pC007pC004pA007pC004pG007pG004pA007pC004p0 | | |
| | 01A004p001U004 | | |
| 350 | U004p001U004p001A004pU004pU004pG004pA007pG004pC007p | SS | 2205 |
| | U004pC004pU004pU004pG004pU004pU004pC004pC004pG004pU | | |
| | 004pG004 | | |
| | G004p001G007p001C004pA007pC007pG007pG004pA007pA004p | AS | 2206 |
| | C007pA004pA007pG004pA007pG004pC007pU004pC007pA004p0 | | |
| | 01A004p001U004 | | |
| 351 | G004p001C004p001U004pC004pC004pC004pA007pA004pU007p | SS | 2207 |
| | G004pU004pG004pC004pC004pG004pA004pU004pG004pU004pC | | |
| | 004pC004 | | |
| | A004p001C007p001G004pG007pA007pC007pA004pU007pC004p | AS | 2208 |
| | G007pG004pC007pA004pC007pA004pU007pU004pG007pG004p0 | | |
| | 01G004p001A004 | | |
| 352 | U004p001G004p001C004pC004pG004pA004pU007pG004pU007p | SS | 2209 |
| | C004pC004pG004pU004pG004pG004pG004pC004pA004pG004pA | | |
| | 004pA004 | | |
| | C004p001A007p001U004pU007pC007pU007pG004pC007pC004p | AS | 2210 |
| | C007pA004pC007pG004pG007pA004pC007pA004pU007pC004p0 | | |
| | 01G004p001G004 | | |
| 353 | C004p001A004p001C004pC004pA004pU004pU007pC004pA007p | SS | 2211 |
| | A004pA004pC004pA004pG004pG004pU004pC004pG004pA004pG | | |
| | 004pC004 | | |
| | C004p001A007p001G004pC007pU007pC007pG004pA007pC004p | AS | 2212 |
| | C007pU004pG007pU004pU007pU004pG007pA004pA007pU004p0 | | |
| | 01G004p001G004 | | |
| 354 | C004p001C004p001A004pA004pU004pG004pU007pG004pC007p | SS | 2213 |
| | C004pG004pA004pU004pG004pU004pC004pC004pG004pU004pG | | |
| | 004pG004 | | |
| | G004p001C007p001C004pC007pA007pC007pG004pG007pA004p | AS | 2214 |
| | C007pA004pU007pC004pG007pG004pC007pA004pC007pA004p0 | | |
| | 01U004p001U004 | | |
| 355 | U004p001U004p001U004pA004pU004pU004pG007pA004pG007p | SS | 2215 |
| | C004pU004pC004pU004pU004pG004pU004pU004pC004pC004pG | | |
| | 004pU004 | | |
| | G004p001C007p001A004pC007pG007pG007pA004pA007pC004p | AS | 2216 |
| | A007pA004pG007pA004pG007pC004pU007pC004pA007pA004p0 | | |
| | 01U004p001A004 | | |
| 356 | G004p001G004p001G004pC004pU004pG004pA007pG004pC007p | SS | 2217 |
| | U004pU004pU004pA004pA004pA004pA004pU004pG004pG004pU | | |
| | 004pU004 | | |
| | G004p001G007p001A004pA007pC007pC007pA004pU007pU004p | AS | 2218 |
| | U007pU004pA007pA004pA007pG004pC007pU004pC007pA004p0 | | |
| | 01G004p001C004 | | |
| 357 | G004p001G004p001C004pA004pU004pU004pU007pC004pA007p | SS | 2219 |
| | C004pC004pA004pU004pU004pC004pA004pA004pA004pC004pA | | |
| | 004pG004 | | |
| | A004p001C007p001C004pU007pG007pU007pU004pU007pG004p | AS | 2220 |
| | A007pA004pU007pG004pG007pU004pG007pA004pA007pA004p0 | | |
| | 01U004p001G004 | | |
| 358 | C004p001A004p001U004pU004pU004pC004pA007pC004pC007p | SS | 2221 |
| | A004pU004pU004pC004pA004pA004pA004pC004pA004pG004pG | | |
| | 004pU004 | | |
| | C004p001G007p001A004pC007pC007pU007pG004pU007pU004p | AS | 2222 |
| | U007pG004pA007pA004pU007pG004pG007pU004pG007pA004p0 | | |
| | 01A004p001A004 | | |
| 359 | G007p001C004p001A007pU004pU007pU004pC007pA004pC007p | SS | 2223 |
| | C007pA1017pU004pU007pC004pA007pA004pA007pC004pA007p | | |
| | G004pG007 | | |
| | C004p001C007p001U004pG007pU004pU007pU004pG007pA004p | AS | 2224 |
| | A007pU004pG004pG004pU007pG004pA007pA004pA007pU004pG | | |
| | 007pC004p001C007p001C004 | | |
| 360 | G007p001C004p001A007pU004pU007pU004pC007pA004pC007p | SS | 2225 |
| | C007pA007pU004pU007pC004pA007pA004pA007pC004pA007pG | | |
| | 004pG007 | | |
| | C004p001C007p001U004pG007pU004pU007pU004pG007pA004p | AS | 2226 |
| | A007pU004pG004pG004pU007pG004pA007pA004pA007pU004pG | | |
| | 007pC004p001C004p001C004 | | |
| 361 | A007p001A004p001U007pG004pA007pC004pU007pU004pU007p | SS | 2227 |
| | U007pA1017pU004pU007pG004pA007pG004pC007pU004pC007p | | |
| | U004pU007 | | |
| | A004p001A007p001G004pA007pG004pC007pU004pC007pA004p | AS | 2228 |
| | A007pU004pA004pA004pA007pA004pG007pU004pC007pA004pU | | |
| | 007pU004p001C007p001U004 | | |
| 362 | A007p001A004p001U007pG004pA007pC004pU007pU004pU007p | SS | 2229 |
| | U007pA007pU004pU007pG004pA007pG004pC007pU004pC007pU | | |
| | 004pU007 | | |
| | A004p001A007p001G004pA007pG004pC007pU004pC007pA004p | AS | 2230 |
| | A007pU004pA004pA004pA007pA004pG007pU004pC007pA004pU | | |
| | 007pU004p001C004p001U004 | | |

[1424] Specific codes in the nucleotide sequences are indicated in above, e.g., Tables A and A-1.

[1425] Additional suitable second dsRNAi agent targeting PCSK9 in Table 6g, or variants thereof and synthesis thereof are also described in WO2022/089486, entire contents of which are incorporated herein by reference.

[1426] In some embodiment, the second dsRNAi agent may have a structure of

[chemical structure]

[1427] wherein W is S or O and the dsRNA includes:
[1428] (i) a sense strand including a nucleotide sequence in Table 6h-1; and
[1429] (ii) an antisense strand forming a duplex with the sense strand and including a nucleotide sequence in Table 6h-2.

TABLE 6h-1

| Sense Strand Sequence (5′-3′) | SEQ ID NO |
|---|---|
| U004p001U007p001G007pU007pA004pA004pC004pU004pU004pG004pA004pA00 | 2231 |
| 4p001G004p001A004 | |
| C004p001U007p001G007pU007pU004pU004pU004pG004pC004pU004pU004pU00 | 2232 |
| 4p001U004p001A004 | |
| G004p001U007p001U007pU007pU004pG004pC004pU004pU004pU004pU004pG00 | 2233 |
| 4p001U004p001A004 | |
| A004p001G007p001A007pC007pC004pU004pG004pU004pU004pU004pU004pG00 | 2234 |
| 4p001C004p001A004 | |
| U004p001G007p001U007pU007pU004pU004pG004pC004pU004pU004pU004pU00 | 2235 |
| 4p001G004p001A004 | |
| A004p001G007p001A007pU007pA004pU004pU004pU004pA004pU004pU004pC00 | 2236 |
| 4p001U004p001A004 | |
| C004p001C007p001U007pG007pU004pU004pU004pU004pG004pC004pU004pU00 | 2237 |
| 4p001U004p001A004 | |
| U004p001G007p001U007pA007pA004pC004pU004pU004pG004pA004pA004pG00 | 2238 |
| 4p001A004p001A004 | |
| C004p001U007p001U007pU007pU004pG004pU004pA004pA004pC004pU004pU00 | 2239 |
| 4p001G004p001A004 | |
| U004p001A007p001G007pA007pC004pC004pU004pG004pU004pU004pU004pU00 | 2240 |
| 4p001G004p001A004 | |
| U004p001G007p001A007pA007pG004pA004pU004pA004pU004pU004pU004pA00 | 2241 |
| 4p001U004p001A004 | |
| U004p001U007p001U007pG007pC004pU004pU004pU004pU004pG004pU004pA00 | 2242 |
| 4p001A004p001A004 | |
| U004p001G007p001C007pU007pU004pU004pG004pU004pG004pU004pC004pA00 | 2243 |
| 4p001C004p001A004 | |
| U004p001U007p001U007pG007pU004pA004pA004pC004pU004pU004pG004pA00 | 2244 |
| 4p001A004p001A004 | |
| C004p001U007p001U007pG007pA004pA004pG004pA004pU004pA004pU004pU00 | 2245 |
| 4p001U004p001A004 | |
| A004p001G007p001C007pA007pG004pA004pC004pA004pU004pU004pU004pA00 | 2246 |
| 4p001U004p001A004 | |
| G004p001G007p001A007pG007pU004pU004pU004pA004pU004pU004pC004pG00 | 2247 |
| 4p001G004p001A004 | |
| U004p001U007p001A007pA007pA004pA004pU004pG004pG004pU004pU004pC00 | 2248 |
| 4p001C004p001A004 | |
| A004p001U007p001A007pU007pU004pU004pA004pU004pU004pC004pU004pG00 | 2249 |
| 4p001G004p001A004 | |
| A004p001A007p001C007pU007pU004pG004pA004pA004pG004pA004pU004pA00 | 2250 |
| 4p001U004p001A004 | |
| A004p001G007p001C007pA007pG004pG004pA004pA004pC004pU004pG004pA00 | 2251 |
| 4p001G004p001A004 | |
| C004p001U007p001G007pG007pG004pU004pU004pU004pU004pG004pU004pA00 | 2252 |
| 4p001G004p001A004 | |
| C004p001A007p001U007pU007pU004pA004pU004pC004pU004pU004pU004pU00 | 2253 |
| 4p001G004p001A004 | |
| A004p001G007p001U007pU007pU004pA004pU004pU004pC004pG004pG004pA00 | 2254 |
| 4p001A004p001A004 | |
| G004p001G007p001A007pA007pC004pU004pG004pA004pG004pC004pC004pA00 | 2255 |
| 4p001G004p001A004 | |
| A004p001U007p001G007pA007pU004pG004pC004pU004pG004pU004pC004pU00 | 2256 |
| 4p001G004p001A004 | |
| A004p001G007p001C007pA007pU004pG004pG004pA004pA004pU004pC004pC00 | 2257 |
| 4p001C004p001A004 | |

TABLE 6h-2

| Antisense Strand Sequence (5′-3′) | SEQ ID NO |
|---|---|
| U004p001C004p001U004pU004pC004pA004pA004pG004pU004pU004pA004pC00 | 2258 |
| 4pA004pA007p001A004p001A004p001G004p001C004p001A000 | |
| U004p001A004p001A004pA004pA004pG004pC004pA004pA004pA004pA004pC00 | 2259 |
| 4pA004pG007p001G004p001U004p001C004p001U004p001A000 | |
| U004p001A004p001C004pA004pA004pA004pA004pG004pC004pA004pA004pA00 | 2260 |
| 4pA004pC007p001A004p001G004p001G004p001U004p001C000 | |
| U004p001G004p001C004pA004pA004pA004pA004pC004pA004pG004pG004pU00 | 2261 |
| 4pC004pU007p001A004p001G004p001A004p001A004p001A000 | |
| U004p001C004p001A004pA004pA004pA004pG004pC004pA004pA004pA004pA00 | 2262 |
| 4pC004pA007p001G004p001G004p001U004p001C004p0010000 | |
| U004p001A004p001G004pA004pA004pU004pA004pA004pA004pU004pA004pU00 | 2263 |
| 4pC004pU007p001U004p001C004p001A004p001A004p001G000 | |
| U004p001A004p001A004pA004pG004pC004pA004pA004pA004pA004pC004pA00 | 2264 |
| 4pG004pG007p001U004p001C004p001U004p001A004p001G000 | |
| U004p001U004p001C004pU004pU004pC004pA004pA004pG004pU004pU004pA00 | 2265 |
| 4pC004pA007p001A004p001A004p001A004p001G004p001C000 | |
| U004p001C004p001A004pA004pG004pU004pU004pA004pC004pA004pA004pA00 | 2266 |
| 4pA004pG007p001C004p001A004p001A004p001A004p001A000 | |
| U004p001C004p001A004pA004pA004pA004pC004pA004pG004pG004pU004pC00 | 2267 |
| 4pU004pA007p001G004p001A004p001A004p001A004p001A000 | |
| U004p001A004p001U004pA004pA004pA004pU004pA004pU004pC004pU004pU00 | 2268 |
| 4pC004pA007p001A004p001G004p001U004p001U004p001A000 | |
| U004p001U004p001U004pA004pC004pA004pA004pA004pA004pG004pC004pA00 | 2269 |
| 4pA004pA007p001A004p001C004p001A004p001G004p001G000 | |
| U004p001G004p001U004pG004pA004pC004pA004pC004pA004pA004pA004pG00 | 2270 |
| 4pC004pA007p001G004p001G004p001U004p001G004p001C000 | |
| U004p001U004p001U004pC004pA004pA004pG004pU004pU004pA004pC004pA00 | 2271 |
| 4pA004pA007p001A004p001G004p001C004p001A004p001A000 | |
| U004p001A004p001A004pA004pU004pA004pU004pC004pU004pU004pC004pA00 | 2272 |
| 4pA004pG007p001U004p001U004p001A004p001C004p001A000 | |
| U004p001A004p001U004pA004pA004pA004pU004pG004pU004pC004pU004pG00 | 2273 |
| 4pC004pU007p001U004p001G004p001C004p001U004p001U000 | |
| U004p001C004p001C004pG004pA004pA004pU004pA004pA004pA004pC004pU00 | 2274 |
| 4pC004pC007p001A004p001G004p001G004p001C004p001C000 | |
| U004p001G004p001G004pA004pA004pC004pC004pA004pU004pU004pU004pU00 | 2275 |
| 4pA004pA007p001A004p001G004p001C004p001U004p001C000 | |
| U004p001C004p001C004pA004pG004pA004pA004pU004pA004pA004pA004pU00 | 2276 |
| 4pA004pU007p001C004p001U004p001U004p001C004p001A000 | |
| U004p001A004p001U004pA004pU004pC004pU004pU004pC004pA004pA004pG00 | 2277 |
| 4pU004pU007p001A004p001C004p001A004p001A004p001A000 | |
| U004p001C004p001U004pC004pA004pG004pU004pU004pC004pC004pU004pG00 | 2278 |
| 4pC004pU007p001G004p001U004p001G004p001U004p001G000 | |
| U004p001C004p001U004pA004pC004pA004pA004pA004pA004pC004pC004pC00 | 2279 |
| 4pA004pG007p001A004p001A004p001U004p001A004p001A000 | |
| U004p001C004p001A004pA004pA004pA004pG004pA004pU004pA004pA004pA00 | 2280 |
| 4pU004pG007p001U004p001C004p001U004p001G004p001C000 | |
| U004p001U004p001U004pC004pC004pG004pA004pA004pU004pA004pA004pA00 | 2281 |
| 4pC004pU007p001C004p001C004p001A004p001G004p001G000 | |
| U004p001C004p001U004pG004pG004pC004pU004pC004pA004pG004pU004pU00 | 2282 |
| 4pC004pC007p001U004p001G004p001C004p001U004p001G000 | |
| U004p001C004p001A004pG004pA004pC004pA004pG004pC004pA004pU004pC00 | 2283 |
| 4pA004pU007p001G004p001G004p001C004p001U004p001G000 | |
| U004p001G004p001G004pG004pA004pU004pU004pC004pC004pA004pU004pG00 | 2284 |
| 4pC004pU007p001C004p001C004p001U004p001U004p001G000 | |

[1430] Specific codes in the nucleotide sequences are indicated in above, e.g., Tables A and A-1.

[1431] In some embodiment, the second dsRNAi agent includes a RNAi agent having a structure of

[chemical structure]

[1432] wherein the dsRNA includes any one of PCSK9 siRNA in Table 6h-3, the dsRNA includes:
   [1433] (i) a sense strand; and
   [1434] (ii) an antisense strand forming a duplex with the sense strand.

TABLE 6h-3

| PCSK9 | | | SEQ ID |
|---|---|---|---|
| siRNA | Sequence (5′-3′) | Strand | NO |
| 363 | A004p001G007p001A004pC007pC004pU007pG004pU007pU004p | SS | 2285 |
| | U007pU004pG007p001C004p001A007 | | |
| | U004p001G007p001C004pA007pA004pA007pA004pC007pA004p | AS | 2286 |
| | G007pG004pU007p001C004p001U007p001A004p001G007p001A | | |
| | 004p001A007p001A000 | | |
| 364 | U004p001G007p001U004pU007pU004pU007pG004pC007pU004p | SS | 2287 |
| | U007pU004pU007p001G004p001A007 | | |
| | U004p001C007p001A004pA007pA004pA007pG004pC007pA004p | AS | 2288 |
| | A007pA004pA007p001C004p001A007p001G004p001G007p001U | | |
| | 004p001C007p0010000 | | |
| 365 | G004p001U007p001U004pU007pU004pG007pC004pU007pU004p | SS | 2289 |
| | U007pU004pG007p001U004p001A007 | | |
| | U004p001A007p001C004pA007pA004pA007pA004pG007pC004p | AS | 2290 |
| | A007pA004pA007p001A004p001C007p001A004p001G007p001G | | |
| | 004p001U007p001C000 | | |
| 366 | U004p001U007p001G004pU007pA004pA007pC004pU007pU004p | SS | 2291 |
| | G007pA004pA007p001G004p001A007 | | |
| | U004p001C007p001U004pU007pC004pA007pA004pG007pU004p | AS | 2292 |
| | U007pA004pC007p001A004p001A007p001A004p001A007p001G | | |
| | 004p001C007p001A000 | | |
| 367 | U007p001A004p001G007pA004pC007pC004pU007pG004pU007p | SS | 2293 |
| | U004pU007pU004pG004p001C004p001A004 | | |
| | U004p001G007p001C004pA007pA004pA007pA004pC007pA004p | AS | 2294 |
| | G007pG004pU007pC004pU007pA004p001G007p001A004p001A0 | | |
| | 07p001A000 | | |

[1435] Specific codes in the nucleotide sequences are indicated in above, e.g., Tables A and A-1.

[1436] Additional suitable second dsRNAi agent targeting PCSK9 in Tables 6h-1 to 3, or variants thereof and synthesis thereof are also described in WO2022/266486, entire contents of which are incorporated herein by reference.

[1437] In some embodiment, the second dsRNAi agent may have a structure of

[chemical structure]

[1438] wherein the dsRNA includes any one of PCSK9 siRNA in Table 6i, the dsRNA includes.
   [1439] (i) a sense strand; and
   [1440] (ii) an antisense strand forming a duplex with the sense strand.

TABLE 6i

| | | | SEQ ID |
|---|---|---|---|
| siRNA | Sequence (5′-3′) | Strand | NO |
| 368 | A004p001U007p001C004pU007pU004pC007pA004pA007pG004p | SS | 2295 |
| | U007pU004pA007pC004pA007pA004pA007pA004pG004pC004pA | | |
| | 004pA004p001U004p001U004 | | |
| | U004p001U004p001G004pC004pU004pU004pU007pU004pG007p | AS | 2296 |
| | U007pA007pA004pC004pU004pU004pG004pA004pA004pG004pA | | |
| | 004pC004 | | |
| 369 | A004p001U007p001C004pU004pU004pC004pA004pA007pG004p | SS | 2297 |
| | U007pU004pA007pC004pA007pA004pA007pA004pG004pC004pA | | |
| | 004pA004p001U004p001U004 | | |
| | U004p001U004p001G004pC004pU004pU004pU007pU004pG007p | AS | 2298 |
| | U007pA007pA004pC004pU004pU004pG004pA004pA004pG004pA | | |
| | 004pC004 | | |
| 370 | A004p001U004p001C004pU004pU007pC004pA007pA004pG004p | SS | 2299 |
| | U007pU004pA007pC004pA007pA004pA007pA004pG004pC004pA | | |
| | 004pA004p001U004p001U004 | | |
| | U004p001U004p001G004pC004pU004pU004pU007pU004pG007p | AS | 2300 |
| | U007pA007pA004C004pU004pU004pG004pA004pA004pG004pA0 | | |
| | 04pA004 | | |
| 371 | A004p001U004p001C004pU004pU007pC004pA007pA004pG004p | SS | 2301 |
| | U007pU004pA007pC004pA007pA004pA007pA004pG004pC004pA | | |
| | 004pA004p001U004p001U004 | | |
| | U004p001U004p001G004pC004pU004pU004pU007pU004pG007p | AS | 2302 |
| | U007pA007pA004pC004pU004pU004pG004pA004pA004pG004pA | | |
| | 004pC004 | | |
| 372 | U004p001A007p001U004pC004pU004pU007pC004pA007pA004p | SS | 2303 |
| | G007pU004pU007pA004pC007pA004pA007pA004pA004pG004pC | | |
| | 004pA004p001U004p001U004 | | |
| | U004p001G004p001C004pU004pU004pU004pU007pG004pU007p | AS | 2304 |
| | A007pA007pC004pU004pU004pG004pA004pA004pG004pA004pU | | |
| | 004pA004 | | |
| 373 | U004p001A004p001U004pC004pU007pU004pC007pA004pA004p | SS | 2305 |
| | G007pU004pU007pA004pC007pA004pA007pA004pA004pG004pC | | |
| | 004pA004p001U004 | | |
| | U004p001G004p001C004pU004pU004pU004pU007pG004pU007p | AS | 2306 |
| | A007pA007pC004pU004pU004pG004pA004pA004pG004pA004pU | | |
| | 004pA004 | | |
| 374 | U004p001A007p001U004pC004pU004pU007pC004pA007pA004p | SS | 2307 |
| | G007pU004pU007pA004pC007pA004pA007pA004pA004pG004pC | | |
| | 004pA004p001U004p001U004 | | |
| | U004p001G004p001C004pU004pU004pU004pU007pG004pU007p | AS | 2308 |
| | A007pA002C004pU004pU004pG004pA004pA004pG004pA004pU0 | | |
| | 04pA004 | | |
| 375 | U004p001A007p001U004pC004pU004pU007pC004pA007pA004p | SS | 2309 |
| | G007pU004pU007pA004pC007pA004pA007pA004pA004pG004pC | | |
| | 004pA004p001U004p001U004 | | |
| | U004p001G004p001C004pU004pU004pU004pU007pG004pU007p | AS | 2310 |
| | A002pA007pC004pU004pU004pG004pA004pA004pG004pA004pU | | |
| | 004pA004 | | |
| 376 | U004p001A007p001U004pC004pU004pU007pC004pA007pA004p | SS | 2311 |
| | G007pU004pU007pA004pC007pA004pA007pA004pA004pG004pC | | |
| | 004pA004p001U004p001U004 | | |
| | U004p001G004p001C004pU004pU004pU004pU007pG004pT002p | AS | 2312 |
| | A007pA007pC004pU004pU004pG004pA004pA004pG004pA004pU | | |
| | 004pA004 | | |
| 377 | U004p001A007p001U004pC004pU004pU007pC004pA007pA004p | SS | 2313 |
| | G007pU004pU007pA004pC007pA004pA007pA004pA004pG004pC | | |
| | 004pA004p001U004p001U004 | | |
| | U004p001G004p001C004pU004pU004pU004pU007pG004pU007p | AS | 2314 |
| | A007pU007pC004pU004pU004pG004pA004pA004pG004pA004pU | | |
| | 004pA004 | | |
| 378 | U004p001A007p001U004pC004pU004pU007pC004pA007pA004p | SS | 2315 |
| | G007pU004pU007pA004pC007pA004pA007pA004pA004pG004pC | | |
| | 004pA004p001U004p001U004 | | |
| | U004p001G004p001C004pU004pU004pU004pU007pG004pU007p | AS | 2316 |
| | A007pC007pC004pU004pU004pG004pA004pA004pG004pA004pU | | |
| | 004pA004 | | |
| 379 | U004p001A007p001U004pC004pU004pU007pC004pA007pA004p | SS | 2317 |
| | G007pU004pU007pA004pC007pA004pA007pA004pA004pG004pC | | |
| | 004pA004p001U004p001U004 | | |
| | U004p001G004p001C004pU004pU004pU004pU007pG004pU007p | AS | 2318 |
| | A007pG007pC004pU004pU004pG004pA004pA004pG004pA004pU | | |
| | 004pA004 | | |
| 380 | A004p001U007p001C007pU004pU004pC007pA004pA007pG004p | SS | 2319 |
| | U007pU004pA007pC004pA007pA004pA007pA004pG004pC004pA | | |
| | 004pA004p001U004p001U004 | | |
| | U004p001U004p001G004pC004pU004pU004pU007pU004pG007p | AS | 2320 |
| | U007pA007pA004pC004pU004pU004pG004pA004pA004pG004pA | | |
| | 004pU004 | | |
| 381 | A004p001U007p001C007pU004pU004pC007pA004pA007pG004p | SS | 2321 |
| | U007pU004pA007pC004pA007pA004pA007pA004pG004pC004pA | | |
| | 004pA004p001U004p001U004 | | |
| | U004p001U004p001G004pC004pU004pU004pU007pU004pG007p | AS | 2322 |
| | U007pA007pA004pC004pU004pU004pG004pA004pA004pG004pA | | |
| | 004pC004 | | |
| 382 | A004p001U007p001C004pU004pU004pC004pA004pA007pG004p | SS | 2323 |
| | U004pU004pA007pC004pA007pA004pA007pA004pG004pC004pA | | |
| | 004pA004p001U004p001U004 | | |
| | U004p001U004p001G004pC004pU004pU004pU007pU004pG007p | AS | 2324 |
| | U007pA007pA004pC004pU004pU004pG004pA004pA004pG004pA | | |
| | 004pC004 | | |
| 383 | A004p001U007p001C004pU004pU004pC004pA004pA007pG004p | SS | 2325 |
| | U007pU004pA004pC004pA007pA004pA007pA004pG004pC004pA | | |
| | 004pA004p001U004p001U004 | | |
| | U004p001U004p001G004pC004pU004pU004pU007pU004pG007p | AS | 2326 |
| | U007pA007pA004pC004pU004pU004pG004pA004pA004pG004pA | | |
| | 004pU004 | | |
| 384 | A004p001U007p001C004pU004pU004pC004pA004pA007pG004p | SS | 2327 |
| | U007pU004pA004pC004pA007pA004pA007pA004pG004pC004pA | | |
| | 004pA004p001U004p001U004 | | |
| | U004p001U004p001G004pC004pU004pU004pU007pU004pG007p | AS | 2328 |
| | U007pA007pA004pC004pU004pU004pG004pA004pA004pG004pA | | |
| | 004pC004 | | |
| 385 | A004p001U007p001C004pU004pU004pC007pA004pA007pG004p | SS | 2329 |
| | U007pU004pA007pC004pA007pA004pA007pA004pG004pC004pA | | |
| | 004pA004p001U004p001U004 | | |
| | U004p001U004p001G004pC004pU004pU004pU007pU004pG007p | AS | 2330 |
| | U007pA007pA004pC004pU004pU004pG004pA004pA004pG004pA | | |
| | 004pC004 | | |

[1441] Specific codes in the nucleotide sequences are indicated in above, e.g., Tables A and A-1.

[1442] Additional suitable second dsRNAi agent targeting PCSK9 in Table 6i, or variants thereof and synthesis thereof are also described in WO2023/017004, entire contents of which are incorporated herein by reference.

[1443] In some embodiment, the second dsRNAi agent may have a structure of

[chemical structure]

[1444] wherein W is S or O and the dsRNA includes any one of PCSK9 siRNA in Table 6j, the dsRNA includes:
   [1445] (i) a sense strand; and
   [1446] (ii) an antisense strand forming a duplex with the sense strand.

TABLE 6j

| PCSK9 | | | SEQ ID |
|---|---|---|---|
| siRNA | Sequence (5′-3′) | Strand | NO |
| 386 | G000pU000pU000pU000pU000pG000pC000pU000pU000pU000pU00 | SS | 2331 |
| | 0pG000pU000pA000pA000pC000pU000pU000pG000pA000pA000 | | |
| | U000pU000pC000pA000pA000pG000pU000pU000pA000pC000pA00 | AS | 2332 |
| | 0pA000pA000pA000pG000pC000pA000pA000pA000pA000pC000pA | | |
| | 000pG000 | | |
| 387 | G004p001U004p001U004pU004pU004pG004pC007pU004pU007pU0 | SS | 2333 |
| | 07pU007pG004pU004pA004pA004pC004pU004pU004pG004pA004p | | |
| | A004 | | |
| | U004p001U007p001C004pA004pA004pG007pU004pU004pA004pC0 | AS | 2334 |
| | 04pA004pA004pA004pA007pG004pC007pA004pA004pA004pA004p | | |
| | C004p001A004p001G004 | | |
| 388 | G007p001U004p001U007pU004pU007pG004pC007pU004pU007pU0 | SS | 2335 |
| | 07pU007pG004pU007pA004pA007pC004pU007pU004pG007pA004p | | |
| | A007 | | |
| | U004p001U007p001C004pA007pA004pG007pU004pU007pA004pC0 | AS | 2336 |
| | 07pA004pA004pA004pA007pG004pC007pA004pA007pA004pA007p | | |
| | C004p001A004p001G004 | | |
| 389 | G004p001U004p001U004pU004pU004pG004pC007pU007pU007pU0 | SS | 2337 |
| | 04pU004pG004pU004pA004pA004pC004pU004pU004pG004pA004p | | |
| | A004 | | |
| | U004p001U007p001C004pA004pA004pG004pU004pU007pA004pC0 | AS | 2338 |
| | 04pA004pA004pA004pA004pG004pC007pA004pA007pA004pA004p | | |
| | C004p001A004p001G004 | | |
| 390 | G004p001U004p001U004pU004pU004pG004pC007pU004pU007pU0 | SS | 2339 |
| | 07pU007pG004pU004pA004pA004pC004pU004pU004pG004pA004p | | |
| | A004 | | |
| | U004p001U007p001C004pA004pA004pG007pU004pU007pA004pC0 | AS | 2340 |
| | 04pA004pA004pA004pA007pG004pC007pA004pA004pA004pA004p | | |
| | C004p001A004p001G004 | | |
| 391 | G004p001U004p001U004pU004pU004pG004pC007pU004pU007pU0 | SS | 2341 |
| | 07pU007pG004pU004pA004pA004pC004pU004pU004pG004pA004p | | |
| | A004 | | |
| | U004p001U007p001C004pA004pA004pG007pU004pU004pA007pC0 | AS | 2342 |
| | 04pA004pA004pA004pA007pG004pC007pA004pA004pA004pA004p | | |
| | C004p001A004p001G004 | | |
| 392 | G004p001U004p001U004pU004pU004pG004pC004pU004pU007pU0 | SS | 2343 |
| | 07pU007pG004pU004pA004pA004pC004pU004pU004pG004pA004p | | |
| | A004 | | |
| | U004p001U007p001C004pA004pA004pG007pU004pU007pA004pC0 | AS | 2344 |
| | 04pA004pA004pA004pA007pG004pC007pA004pA004pA004pA004p | | |
| | C004p001A004p001G004 | | |
| 393 | G004p001U004p001U004pU004pU004pG004pC004pU004pU007pU0 | SS | 2345 |
| | 07pU007pG004pU004pA004pA004pC004pU004pU004pG004pA004p | | |
| | A004 | | |
| | U004p001U007p001C004pA004pA004pG007pU004pU004pA007pC0 | AS | 2346 |
| | 04pA004pA004pA004pA007pG004pC007pA004pA004pA004pA004p | | |
| | C004p001A004p001G004 | | |
| 394 | G004p001U004p001U004pU004pU004pG004pC004pU004pU007pU0 | SS | 2347 |
| | 07pU007pG004pU004pA004pA004pC004pU004pU004pG004pA004p | | |
| | A004 | | |
| | U004p001U007p001C004pA004pA004pG007pU004pU004pA004pC0 | AS | 2348 |
| | 04pA004pA004pA004pA007pG004pC007pA004pA004pA004pA004p | | |
| | C004p001A004p001G004 | | |
| 395 | G000pU000pU000pU000pU000pG000pC000pU000pU000pU000pU00 | SS | 2349 |
| | 0pG000pU000pA000pA000pC000pU000pU000pG000pA000pA000 | | |
| | U000pU000pC000pA000pA000pG000pU000pU000pA000pC000pA00 | AS | 2350 |
| | 0pA000pA000pA000pG000pC000pA000pA000pA000pA000pC000pU | | |
| | 000pU000 | | |
| 396 | G004p001U004p001U004pU004pU004pG004pC007pU004pU007pU0 | SS | 2351 |
| | 04pU004pG004pU004pA004pA004pC004pU004pU004pG004pA004p | | |
| | A004 | | |
| | U004p001U007p001C004pA007pA007pG007pU004pU007pA004pC0 | AS | 2352 |
| | 07pA004pA007pA004pA007pG004pC007pA004pA007pA004pA004p | | |
| | C004p001U004p001U004 | | |
| 397 | G004p001U004p001U004pU004pU004pG004pC007pU004pU007pU0 | SS | 2353 |
| | 07pU007pG004pU004pA004pA004pC004pU004pU004pG004pA004p | | |
| | A004 | | |
| | U004p001U007p001C004pA004pA004pG007pU004pU007pA007pC0 | AS | 2354 |
| | 04pA004pA004pA004pA007pG004pC007pA004pA004pA004pA004p | | |
| | C004p001U004p001U004 | | |
| 398 | G004p001U004p001U004pU004pU004pG004pC007pU004pU007pU0 | SS | 2355 |
| | 07pU007pG004pU004pA004pA004pC004pU004pU004pG004pA004p | | |
| | A004 | | |
| | U004p001U007p001C004pA004pA004pG007pU004pU004pA004pC0 | AS | 2356 |
| | 04pA004pA004pA004pA007pG004pC007pA004pA004pA004pA004p | | |
| | C004p001U004p001U004 | | |
| 399 | G007p001U004p001U007pU004pU007pG004pC007pU004pU007pU0 | SS | 2357 |
| | 07pU007pG004pU007pA004pA007pC004pU007pU004pG007pA004p | | |
| | A007 | | |
| | U004p001U007p001C004pA007pA004pG007pU004pU007pA004pC0 | AS | 2358 |
| | 07pA004pA004pA004pA007pG004pC007pA004pA007pA004pA007p | | |
| | C004p001U004p001U004 | | |
| 400 | G004p001U004p001U004pU004pU004pG004pC007pU007pU007pU0 | SS | 2359 |
| | 04pU004pG004pU004pA004pA004pC004pU004pU004pG004pA004p | | |
| | A004 | | |
| | U004p001U007p001C004pA004pA004pG004pU004pU007pA004pC0 | AS | 2360 |
| | 04pA004pA004pA004pA004pG004pC007pA004pA007pA004pA004p | | |
| | C004p001U004p001U004 | | |
| 401 | U000pU000pU000pG000pC000pU000pU000pU000pU000pG000pU00 | SS | 2361 |
| | OpA000pA000pC000pU000pU000pG000pA000pA000 | | |
| | U000pU000pC000pA000pA000pG000pU000pU000pA000pC000pA00 | AS | 2362 |
| | 0pA000pA000pA000pG000pC000pA000pA000pA000pU000pU000 | | |
| 402 | U004p001U004p001U004pG004pC004pU004pU007pU004pU007pG0 | SS | 2363 |
| | 04pU004pA004pA004pC004pU004pU004pG004pA004pA004 | | |
| | U004p001U007p001C004pA007pA007pG007pU004pU007pA004pC0 | AS | 2364 |
| | 07pA004pA007pA004pA007pG004pC007pA004pA007pA004p001U0 | | |
| | 04p001U004 | | |
| 403 | U004p001U004p001U004pG004pC004pU004pU007pU004pU007pG0 | SS | 2365 |
| | 07pU007pA004pA004pC004pU004pU004pG004pA004pA004 | | |
| | U004p001U007p001C004pA004pA004pG007pU004pU007pA004pC0 | AS | 2366 |
| | 04pA004pA007pA004pA007pG004pC007pA004pA007pA004p001U0 | | |
| | 04p001U004 | | |

[1447] Specific codes in the nucleotide sequences are indicated in above, e.g., Tables A and A-1.

[1448] Additional suitable second dsRNAi agent targeting PCSK9 in Table 6j, or variants thereof and synthesis thereof are also described in WO2023/051822, entire contents of which are incorporated herein by reference.

[1449] In some embodiment, the second dsRNAi agent includes a dsRNA and a cationic polymer (e.g., polyetherimide) and/or a cationic lipid, wherein the dsRNA includes any one of PCSK9 siRNA in Table 6k and the dsRNA includes:
[1450] (i) a sense strand; and
[1451] (ii) an antisense strand forming a duplex with the sense strand.

TABLE 6k

| PCSK9 | | | SEQ ID |
|---|---|---|---|
| siRNA | Sequence (5′-3′) | Strand | NO |
| 404 | C000pC000p0000pC000pA000pU000pA000pG000pG000pC000pC | SS | 2367 |
| | 000pU000pG000pG000pA000pG000pU000p0000 | | |
| | A000pA000pC000pU000pC000pC000pA000pG000pG000pC000C | AS | 2368 |
| | 000pU000pA000pU000pG000pA000pG000pG000 | | |
| 405 | C000p001C000p001U000pC000pA000pU000pA000pG000pG000p | SS | 2369 |
| | C000pC000pT002pG004pG004pA004pG004pU004pU004pU004pA | | |
| | 004p001T002p001T002 | | |
| | A004p001A004p001C004pU004pC004pC004pA000pG000pG000p | AS | 2370 |
| | C000pC000pU000pA000pU000pG000pA000pG000pG000pG000pU | | |
| | 000p001T002p001T002 | | |
| 406 | C004pC004pU004pC004pA004pU004pA004pG004pG004pC004pC | SS | 2371 |
| | 004pT002pG004pG004pA004pG004pU004pU004pU004pA004p00 | | |
| | 1T002p001T002 | | |
| | A004pA004pC004pU004pC004pC004pA004pG004pG004pC004pC | AS | 2372 |
| | 004pU004pA004pU004pG004pA004pG004pG004pG004pU004pT0 | | |
| | 02p001T002 | | |

[1452] Specific codes in the nucleotide sequences are indicated in above, e.g., Tables A and A-1.

[1453] In some embodiments, the dsRNA in Table 6k, or variants thereof may be further conjugated or attached to a ligand (e.g., a ligand selected from compounds of formula (A) to (F) or subordinates thereof).

[1454] Additional suitable second dsRNAi agent targeting PCSK9 in Table 6k, or variants thereof and synthesis thereof are also described in CN116162620, entire contents of which are incorporated herein by reference.

[1455] In some embodiment, the second dsRNAi agent includes a dsRNA and a cationic polymer (e.g., polyetherimide) and/or a cationic lipid, wherein the dsRNA includes any one of PCSK9 siRNA in Table 61 and the dsRNA includes:
[1456] (i) a sense strand; and
[1457] (ii) an antisense strand forming a duplex with the sense strand.

TABLE 61

| PCSK9 | | | SEQ ID |
|---|---|---|---|
| siRNA | Sequence (5′-3′) | Strand | NO |
| 407 | G004pC004pC004pU004pG004pG004pA007pG007pU007pU004pU | SS | 2373 |
| | 004pA004pU004pU004pC004pG004pG004pA004pA004 | | |
| | U004pU007pC004pC004pG004pA004pA004pU004pA004pA004pA | AS | 2374 |
| | 004pC004pU004pC007pC004pA004pG004pG004pC004 | | |
| 408 | C004pC004pC004pU004pC004pA004pU007pA007pG007pG004pC | SS | 2375 |
| | 004pC004pU004pG004pG004pA004pG004pU004pU004 | | |
| | A004pA007pC004pU004pC004pC004pA004pG004pG004pC004pC | AS | 2376 |
| | 004pU004pA004pU007pG004pA004pG004pG004pG004pU004pG0 | | |
| | 04 | | |
| 409 | G004pC004pA004pC004pC004pC004pU007pC007pA007pU004pA | SS | 2377 |
| | 004pG004pG004pC004pC004pU004pG004pG004pA004 | | |
| | U004pC007pC004pA004pG004pG004pC004pC004pU004pA004pU | AS | 2378 |
| | 004pG004pA004pG007pG004pG004pU004pG004pC004pC004pG0 | | |
| | 04 | | |
| 410 | C004pA004pC004pC004pC004pU004pC004pA004pU007pA007pG | SS | 2379 |
| | 007pG004pC004pC004pU004pG004pG004pA004pG004pU004pU0 | | |
| | 04 | | |
| | A004pA007pC004pU004pC004pC004pA004pG004pG004pC004pC | AS | 2380 |
| | 004pU004pA004pU007pG004pA004pG004pG004pG004pU004pG0 | | |
| | 04pC004pC004 | | |
| 411 | C004pG004pG004pC004pA004pC004pC004pC004pU007pC007pA | SS | 2381 |
| | 007pU004pA004pG004pG004pC004pC004pU004pG004pG004pA0 | | |
| | 04 | | |
| | U004pC007pC004pA004pG004pG004pC004pC004pU004pA004pU | AS | 2382 |
| | 004pG004pA004pG007pG004pG004pU004pG004pC004pC004pG0 | | |
| | 04pC004pU004 | | |
| 412 | C004pC004pC004pU004pC007pA004pU007pA007pG007pG004pC | SS | 2383 |
| | 004pC004pU004pG004pG004pA004pG004pU004pU004 | | |
| | A004pA007pC004pU004pC004pC007pA004pG007pG007pC004pC | AS | 2384 |
| | 004pU004pA004pU007pG004pA007pG004pG004pG004pU004pG0 | | |
| | 04 | | |
| 413 | G004pC004pA004pC004pC007pC004pU007pC007pA007pU004pA | SS | 2385 |
| | 004pG004pG004pC004pC004pU004pG004pG004pA004 | | |
| | U004pC007pC004pA004pG004pG007pC004pC007pU007pA004pU | AS | 2386 |
| | 004pG004pA004pG007pG004pG007pU004pG004pC004pC004pG0 | | |
| | 04 | | |
| 414 | C004pA004pC004pC004pC004pU004pC007pA004pU007pA007pG | SS | 2387 |
| | 007pG004pC004pC004pU004pG004pG004pA004pG004pU004pU0 | | |
| | 04 | | |
| | A004pA007pC004pU004pC004pC007pA004pG004pG004pC004pC | AS | 2388 |
| | 004pU004pA004pU007pG004pA007pG004pG004pG004pU004pG0 | | |
| | 04pC004pC004 | | |
| 415 | C004pG004pG004pC004pA004pC004pC007pC004pU007pC007pA | SS | 2389 |
| | 007pU004pA004pG004pG004pC004pC004pU004pG004pG004pA0 | | |
| | 04 | | |
| | U004pC007pC004pA004pG004pG007pC004pC004pU004pA004pU | AS | 2390 |
| | 004pG004pA004pG007pG004pG007pU004pG004pC004pC004pG0 | | |
| | 04pC004pU004 | | |
| 415 | A004pC004pC004pC004pU004pC004pA007pU007pA007pG004pG | SS | 2391 |
| | 004pC004pC004pU004pG004pG004pA004pG004pU004 | | |
| | A004pC007pU004pC004pC004pA004pG004pG004pC004pC004pU | AS | 2392 |
| | 004pA004pU004pG007pA004pG004pG004pG004pU004pG004pC0 | | |
| | 04 | | |
| 416 | G004pC004pA004pC004pC004pC004pU004pC004pA007pU007pA | SS | 2393 |
| | 007pG004pG004pC004pC004pU004pG004pG004pA004pG004pU0 | | |
| | 04 | | |
| | A004pC007pU004pC004pC004pA004pG004pG004pC004pC004pU | AS | 2394 |
| | 004pA004pU004pG007pA004pG004pG004pG004pU004pG004pC0 | | |
| | 04pC004pG004 | | |
| 417 | A004pC004pC004pC004pU007pC004pA007pU007pA007pG004pG | SS | 2395 |
| | 004pC004pC004pU004pG004pG004pA004pG004pU004 | | |
| | A004pC007pU004pC004pC004pA007pG004pG007pC007pC004pU | AS | 2396 |
| | 004pA004pU004pG007pA004pG007pG004pG004pU004pG004pC0 | | |
| | 04 | | |
| 418 | G004pC004pA004pC004pC004pC004pU007pC004pA007pU007pA | SS | 2397 |
| | 007pG004pG004pC004pC004pU004pG004pG004pA004pG004pU0 | | |
| | 04 | | |
| | A004pC007pU004pC004pC004pA007pG004pG004pC004pC004pU | AS | 2398 |
| | 004pA004pU004pG007pA004pG007pG004pG004pU004pG004pC0 | | |
| | 04pC004pG004 | | |
| 419 | G004pC004pC004pU004pG004pG004pA007pG007pU007pU004pU | SS | 2399 |
| | 004pA004pU004pU004pC004pG004pG004pA004pA004 | | |
| | U004pU007pC004pC004pG004pA004pA004pU004pA004pA004pA | AS | 2400 |
| | 004pC004pU004pC007pC004pA004pG004pG004pC004pC004pU0 | | |
| | 04 | | |
| 420 | A004pG004pG004pC004pC004pU004pG004pG004pA007pG007pU | SS | 2401 |
| | 007pU004pU004pA004pU004pU004pC004pG004pG004pA004pA0 | | |
| | 04 | | |
| | U004pU007pC004pC004pG004pA004pA004pU004pA004pA004pA | AS | 2402 |
| | 004pC004pU004pC007pC004pA004pG004pG004pC004pC004pU0 | | |
| | 04pA004pU004 | | |
| 421 | G004pC004pC004pU004pG004pG004pA007pG007pU007pU004pU | SS | 2403 |
| | 004pA004pU004pU004pC004pG004pG004pA004pA004pT002pT0 | | |
| | 02 | | |
| | U004pU007pC004pC004pG004pA004pA004pU004pA004pA004pA | AS | 2404 |
| | 004pC004pU004pC007pC004pA004pG004pG004pC004pT002pT0 | | |
| | 02 | | |

[1458] Specific codes in the nucleotide sequences are indicated in above, e.g., Tables A and A-1.

[1459] In some embodiments, the dsRNA in Table 61, or variants thereof may be further conjugated or attached to a ligand (e.g., a ligand selected from compounds of formula (A) to (F) or subordinates thereof).

[1460] Additional suitable second dsRNAi agent targeting PCSK9 in Table 61, or variants thereof and synthesis thereof are also described in CN116162620, entire contents of which are incorporated herein by reference.

[1461] In some embodiment, the second dsRNAi agent includes any one of PCSK9 siRNA in Table 6m and the dsRNA includes:
[1462] (i) a sense strand; and
[1463] (ii) an antisense strand forming a duplex with the sense strand.

TABLE 6m

| PCSK9 | | | SEQ ID |
|---|---|---|---|
| siRNA | Sequence (5′-3′) | Strand | NO |
| 422 | C004p001A004p001A004pG004pC004pA004pA007pG007pC007p | SS | 2405 |
| | A004pG004pA004pC004pA004pU004pU004pU004pA004pU004 | | |
| | A004p001U007p001A004pA004pA004pU007pG004pU004pC004p | AS | 2406 |
| | U004pG004pC004pU004pU007pG004pC007pU004pU004pG004p0 | | |
| | 01G004p001G004 | | |
| 423 | A004p001G004p001C004pA004pA004pG004pC007pA007pG007p | SS | 2407 |
| | A004pC004pA004pU004pU004pU004pA004pU004pC004pU004 | | |
| | A004p001G007p001A004pU004pA004pA007pA004pU004pG004p | AS | 2408 |
| | U004pC004pU004pG004pC007pU004pU007pG004pC004pU004p0 | | |
| | 01U004p001G004 | | |
| 424 | A004p001A004p001G004pC004pA004pG004pA007pC007pA007p | SS | 2409 |
| | U004pU004pU004pA004pU004pC004pU004pU004pU004pU004 | | |
| | A004p001A007p001A004pA004pG004pA007pU004pA004pA004p | AS | 2410 |
| | A004pU004pG004pU004pC007pU004pG007pC004pU004pU004p0 | | |
| | 01G004p001C004 | | |
| 425 | C004p001U004p001A004pG004pA004pC004pC007pU007pG007p | SS | 2411 |
| | U004pU004pU004pU004pG004pC004pU004pU004pU004pU004 | | |
| | A004p001A007p001A004pA004pG004pC007pA004pA004pA004p | AS | 2412 |
| | A004pC004pA004pG004pG007pU004pC007pU004pA004pG004p0 | | |
| | 01A004p001A004 | | |
| 426 | U004p001U004p001U004pU004pG004pU004pA007pA007pC007p | SS | 2413 |
| | U004pU004pG004pA004pA004pG004pA004pU004pA004pU004 | | |
| | A004p001U007p001A004pU004pC004pU007pU004pC004pA004p | AS | 2414 |
| | A004pG004pU004pU004pA007pC004pA007pA004pA004pA004p0 | | |
| | 01G004p001C004 | | |
| 427 | U004p001U004p001U004pG004pU004pA004pA007pC007pU007p | SS | 2415 |
| | U004pG004pA004pA004pG004pA004pU004pA004pU004pU004 | | |
| | A004p001A007p001U004pA004pU004pC007pU004pU004pC004p | AS | 2416 |
| | A004pA004pG004pU004pU007pA004pC007pA004pA004pA004p0 | | |
| | 01A004p001G004 | | |
| 428 | U004p001U004p001G004pU004pA004pA004pC007pU007pU007p | SS | 2417 |
| | G004pA004pA004pG004pA004pU004pA004pU004pU004pU004 | | |
| | A004p001A007p001A004pU004pA004pU007pC004pU004pU004p | AS | 2418 |
| | C004pA004pA004pG004pU007pU004pA007pC004pA004pA004p0 | | |
| | 01A004p001A004 | | |
| 429 | U004p001A004p001A004pC004pU004pU004pG007pA007pA007p | SS | 2419 |
| | G004pA004pU004pA004pU004pU004pU004pA004pU004pU004 | | |
| | A004p001A007p001U004pA004pA004pA007pU004pA004pU004p | AS | 2420 |
| | C004pU004pU004pC004pA007pA004pG007pU004pU004pA004p0 | | |
| | 01C004p001A004 | | |
| 430 | U004p001U004p001U004pG004pU004pA004pG007pC007pA007p | SS | 2421 |
| | U004pU004pU004pU004pU004pA004pU004pU004pA004pA004 | | |
| | U004p001U007p001A004pA004pU004pA007pA004pA004pA004p | AS | 2422 |
| | A004pU004pG004pC004pU007pA004pC007pA004pA004pA004p0 | | |
| | 01A004p001C004 | | |
| 431 | G004p001U004p001A004pG004pC004pA004pU007pU007pU007p | SS | 2423 |
| | U004pU004pA004pU004pU004pA004pA004pU004pA004pU004 | | |
| | A004p001U007p001A004pU004pU004pA007pA004pU004pA004p | AS | 2424 |
| | A004pA004pA004pA004pU007pG004pC007pU004pA004pC004p0 | | |
| | 01A004p001A004 | | |

[1464] Specific codes in the nucleotide sequences are indicated in above, e.g., Tables A and A-1.

[1465] In some embodiments, the dsRNA in Table 6m, or variants thereof may be conjugated or attached to a ligand (e.g., a ligand selected from compounds of formula (A) to (F) or subordinates thereof).

[1466] Additional suitable second dsRNAi agent targeting PCSK9 in Table 6m, or variants thereof and synthesis thereof are also described in CN117106781, entire contents of which are incorporated herein by reference.

[1467] In some embodiment, the second dsRNAi agent includes any one of PCSK9 siRNA in Table 61 and the dsRNA includes:
[1468] (i) a sense strand; and
[1469] (ii) an antisense strand forming a duplex with the sense strand.

TABLE 6n

| PCSK9 | | | SEQ ID |
|---|---|---|---|
| siRNA | Sequence (5′-3′) | Strand | NO |
| 432 | A004p001A004p001G004pA004pU004pC004pC007pU004pG007p | SS | 2425 |
| | C007pA007pU004pG004pU004pC004pU004pU007pC004pC004pA | | |
| | 004pU004 | | |
| | A004p001U007pG004pG004pA004pA007pG1016pA004pC004pA0 | AS | 2426 |
| | 04pU004pG004pC004pA007pG004pG007pA004pU004pC004pU00 | | |
| | 4pU004p001G004p001G004 | | |
| 433 | A004p001A004p001G004pA004pU004pC004pC007pU004pG007p | SS | 2427 |
| | C007pA007pU004pG004pU004pC004pU004pU007pC004pC004pA | | |
| | 004pU004 | | |
| | X033A1027p001U007p001G004pG004pA004pA007pG004pA004p | AS | 2428 |
| | C004pA004pU004pG004pC004pA007pG004pG007pA004pU004pC | | |
| | 004pU004pU004p001G004p001G004 | | |
| 434 | U004p001G004p001G004pA004pG004pG004pC007pU004pU007p | SS | 2429 |
| | A007pG007pC004pU004pU004pU004pC004pU007pG004pG004pA | | |
| | 004pU004 | | |
| | A004p001U007p001C007pC007pA004pG007pA004pA004pA004p | AS | 2430 |
| | G004pC004pU004pA004pA007pG004pC007pC004pU004pC004pC | | |
| | 004pA004p001U004p001U004 | | |
| 435 | U004p001G004p001G004pA004pG004pG004pC007pU004pU007p | SS | 2431 |
| | A007pG007pC004pU004pU004pU004pC004pU007pG004pG004pA | | |
| | 004pU004 | | |
| | A004p001U007p001C007pC007pA004pG007pA1016pA004pA004 | AS | 2432 |
| | pG004pC004pU004pA004pA007pG004pC007pC004pU004pC004p | | |
| | C004pA004p001U004p001U004 | | |
| 436 | U004p001G004p001G004pA004pG004pG004pC007pU004pU007p | SS | 2433 |
| | A007pG007pC004pU004pU004pU004pC004pU007pG004pG004pA | | |
| | 004pU004 | | |
| | X033A1027p001U007p001C007pC007pA004pG007pA004pA004p | AS | 2434 |
| | A004pG004pC004pU004pA004pA007pG004pC007pC004pU004pC | | |
| | 004pC004pA004p001U004p001U004 | | |
| 437 | C004p001U004p001U004pU004pU004pG004pU007pA004pA007p | SS | 2435 |
| | C007pU007pU004pG004pA004pA004pG004pA007pU004pA004pU | | |
| | 004pU004 | | |
| | A004p001A007p001U004pA004pU004pC007pU004pU004pC004p | AS | 2436 |
| | A004pA004pG004pU004pU007pA004pC007pA004pA004pA004pA | | |
| | 004pG004p001C004p001A004 | | |
| 438 | C004p001U004p001U004pU004pU004pG004pU007pA004pA007p | SS | 2437 |
| | C007pU007pU004pG004pA004pA004pG004pA007pU004pA004pU | | |
| | 004pU004 | | |
| | X033A1027p001A007p001U004pA007pU007pC007pU004pU004p | AS | 2438 |
| | C004pA004pA004pG004pU004pU007pA004pC007pA004pA004pA | | |
| | 004pA004pG004p001C004p001A004 | | |
| 439 | C004p001U004p001U004pU004pU004pG004pU007pA004pA007p | SS | 2439 |
| | C007pU007pU004pG004pA004pA004pG004pA007pU004pA004pU | | |
| | 004pU004 | | |
| | X033A1027p001A007p001U004pA007pU007pC007pU1016pU004 | AS | 2440 |
| | pC004pA004pA004pG004pU004pU007pA004pC007pA004pA004p | | |
| | A004pA004pG004p001C004p001A004 | | |
| 440 | C004p001U004p001U004pU004pU004pG004pU007pA004pA007p | SS | 2441 |
| | C004pU007pU004pG004pA004pA004pG004pA007pU004pA004pU | | |
| | 004pU004 | | |
| | A004p001A007p001U007pA007pU004pC007pU004pU004pC004p | AS | 2442 |
| | A004pA004pG004pU004pU007pA004pC007pA004pA004pA004pA | | |
| | 004pG004p001C004p001A004 | | |
| 441 | G004p001A004p001A004pG004pA004pU004pA007pU004pU007p | SS | 2443 |
| | U007pA007pU004pU004pC004pU004pG004pG007pG004pU004pU | | |
| | 004pU004 | | |
| | X033A1027p001A007p001A004pC007pC007pC007pA004pG004p | AS | 2444 |
| | A004pA004pU004pA004pA004pA007pU004pA007pU004pC004pU | | |
| | 004pU004pC004p001A004p001A004 | | |
| 442 | G004p001A004p001A004pG004pA004pU004pA007pU004pU007p | SS | 2445 |
| | U004pA007pU004pU004pC004pU004pG004pG007pG004pU004pU | | |
| | 004pU004 | | |
| | A004p001A007p001A004pC007pC007pC007pA004pG004pA004p | AS | 2446 |
| | A004pU004pA004pA004pA007pU004pA007pU004pC004pU004pU | | |
| | 004pC004p001A004p001A004 | | |
| 443 | G004p001A004p001A004pG004pA004pU004pA007pU004pU007p | SS | 2447 |
| | U004pA007pU004pU004pC004pU004pG004pG007pG004pU004pU | | |
| | 004pU004 | | |
| | X033A1027p001A007p001A004pC007pC007pC007pA004pG004p | AS | 2448 |
| | A004pA004pU004pA004pA004pA007pU004pA007pU004pC004pU | | |
| | 004pU004pC004p001A004p001A004 | | |
| 444 | G004p001U004p001U004pU004pU004pG004pU007pA004pG007p | SS | 2449 |
| | C007pA007pU004pU004pU004pU004pU004pA007pU004pU004pA | | |
| | 004pA004 | | |
| | U004p001U007p001A007pA007pU004pA007pA004pA004pA004p | AS | 2450 |
| | A004pU004pG004pC004pU007pA004pC007pA004pA004pA004pA | | |
| | 004pC004p001C004p001C004 | | |
| 445 | G004p001U004p001U004pU004pU004pG004pU007pA004pG007p | SS | 2451 |
| | C007pA007pU004pU004pU004pU004pU004pA007pU004pU004pA | | |
| | 004pA004 | | |
| | X033U1027p001U007p001A004pA007pU007pA007pA004pA004p | AS | 2452 |
| | A004pA004pU004pG004pC004pU007pA004pC007pA004pA004pA | | |
| | 004pA004pC004p001C004p001C004 | | |
| 446 | G004p001U004p001U004pU004pU004pG004pU007pA004pG007p | SS | 2453 |
| | C007pA007pU004pU004pU004pU004pU004pA007pU004pU004pA | | |
| | 004pA004 | | |
| | X033U1027p001U007p001A004pA007pU007pA007pA1016pA004 | AS | 2454 |
| | pA004pA004pU004pG004pC004pU007pA004pC007pA004pA004p | | |
| | A004pA004pC004p001C004p001C004 | | |

[1470] Specific codes in the nucleotide sequences are indicated in above, e.g., Tables A and A-1.

[1471] In some embodiments, the dsRNA in Table 6n, or variants thereof may be conjugated or attached to a ligand having a structure of

[chemical structure]

[1472] In some embodiments, the dsRNA in Table 6n, or variants thereof may be conjugated or attached to a ligand (e.g., a ligand selected from compounds of formula (A) to (F) or subordinates thereof).

[1473] Additional suitable second dsRNAi agent targeting PCSK9 in Table 6n, or variants thereof and synthesis thereof are also described in CN117210468, entire contents of which are incorporated herein by reference.

[1474] In some embodiment, the second dsRNAi agent may have a structure of

[chemical structure]

[chemical structure]

and
[1475] a dsRNA selected from siRNAs in Table 6o, which is attached or conjugated to the ligand, wherein the dsRNA includes any one of PCSK9 siRNA in Table 6o and the dsRNA includes:
[1476] (i) a sense strand; and
[1477] (ii) an antisense strand forming a duplex with the sense strand

TABLE 60

| PCSK9 | | | SEQ ID |
|---|---|---|---|
| siRNA | Sequence (5′-3′) | Strand | NO |
| 447 | A004pG004pA004pC004pC004pU004pG007pU004pU007pU007pU | SS | 2455 |
| | 007pG004pC004pU004pU004pU004pU004pG004p001U004p001B | | |
| | 001 | | |
| | A004p001C007p001A004pA004pA004pA007pG004pC004pA004p | AS | 2456 |
| | A004pA004pA004pC004pA007pG004pG007pU004pC004pU004p0 | | |
| | 01A004p001G004 | | |
| 448 | B001p001A004p001G004pA004pC004pC004pU004pG007pU004p | SS | 2457 |
| | U007pU007p0007pG004pC004p0004pU004pU004pU004pG004pU | | |
| | 004 | | |
| | A004p001C007p001A004pA004pA004pA007pG004pC004pA004p | AS | 2458 |
| | A004pA004pA004pC004pA007pG004pG007pU004pC004pU004p0 | | |
| | 01A004p001G004 | | |

[1478] Specific codes in the nucleotide sequences are indicated in above, e.g., Tables A and A-1.

[1479] In some embodiments, the dsRNA in Table 6o, or variants thereof may be conjugated or attached to a ligand (e.g., a ligand selected from compounds of formula (A) to (F) or subordinates thereof).

[1480] Additional suitable second dsRNAi agent targeting PCSK9 in Table 6o, or variants thereof and synthesis thereof are also described in CN117384907, entire contents of which are incorporated herein by reference.

[1481] In some embodiments, the additional therapeutic agent includes the apoprotein (e.g., ApoA1, ApoC3, or ApoE) inhibitor. In some embodiments, the ApoA1 inhibitor may be a small molecule, antibody, peptide, or a therapeutic oligonucleotides (e.g., antisense oligonucleotide or “ASO”). In some embodiments, the additional therapeutic agent includes an antisense oligonucleotide targeting ApoA1 or ApoC3. In some embodiments, the additional therapeutic agent includes pelacarsen. In some embodiments, the additional therapeutic agent includes olezarsen.

[1482] In some embodiments, the additional therapeutic agent includes lipoprotein (a) (LPA) inhibitor. In some embodiments, the additional therapeutic agent is an antisense oligonucleotide targeting LPA, e.g., pelacarsen. The antisense oligonucleotide includes a nucleotide sequence of Oligo Nos. D1-D3 in Table 6p-1.

TABLE 6p-1

| | | SEQ |
|---|---|---|
| | | ID |
| Oligo no. | Antisense strand | NO: |
| D1 | UGCUCCGTTGGTGCTUGUUC | 2459 |
| D2 | ^{Me}UsGo^{Me}Co^{Me}Uo^{Me}Co^{Me}CsGsTsTsGsGsTsGs^{Me}CsTs^{Me}UoGo^{Me}Us | 2460 |
| | ^{Me}Us^{Me}C | |
| D3 | THA-AHo- | 2461 |
| (pelacarsen) | ^{Me}UsGo^{Me}Co^{Me}Uo^{Me}Co^{Me}CsGsTsTsGsGsTsGs^{Me}CsTs^{Me}UoGo^{Me}Us | |
| | ^{Me}Us^{Me}C | |

[1483] In Table 6p-1, “s” represents phosphorothioate (PS) linkage, “o” represents phosphodiester linkage, each “A,” “G,” “C,” and “T”, represents each deoxyribonucleic acid, “^{Me}” represents methylated modification on a nucleobase (e.g., “^{Me}U”), each “A,” “G,” “C,” and “U”, represents each ribonucleic acid with 2′-MOE modification.

[1484] In the Oligo no. D3, 5′-trishexylamino (THA)-AHo (or “THA-C6-GalNAc3”) in Table 6p-1 has the structure of

[chemical structure]

[1485] In the Oligo no. D3, THA in Table 6p-1 has the structure of

[chemical structure]

[1486] In some embodiments, the antisense oligonucleotide (pelacarsen) has the following structure (SEQ ID NO: 2461):

[chemical structure]

wherein R is —OCH₂CH₂OCH₃.

[1487] In some embodiments, the antisense oligonucleotide (pelacarsen) has the following structure (SEQ ID NO: 2461):

[chemical structure]

[1488] In some embodiments, the antisense oligonucleotide (pelacarsen) has the following structure (SEQ ID NO: 2461):

[chemical structure]

[1489] In some embodiments, the additional therapeutic agent includes lipoprotein (a) (LPA), or otherwise Apo(a) inhibitor. In some embodiments, the LPA (ApoA) inhibitor siRNA includes a dsRNA in Tables 6p-2 to 6p-7.

TABLE 6p-2

| LPA | | | SEQ ID |
|---|---|---|---|
| siRNA | Sequence (5′-3′) | Strand | NO |
| L1 | GAGAGUUAUCGAGGCACAUAA | SS | 2462 |
| | UUAUGUGCCUCGAUAACUCUC | AS | 2463 |
| L2 | (GLS- | SS | 2464 |
| | 15) p001 (Invab) p001G004pA004pG004pA004pG004pU004pU00 | | |
| | 4pA004pU007pC004pG007pA004pG007pG004pC004pA004pC004 | | |
| | pA004pU004pA004pA004p001 (Invab) | | |
| | U004p001U007p001A004pU004pG004pU004pG007pC004pC004p | AS | 2465 |
| | U004pC004pG007pA004pU007pA004pA007pC004pU004pC004p0 | | |
| | 01U004p001C004 | | |
| L3 | (GLS- | SS | 2466 |
| | 15) p001 (Imann) p001G004pA004pG004pA004pG004pU004pU00 | | |
| | 4pA004pU007pC004pG007pA004pG007pG004pC004pA004pC004 | | |
| | pA004pU004pA004p001A004p001 (Imann) | | |
| | U007p0010007p001A004pU004pG004pU004pG007pC004pC004p | AS | 2467 |
| | U004pC004pG007pA004pU007pA004pA007pC004pU004pC004p0 | | |
| | 01U004p001C004 | | |

GLS-15: [chemical structure]
Imann: [chemical structure]
or [chemical structure]
invab = inverted abasic

[1490] Specific codes in the nucleotide sequences are indicated in above, e.g., Tables A and A-1.

[1491] Additional suitable additional dsRNAi agent targeting LPA, or variants thereof and synthesis thereof are also described in WO2023/138689, entire contents of which are incorporated herein by reference.

TABLE 6p-3

| | | SEQ | | SEQ |
|---|---|---|---|---|
| siRNA | | ID | | ID |
| no. | Sense strand | NO: | Antisense strand | NO: |
| B1 | p001(Imann)p001G004pA004p | 2468 | U004p001U007p001A004pU004pG00 | 2469 |
| | G004pA004pG004pU004pU004p | | 4pU004pG007pC004pC004pU004pC0 | |
| | A004pU007pC004pG007pA004p | | 04pG007pA004pU007pA004pA007pC | |
| | G007pG004pC004pA004pC004p | | 004pU004pC004p001U004p001C004 | |
| | A004pU004pA004p001A004p00 | | | |
| | 1(Imann) | | | |

[1492] In Table 6p-3, (Imann),when at the end of each strand is

[chemical structure]

or when further coupling to a delivery molecule, is

[chemical structure]

Other specific codes in the nucleotide sequences are indicated in above, e.g., Tables A and A-1.

TABLE 6p-4

| | | SEQ | | SEQ |
|---|---|---|---|---|
| siRNA | | ID | | ID |
| no. | Sense strand | NO: | Antisense strand | NO: |
| B2 | p001(Invab)p001G004pA004p | 2470 | U004p001U007p001A004pU004pG00 | 2473 |
| | G004pA004pG004pU004pU004p | | 4pU004pG007pC004pC004pU004pC0 | |
| | A004pU007pC004pG007pA004p | | 04pG007pA004pU007pA004pA007pC | |
| | G007pG004pC004pA004pC004p | | 004pU004pC004p001U004p001C004 | |
| | A004pU004pA004pA004p001 | | | |
| | (Invab) | | | |
| B3 | p001(Imann)p001G004pA004p | 2471 | U007p001U007p001A004pU004pG00 | 2474 |
| | G004pA004pG004pU004pU004p | | 4pU004pG007pC004pC004pU004pC0 | |
| | A004pU007pC004pG007pA004p | | 04pG007pA004pU007pA004pA007pC | |
| | G007pG004pC004pA004pC004p | | 004pU004pC004p001U004p001C004 | |
| | A004pU004pA004p001A004p00 | | | |
| | 1(Imann) | | | |
| B4 | p001(Invab)p001G004pA004p | 2472 | U004p001U007p001A004pU004pG00 | 2475 |
| | G004pA004pG004pU004pU004p | | 4pU004pG007pC004pC004pU004pC0 | |
| | A004pU007pC004pG007pA004p | | 04pG007pA004pU007pA004pA007pC | |
| | G007pG004pC004pA004pC004p | | 004pU004pC004p001U004p001C004 | |
| | A004pU004pA004pA004p001 | | | |
| | (Invab) | | | |

[1493] In Table 6p-4, Imann is or

[chemical structure]

and invab is inverted abasic modification:

[chemical structure]

Other specific codes in the nucleotide sequences are indicated in above, e.g., Tables A and A-1.

TABLE 6p-5

| | | SEQ | | SEQ |
|---|---|---|---|---|
| SIRNA | | ID | | ID |
| no. | Sense strand | NO: | Antisense strand | NO: |
| B5 | C004p001A004pG004pC004pC0 | 2476 | U004p001C007p001G004pU007pA00 | 2478 |
| | 04pC004pC004pU004pU007pA0 | | 4pU007pA004pA004pC004pA004pA0 | |
| | 07pU007pU004pG004pU004pU0 | | 04pU007pA004pA007pG004pG007pG | |
| | 04pA004pU004pA004pC004pG0 | | 004pG007pC004p001U007p001G004 | |
| | 04p001 (invdA) | | | |
| B6 | G004pC004pC004pC004pC004p | 2477 | C007p001G004pU007pA004pU007pA | 2479 |
| | U004pU007pA007pU007pU004p | | 004pA004pC004pA004pA004pU007p | |
| | G004pU004pU004pA004pU004p | | A004pA007pG004pG007pG004pG007 | |
| | A004pC004pG004 | | pC004 | |

[1494] In Table 6p-5, (invdA) is an inverted deoxyriboadenosine (3′-3′ linked nucleotide). Other specific codes in the nucleotide sequences are indicated in above, e.g., Tables A and A-1.

TABLE 6p-6

| | | SEQ | | SEQ |
|---|---|---|---|---|
| SIRNA | | ID | | ID |
| no. | Sense strand | NO: | Antisense strand | NO: |
| B7 | C004p001G004pG004pU004pA004 | 2480 | A004p001U007p001A004pA007pC0 | 2483 |
| | pA004pU007pG007pG007pA004pC | | 04pU007pC004pU007pG004pU007p | |
| | 004pA004pG004pA004pG004pU00 | | C004pC007pA004pU007pU004pA00 | |
| | 4pU004p001A004p001U004 | | 7pC004p001C007p001G004 | |
| B8 | C004pG004pG004pU004pA004pA0 | 2481 | A004p001U007p001A004pA007pC0 | 2484 |
| | 04pU007pG007pG007pA004pC004 | | 04pU007pC004pU007pG004pU007p | |
| | pA004pG004pA004pG004pU004pU | | C004pC007pA004pU007pU004pA00 | |
| | 004p001A004p001U004 | | 7pC004p001C007p001G004 | |

TABLE 6p-7

| | | SEQ | | SEQ |
|---|---|---|---|---|
| SIRNA | | ID | | ID |
| no. | Sense strand | NO: | Antisense strand | NO: |
| B9 | C007pG004pG007pU004pA007p | 2482 | A004pU007pA004pA007pC004pU007 | 2485 |
| | A004pU007pG004pG007pA004p | | pC004pU007pG004pU007pC004pC00 | |
| | C007pA004pG007pA004pG007p | | 7pA004pU007pU004pA007pC004pC0 | |
| | U004pU007pA004pU007 | | 07pG004 | |

[1495] Specific codes in the nucleotide sequences are indicated in above, e.g., Tables A and A-1.

[1496] Additional suitable dsRNAi agents targeting Lp(a), or variants thereof and synthesis thereof are also described in WO2022/098841, WO 2017/059223, WO2019/092283, WO2022/032288, WO2023/138689, WO2025/064815, WO2025/064819, and WO2025/064821, entire contents of which are incorporated herein by reference.

[1497] In some embodiments, the additional therapeutic agent includes a angiotensinogen (AGT) protein inhibitor. In some embodiments, the AGT inhibitor siRNA includes zilebesiran. In some embodiments, the AGT inhibitor siRNA includes a dsRNA including a sense strand and an antisense strand in Tables 6q-1 to 6q-11.

TABLE 6q-1

| AGT | | | SEQ ID |
|---|---|---|---|
| siRNA | Sequence (5′-3′) | Strand | NO |
| 1 | CACCAGCUUGUUUGUGAAACA | SS | 2486 |
| | UGUUUCACAAACAAGCUGGUG | AS | 2487 |
| 2 | G004p001A004p001C004pC004pA004pG004pC004pU004pU007p | SS | 2488 |
| | G004pU007pU004pU007pG004pU004pG004pA004pA004pA004pC | | |
| | 004p001A004p (GLO-0) | | |
| | U004p001G007p001U004pU004pU004pC004pA007pC004pA004p | AS | 2489 |
| | A004pA004pC007pA004pA007pG004pC007pU004pG004pG004p0 | | |
| | 01U004p001C004 | | |
| 3 | (GLS- | SS | 2490 |
| | 15) (Invab) p001C004pA004pC004pC004pA004pG004pC004pU0 | | |
| | 04pU007pG004pU007pU004pU007pG004pU004pG004pA004pA00 | | |
| | 4pA004pC004pA004p001 (Invab) | | |
| | U004p001G007p001U004pU004pU004pC004pA007pC004pA004p | AS | 2491 |
| | A004pA004pC007pA004pA007pG004pC007pU004pG004pG004p0 | | |
| | 01U004p001G004 | | |

GLO-0: delivery molecules used in the in vivo studies
GLS-15: [chemical structure]
Imann: [chemical structure]
or [chemical structure]
invab = inverted abasic

[1498] Other specific codes in the nucleotide sequences are indicated in above, e.g., Tables A and A-1.

[1499] Additional suitable additional dsRNAi agent targeting AGT, or variants thereof and synthesis thereof are also described in WO2023/088227, entire contents of which are incorporated herein by reference.

TABLE 6g-2

| | | SEQ | | SEQ |
|---|---|---|---|---|
| | | ID | | ID |
| siRNA | Sense strand (modified) | NO. | Antisense strand (modified) | NO. |
| A56 | (Invab) p001C004pA004pC004pC0 | 2492 | U004p001G007p001U004pU004pU | 2498 |
| | 04pA004pG004pC004pU004pU007p | | 004pC004pA007pC004pA004pA00 | |
| | G004pU007pU004pU007pG004pU00 | | 4pA004pC007pA004pA007pG004p | |
| | 4pG004pA004pA004pA004pC004pA | | C007pU004pG004pG004p001U004 | |
| | 004p001 (Invab) | | p001G004p | |
| A57 | (Invab) p001G004pA004pC004pC0 | 2493 | U004p001A007p001C004pU004pC | 2499 |
| | 04pU004pU004pU004pU004pC007p | | 004pA004pU007pU004pA004pG00 | |
| | U004pU007pC004pU007pA004pA00 | | 4pA004pA007pG004pA007pA004p | |
| | 4pU004pG004pA004pG004pU004pA | | A007pA004pG004pG004p001U004 | |
| | 004p001 (Invab) | | p001C004p | |
| A58 | (Invab) p001G004pA004pC004pC0 | 2494 | U004p001A007p001C004pU004pC | 2500 |
| | 04pU004pU004pU004pC004pU007p | | 004pA004pU007pU004pA004pG00 | |
| | U004pU007pC004pU007pA004pG00 | | 4pA004pA007pG004pA007pA004p | |
| | 4pC004pG004pA004pG004pU004pA | | A007pA004pG004pG004p001U004 | |
| | 004p001 (Invab) | | p001C004p | |
| A59 | (Invab) p001C004pA004pC004pC0 | 2495 | U004p001G007p001U004pU004pU | 2501 |
| | 04pA004pG004pC004pU004pU007p | | 004pC004pA007pC004pA004pA00 | |
| | G004pU007pU004pU007pG004pU00 | | 4pA004pC007pA004pA007pG004p | |
| | 4pG004pA004pA004pA004pC004pA | | C007pU004pG004pG004p001U004 | |
| | 004p001 (Invab) | | p001G004p | |
| A60 | (Invab) p001G004pC004pG004pU0 | 2496 | U004p001C007p001U004pU004pA | 2502 |
| | 04pU004pU004pC004pU004pC007p | | 004pG004pA007pC004pC004pA00 | |
| | C004pU007pU004pG007pG004pU00 | | 4pA004pG007pG004pA007pG004p | |
| | 4pC004pU004pA004pA004pG004pA | | A007pA004pA004pC004p001G004 | |
| | 004p001 (Invab) | | p001C004p | |
| A61 | (Invab) p001G004pC004pA004pA0 | 2497 | U004p001U007p001C004pG004pG | 2503 |
| | 04pA004pA004pA004pG004pA007p | | 007pU004pU044pG004pG004pA00 | |
| | A004pU007pU004pC007pC004pA00 | | 4pA004pU007pU004pC007pU004p | |
| | 4pA004pC004pC004pG004pA004pA | | U007pU004pU004pU004p001G004 | |
| | 004p001 (Invab) | | p001C004p | |

[1500] In Table 6q-2, (Invab) is an inverted abasic modification and U044 is uridine-unlocked nucleic acid. Other specific codes in the nucleotide sequences are indicated in above, e.g., Tables A and A-1.

TABLE 6q-3

| | | SEQ | | SEQ |
|---|---|---|---|---|
| | | ID | | ID |
| siRNA | Sense strand (modified) | NO. | Antisense strand (modified) | NO. |
| A62 | A007p001G004p001A007pA004pC | 2504 | U004p001U007p001A004pA007pA004p | 2516 |
| | 007pA004pA007pA004pA007pA00 | | A007pC004pC007pC004pA007pA004pU | |
| | 7pU007pU004pG007pG004pG007p | | 004pU004pU007pU004pU007pG004pU0 | |
| | U004pU007pU004pU007pA004pA0 | | 07pU004pC007pU004p001C004p001A0 | |
| | 07 | | 04 | |
| A63 | U004p001C004p001U004pC004pC | 2505 | A004p001U007p001U004pA004pG004p | 2517 |
| | 004pC004pA007pC004pC007pU00 | | A007pA004pG004pA004pA004pA004pA | |
| | 7pU007pU004pU004pC004pU004p | | 004pG004pG007pU004pG007pG004pG0 | |
| | U004pC004pU004pA004pA004pU0 | | 04pA004pG004pA004p001C004p001U0 | |
| | 04 | | 04 | |
| A64 | U004p001G004p001U004pU004pU | 2506 | U004p001U007p001U004pG004pA004p | 2518 |
| | 004pG004pC007pU004pG007pU00 | | U007pC004pA007pU007pA004pC004pA | |
| | 7pG007pU004pA004pU004pG004p | | 004pC004pA007pG004pC007pA004pA0 | |
| | A004pU004pC004pA004pA004pA0 | | 04pA004pC004pA004p001G004p001G0 | |
| | 04 | | 04 | |
| A65 | U004p001U004p001C004pC004pG | 2507 | U004p001U007p001G004pC004pA004p | 2519 |
| | 004pU004pA007pU004pA007pU00 | | U007pG004pC007pC007pA004pU004pA | |
| | 7pA007pU004pG004pG004pC004p | | 004pU004pA007pU004pA007pC004pG0 | |
| | A004pU004pG004pC004pA004pA0 | | 04pG004pA004pA004p001G004p001C0 | |
| | 04 | | 04 | |
| A66 | A004p001C004p001C004pU004pG | 2508 | U004p001A007p001U004pU004pG004p | 2520 |
| | 004pC004pA007pA004pA007pA00 | | C007pU004pC007pA007pA004pU004pU | |
| | 7pA007pU004pU004pG004pA004p | | 004pU004pU007pU004pG007pC004pA0 | |
| | G004pC004pA004pA004pU004pA0 | | 04pG004pG004pU004p001U004p001C0 | |
| | 04 | | 04 | |
| A67 | A004p001C004p001C004pU004pG | 2509 | U004p001A007p001U004pU004pG004p | 2521 |
| | 004pC004pA007pA004pA007pA00 | | C007pU004pC004pA004pA004pU004pU | |
| | 7pA007pU004pU004pG004pA004p | | 004pU004pU007pU004pG007pC004pA0 | |
| | G004pC004pA004pA004pU004pA0 | | 04pG004pG004pU004p001U004p001C0 | |
| | 04 | | 04 | |
| A68 | C004p001C004p001C004pA004pC | 2510 | U004p001U007p001C004pA004pU004p | 2522 |
| | 004pC004pU007pU004pU007pU00 | | U007pA004pG007pA007pA004pG004pA | |
| | 7pC007pU004pU004pC004pU004p | | 004pA004pA007pA004pG007pG004pU0 | |
| | A004pA004pU004pG004pA004pA0 | | 04pG004pG004pG004p001A004p001G0 | |
| | 04 | | 04 | |
| A69 | C004p001C004p001C004pA004pC | 2511 | U004p001U007p001C004pA004pU004p | 2523 |
| | 004pC004pU007pU004pU007pU00 | | U007pA004pG004pA004pA004pG004pA | |
| | 7pC007pU004pU004pC004pU004p | | 004pA004pA007pA004pG007pG004pU0 | |
| | A004pA004pU004pG004pA004pA0 | | 04pG004pG004pG004p001A004p001G0 | |
| | 04 | | 04 | |
| A70 | C004p001C004p001A004pG004pC | 2512 | U004p001U007p001U004pG004pU004p | 2524 |
| | 004pU004pU007pG004pU007pU00 | | U007pU004pC007pA007pC004pA004pA | |
| | 7pU007pG004pU004pG004pA004p | | 004pA004pC007pA004pA007pG004pC0 | |
| | A004pA004pC004pA004pA004pA0 | | 04pU004pG004pG004p001U004p001C0 | |
| | 04 | | 04 | |
| A71 | C004p001C004p001A004pG004pC | 2513 | U004p001U007p001U004pG004pU004p | 2525 |
| | 004pU004pU007pG004pU007pU00 | | U007pU004pC004pA004pC004pA004pA | |
| | 7pU007pG004pU004pG004pA004p | | 004pA004pC007pA004pA007pG004pC0 | |
| | A004pA004pC004pA004pA004pA0 | | 04pU004pG004pG004p001U004p001C0 | |
| | 04 | | 04 | |
| A72 | A004p001A004p001A004pA004pA | 2514 | U004p001U007p001G004pA004pA004p | 2526 |
| | 004pA004pG007pU004pG007pU00 | | A007pA004pG004pG004pG004pA004pA | |
| | 7pU007pC004pC004pC004pU004p | | 004pC004pA007pC004pU007pU004pU0 | |
| | U004pU004pU004pC004pA004pA0 | | 04pU004pU004pU004p001G004p001U0 | |
| | 04 | | 04 | |
| A73 | A004p001A004p001A004pA004pA | 2515 | U004p001U007p001G004pA004pA004p | 2527 |
| | 004pA004pG007pU004pG007pU00 | | A007pA004pG007pG007pG004pA004pA | |
| | 7pU007pC004pC004pC004pU004p | | 004pC004pA007pC004pU007pU004pU0 | |
| | U004pU004pU004pC004pA004pA0 | | 04pU004pU004pU004p001G004p001U0 | |
| | 04 | | 04 | |

[1501] Specific codes in the nucleotide sequences are indicated in above, e.g., Tables A and A-1.

TABLE 6q-4

| | | SEQ | | SEQ |
|---|---|---|---|---|
| | | ID | | ID |
| siRNA | Sense strand (modified) | NO. | Antisense strand (modified) | NO. |
| A74 | G004p001U004p001C004pA004pU | 2528 | U004p001G007p001U004pA004pC | 2529 |
| | 004pC004pC007pA004pC007pA00 | | 004pT1016pC004pU004pC004pA0 | |
| | 7pA007pU004pG004pA004pG004p | | 04pU004pU004pG004pU007pG004 | |
| | A004pG004pU004pA004pC004pA0 | | pG007pA004pU004pG004pA004pC | |
| | 04 | | 004p001G004p001A004 | |

[1502] In Table 6q-4, T1016 is thymidine-GNA (S-isomer). Other specific codes in the nucleotide sequences are indicated in above, e.g., Tables A and A-1.

TABLE 69-5

| | | SEQ | | SEQ |
|---|---|---|---|---|
| | | ID | | ID |
| siRNA | Sense strand (modified) | NO. | Antisense strand (modified) | NO. |
| A75 | G005p001C005*p001T005pA005pG | 2530 | A005p001A007p001G005pU007pT0 | 2533 |
| | 005pT005pC007pG005pC007pU007 | | 05pU007pT005pG005pC005*pA005 | |
| | pG007pC005*pA005pA005pA005pA | | pG005pC007pG005pA007pC005*pT | |
| | 005pC005*pT005pT005 | | 005pA005pG005pC005*p001T005p | |
| | | | 001T005 | |
| A76 | G005p001C005*p001A005pA005pA | 2531 | T005p001U007p001A005pU007pC0 | 2534 |
| | 005pG005pG007pC005*pC007pA00 | | 05*pU007pG005pC005*pT005pG00 | |
| | 7pG007pC005*pA005pG005pC005* | | 5pC005*pT005pG005pG007pC005* | |
| | pA005pG005pA005pT005pA005pA0 | | pC007pT005pT005pT005pG005pC0 | |
| | 05 | | 05*p001T005p001T005 | |
| A77 | A005p001G005p001C005*pC005*p | 2532 | T005p001U007p001A005pG007pA0 | 2535 |
| | G005pT005pU007pT005pC007pU00 | | 05pC007pC005*pA005pA005pG005 | |
| | 7pC007pC005*pT005pT005pG005p | | pG005pA005pG005pA007pA005pA0 | |
| | G005pT005pC005*pT005pA005pA0 | | 07pC005*pG005pG005pC005*pT00 | |
| | 05 | | 5p001T005p001T005 | |

TABLE 6q-6

| | | SEQ | | SEQ |
|---|---|---|---|---|
| | | ID | | ID |
| siRNA | Sense strand (modified) | NO. | Antisense strand (modified) | NO. |
| A78 | G007p001T005p001C007pT005 | 2536 | A005p001G007p001T005pU007pT005 | 2544 |
| | pC007pA005pC007pT005pU007 | | pU007pG005pC007pT005pG007pG005 | |
| | pU007pC007pC005*pA007pG00 | | pA005pA005pA007pG005pU007pG005 | |
| | 5pC007pA005pA007pA005pA00 | | pA007pG005pA007pC005*p001C005* | |
| | 7pT005pU007 | | p001C005 | |
| A79 | G007p001T005p001C007pT005 | 2537 | A005p001G007p001T005pU007pU007 | 2545 |
| | pC007pA005pC007pT005pU007 | | pU007pG005pC007pU007pG007pG005 | |
| | pU007pC007pC005*pA005pG00 | | pA005pA005pA007pG005pU007pG005 | |
| | 5pC007pA005pA005pA005pA00 | | pA007pG005pA007pC005*p001C005* | |
| | 7pC005*pU007 | | p001C005 | |
| A80 | G005p001T005p001C005*pT00 | 2538 | A005p001G007p001T005pT005pT005 | 2546 |
| | 5pC005*pA005pC007pT005pU0 | | pU007pG005pC007pU007pG005pG005 | |
| | 07pU007pC007pC005*pA005pG | | pA005pA005pA007pG005pU007pG005 | |
| | 005pC005*pA005pA005pA005p | | pA005pG005pA005pC005*p001C005* | |
| | A005pT005pT005 | | p001C005 | |
| A81 | G005p001T005p001C005*pT00 | 2539 | A005p001G007p001T005pU007pU007 | 2547 |
| | 5pC005*pA005pC007pT005pU0 | | pU007pG005pC007pU007pG005pG005 | |
| | 07pU007pC007pC005*pA005pG | | pA005pA005pA007pG005pU007pG005 | |
| | 005pC005*pA005pA005pA005p | | pA005pG005pA005pC005*pC005*p00 | |
| | A005pT005pT005 | | 1C005 | |
| A82 | G005p001T005p001C005*pT00 | 2540 | A005p001G007p001T005pU007pU007 | 2548 |
| | 5pC005*pA005pC007pT005pU0 | | pU007pG005pC007pU007pG005pG005 | |
| | 07pU007pC007pC005*pA005pG | | pA005pA005pA007pG005pU007pG005 | |
| | 005pC005*pA005pA005pA005p | | pA005pG005pA005pC005*p001C005* | |
| | A005pC005*pT005 | | p001C005 | |
| A83 | G005p001C005*p001T005pG00 | 2541 | T005p001C007p001A005pA005pA005 | 2549 |
| | 5pA005pA005pC007pA005pG00 | | pA007pA005pA007pA007pA005pT005 | |
| | 7pC007pA007pT005pT005pC00 | | pG005pC005*pU007pG005pU007pT00 | |
| | 5*pT005pT005pC005*pT005pT | | 5pC005*pA005pG005pC005*p001A00 | |
| | 005pG005pA005 | | 5p001C005 | |
| A84 | G005p001T005p001C005*pT00 | 2542 | A005p001G007p001T005pT005pT005 | 2550 |
| | 5pC005*pA005pC007pT005pU0 | | pU007pG005pC007pU007pG005pG005 | |
| | 07pU007pC007pC005*pA005pG | | pA005pA005pA007pG005pU007pG005 | |
| | 005pC005*pA005pA005pA005p | | pA005pG005pA005pC005*p001C005* | |
| | A005p001T005p001T005 | | p001C005 | |
| A85 | G005p001C005*p001T005pG00 | 2543 | T005p001C007p001A005pA005pA005 | 2551 |
| | 5pA005pA005pC007pA005pG00 | | pA007pA005pA007pA007pA005pT005 | |
| | 7pC007pA007pT005pT005pC00 | | pG005pC005*pU007pG005pU007pT00 | |
| | 5*pT005pT005pC005*pT005pT | | 5pC005*pA005pG005pC005*p001A00 | |
| | 005pG005pA005 | | 5p001C005* | |

TABLE 69-7

| | | SEQ | | SEQ |
|---|---|---|---|---|
| | | ID | | ID |
| siRNA | Sense strand (modified) | NO. | Antisense strand (modified) | NO. |
| A86 | C004pG004pA004pC004pC004pA0 | 2552 | X033U1027pU007pC004pA007pC004 | 2555 |
| | 04pG007pC007pU007pU004pG004 | | pA007pA004pA007pC004pA007pA00 | |
| | pU004pU004pU004pG004pU004pG | | 4pG007pC004pU007pG004pG007pU0 | |
| | 004p001A004p001A004 | | 04p001C007p001G004 | |
| A87 | G004pU004pG004pU004pU004pU0 | 2553 | X033U1027pU007pA004pG007pA004 | 2556 |
| | 04pC007pU007pC007pC004pU004 | | pC007pC004pA007pA004pG007pG00 | |
| | pU004pG004pG004pU004pC004pU | | 4pA007pG004pA007pA004pA007pC0 | |
| | 004p001A004p001U004 | | 04p001A007p001C004 | |
| A88 | G004pC004pA004pG004pU004pU0 | 2554 | X033U1027pA007pU004pU007pU004 | 2557 |
| | 04pG007pA007pG007pA004pA004 | | pu007pU004pG007pU004pU007pC00 | |
| | pC004pA004pA004pA004pA004pA | | 4pU007pC004pA007pA004pC007pU0 | |
| | 004p001U004p001A004 | | 04p001G007p001C004 | |

TABLE 6q-8

| | | SEQ | | SEQ |
|---|---|---|---|---|
| | | ID | | ID |
| siRNA | Sense strand (modified) | NO. | Antisense strand (modified) | NO. |
| A89 | C004p001U004p001G004pA004p | 2558 | (MeEP) - | 2570 |
| | A004pC007pA004pG007pC007pA | | U004p001C007p001A007pA004p | |
| | 007pU007pU004pU004pU004pU0 | | A007pA004pA007pA004pA004pA | |
| | 04pU004pU004pU004p001G004p | | 007pT005pG004pC004pU007pG0 | |
| | 001A004 | | 04pU007pU004pC004pA004pG00 | |
| | | | 4p001C004p001A004 | |
| A90 | U004p001U004p001U004pG004p | 2559 | (MeEP) - | 2571 |
| | U004pG007pA004pA007pA007pC | | U004p001C007p001A007pC004p | |
| | 007pA007pA004pA004pA004pA0 | | U007pU004pU007pU004pU004pU | |
| | 04pA004pG004pU004p001G004p | | 007pG004pU004pU004pU007pC0 | |
| | 001A004 | | 04pA007pC004pA004pA004pA00 | |
| | | | 4p001C004p001A004 | |
| A91 | U004p001G004p001A004pA004p | 2560 | (MeEP) - | 2572 |
| | A004pC007pA004pA007pA007pA | | U004p001G007p001G007pA004p | |
| | 007pA007pA004pG004pU004pG0 | | A007pC004pA007pC004pU004pU | |
| | 04pU004pU004pC004p001C004p | | 007pU004pU004pU004pU007pG0 | |
| | 001A004 | | 04pU007pU004pU004pC004pA00 | |
| | | | 4p001C004p001A004 | |
| A92 | A004p001A004p001A004pA004p | 2561 | (MeEP) - | 2573 |
| | G004pU007pG004pU007pU007pC | | U004p001U007p001U007pG004p | |
| | 007pC007pC004pU004pU004pU0 | | A007pA004pA007pA004pG004pG | |
| | 04pU004pC004pA004p001A004p | | 007pG004pA004pA004pC007pA0 | |
| | 001A004 | | 04pC007pU004pU004pU004pU00 | |
| | | | 4p001U004p001U004 | |
| A93 | A004p001A004p001G004pU004p | 2562 | (MeEP) - | 2574 |
| | U004pG007pA004pG007pA007pA | | U004p001C007p001A007pA004p | |
| | 007pC007pA004pA004pA004pA0 | | U007pU004pU007pU004pU004pG | |
| | 04pA004pU004pU004p001G004p | | 007pU004pU004pC004pU007pC0 | |
| | 001A004 | | 04pA007pA004pC004pU004pU00 | |
| | | | 4p001G004p001A004 | |
| A94 | A004p001G004p001A004pA004p | 2563 | (MeEP) - | 2575 |
| | C004pA007pA004pA007pA007pA | | U004p001A007p001A007pA004p | |
| | 007pU007pU004pG004pG004pG0 | | A007pC004pC007pC004pA004pA | |
| | 04pU004pU004pU004p0010004p | | 007pU004pU004pU004pU007pU0 | |
| | 001A004 | | 04pG007pU004pU004pC004pU00 | |
| | | | 4p001C004p001A004 | |
| A95 | A004p001A004p001A004pA004p | 2564 | (MeEP) - | 2576 |
| | A004pU007pU004pG007pG007pG | | U004p001A007p001U007pU004p | |
| | 007pU007pU004pU004pU004pA0 | | U004pU004pA007pA004pA004pA | |
| | 04pA004pA004pA004p001U004p | | 007pC004pC004pC004pA007pA0 | |
| | 001A004 | | 04pU007pU004pU004pU004pU00 | |
| | | | 4p001G004p001U004 | |
| A96 | G004p001G004p001U004pU004p | 2565 | (MeEP) - | 2577 |
| | U004pU007pA004pA007pA007pA | | U004p001A007p001U007pA004p | |
| | 007pU007pU004pA004pA004pA0 | | C007pU004pU007pU004pA004pA | |
| | 04pG004pU004pA004p001U004p | | 007pU004pU004pU004pU007pA0 | |
| | 001A004 | | 04pA007pA004pA004pC004pC00 | |
| | | | 4p001C004p001A004 | |
| siRNA | Sense strand (modified) | SEQ | Antisense strand (modified) | SEQ |
| | | ID | | ID |
| | | NO. | | NO. |
| A97 | G004p001U004p001U004pU004p | 2566 | (MeEP) - | 2578 |
| | U004pA007pA004pA007pA007pU | | U004p001U007p001A007pU004p | |
| | 007pU007pA004pA004pA004pG0 | | A007pC004pU007pU004pU004pA | |
| | 04pU004pA004pU004p001A004p | | 007pA004pU004pU004pU007pU0 | |
| | 001A004 | | 04pA007pA004pA004pA004pC00 | |
| | | | 4p001C004p001C004 | |
| A98 | U004p001C004p001A004pU004p | 2567 | U004p001G007p001U007pA004p | 2579 |
| | C004pC007pA004pC007pA007pA | | C007pU004pC007pU004pC004pA | |
| | 007pU007pG004pA004pG004pA0 | | 007pU004pU004pG004pU007pG0 | |
| | 04pG004pU004pA004p001C004p | | 04pG007pA004pU004pG004pA00 | |
| | 001A004 | | 4p001C004p001G004 | |
| A99 | U004p001C004p001A004pU004p | 2568 | (EP) - | 2580 |
| | C004pC007pA004pC007pA007pA | | U004p001G007p001U007pA004p | |
| | 007pU007pG004pA004pG004pA0 | | C007pU004pC007pU004pC004pA | |
| | 04pG004pU004pA004p001C004p | | 007pU004pU004pG004pU007pG0 | |
| | 001A004 | | 04pG007pA004pU004pG004pA00 | |
| | | | 4p001C004p001G004 | |
| A100 | U004p001C004p001A004pU004p | 2569 | (MeEP) - | 2581 |
| | C004pC007pA004pC007pA007pA | | U004p001G007p001U007pA004p | |
| | 007pU007pG004pA004pG004pA0 | | C007pU004pC007pU004pC004pA | |
| | 04pG004pU004pA004p001C004p | | 007pU004pU004pG004pU007pG0 | |
| | 001A004 | | 04pG007pA004pU004pG004pA00 | |
| | | | 4p001C004p001G004 | |

[1503] In Table 6q-8, (EP)-U004p001 is 5′-EPmUs (phosphate mimic linked to a 5′-terminal uracil, shown below); and (MeEP)-U004p001 is 5′-MeEPmU (mono methyl protected phosphate mimic linked to a 5′-terminal uracil, shown below). Other specific codes in the nucleotide sequences are indicated in above, e.g., Tables A and A-1.

[chemical structure]

TABLE 6q-9

| | | SEQ | | SEQ |
|---|---|---|---|---|
| | | ID | | ID |
| siRNA | Sense strand (modified) | NO. | Antisense strand (modified) | NO. |
| A101 | (invdT) p001C004p001U004pG00 | 2582 | X033U1027p001U007p001G004pG0 | 2585 |
| | 4pU004pU004pC004pC004pA004p | | 07pA004pA007pU004pU007pC004p | |
| | A007pA007pA007pA004pG004pA0 | | U004pU004pU004pU004pU007pG00 | |
| | 04pA004pU004pU004pC004pC004 | | 4pG007pA004pA004pC004pA004pG | |
| | pA004pA004p001 (invdT) | | 004p001U004p001A004 | |
| A102 | (invdT) p001C004p001U004pG00 | 2583 | X033A1027p001U007p001G004pG0 | 2586 |
| | 4pU004pU004pC004pC004pA004p | | 07pA004pA007pU004pU007pC004p | |
| | A007pA007pA007pA004pG004pA0 | | U004pU004pU004pU004pU007pG00 | |
| | 04pA004pU004pU004pC004pC004 | | 4pG007pA004pA004pC004pA004pG | |
| | pA004p001 (tmU) | | 004p001U004p001A004 | |
| A103 | (invdT) p001G004p001C004pU00 | 2584 | X033U1027p001C007p001A004pA0 | 2587 |
| | 4pG004pA004pA004pC004pA004p | | 04pA004pA004pA004pA004pA004p | |
| | G007pC007pA007pC004pU004pU0 | | A004pU004pG004pC004pU007pG00 | |
| | 04pU004pU004pU004pU004pU004 | | 4pU007pU004pC004pA004pG004pC | |
| | pG004pA004p001 (invdT) | | 004p001A004p001C004 | |

[1504] In Table 6q-9, (invdT) is an inverted dT (deoxyribothymidine) with 3′-3′ linked nucleotide or 5′-5′ linked nucleotide; and (tmU) is a siRNA nucleotide with a modified sugar and a uracil base. Other specific codes in the nucleotide sequences are indicated in above, e.g., Tables A and A-1.

TABLE 6q-10

| | | SEQ | | SEQ |
|---|---|---|---|---|
| | | ID | | ID |
| siRNA | Sense strand (modified) | NO. | Antisense strand (modified) | NO. |
| A104 | C004p001C004p001U004pG004 | 2588 | U004p001G007p001A004pU007pC004 | 2592 |
| | pU004pU004pU007pA004pC007 | | pA007pU004pA007pC004pA007pC004 | |
| | pU007pG007pU007pG004pU004 | | pA007pG004pU007pA004pA007pA004 | |
| | pA004pU004pG004pA004pU004 | | pC007pA004pG007p001G004 | |
| | pC004p001A004p001 (Invab) | | | |
| A105 | U004p001G004p001A004pC004 | 2589 | A004p001C007p001A004pG007pC004 | 2593 |
| | pA004pG004pG007pU004pU007 | | pC007pU004pG007pC004pA007pU004 | |
| | pC007pA007pU007pG004pC004 | | pG007pA004pA007pC004pC007pU004 | |
| | pA004pG004pA004pC004pU004 | | pG007pU004pC007p001A004 | |
| | pG004p001U004p001 (Invab) | | | |
| A106 | C004p001G004pA004pC004pC0 | 2590 | U004p001G007p001U004pU007pU004 | 2594 |
| | 04pA004pG004pC007pU004pU0 | | pC007pA004pC007pA004pA007pA004 | |
| | 07pG007pU007pU007pU004pG0 | | pC007pA004pA007pG004pC007pU004 | |
| | 04pU004pG004pA004pA004pA0 | | pG007pG004pU007p001C004p001G00 | |
| | 04pC004p001A004p001 | | 4 | |
| | (Invab) | | | |
| A107 | A004p001A004pC004pC004pA0 | 2591 | U004p001G007p001U004pU007pU004 | 2595 |
| | 04pG004pC007pU004pU007pG0 | | pC007pA004pC007pA004pA007pA004 | |
| | 07pU007pU007pU004pG004pU0 | | pC007pA004pA007pG004pC007pU004 | |
| | 04pG004pA004pA004pA004pC0 | | pG007pG004pU007pU004p001G004p0 | |
| | 04p001A004p001 (Invab) | | 01G004 | |

[1505] In Table 6q-11, (Invab) is inverted abasic deoxyribose. Specific codes in the nucleotide sequences are indicated in above, e.g., Tables A and A-1.

TABLE 6q-11

| | | SEQ | | SEQ |
|---|---|---|---|---|
| | | ID | | ID |
| siRNA | Sense strand (modified) | NO. | Antisense strand (modified) | NO. |
| A108 | G004p001A004p001C004pC004pA | 2596 | U004p001G007p001U004pU004pU | 2598 |
| | 004pG004pC004pU004pU007pG00 | | 004pC004pA007pC004pA004pA00 | |
| | 4pU007pU004pU007pG004pU004p | | 4pA004pC007pA004pA007pG004p | |
| | G004pA004pA004pA004pC004p00 | | C007pU004pG004pG004p001U004 | |
| | 1A004p | | p001C004 | |
| A109 | p001 (Invab) p001C004pA004pC0 | 2597 | U004p001G007p001U004pU004pU | 2599 |
| | 04pC004pA004pG004pC004pU004 | | 004pC004pA007pC004pA004pA00 | |
| | pU007pG004pU007pU004pU007pG | | 4pA004pC007pA004pA007pG004p | |
| | 004pU004pG004pA004pA004pA00 | | C007pU004pG004pG004p001U004 | |
| | 4pC004pA004p001 (Invab) | | p001G004 | |

[1506] In Table 6q-11, (Invab) is inverted abasic deoxyribose. Specific codes in the nucleotide sequences are indicated in above, e.g., Tables A and A-1.

[1507] Additional suitable additional dsRNAi agent targeting AGT, or variants thereof and synthesis thereof are also described in WO2023088227, WO2015179724, WO2021096763, WO2023278576, CN114763547, CN117448322, WO2024013334, WO2024031101, WO2024187193, WO2023056446, WO2023192630, WO2014018930, WO2017062816, WO2022109139, WO2024149282, WO2022232650, CN118324834, WO2005116250, WO2013173637, WO2016196111, WO2020191243 and WO2023014765, entire contents of which are incorporated herein by reference.

### Pharmaceutical Compositions

[1508] Also provided herein is a pharmaceutical composition (“composition”) including the dsRNAi agents described herein (including all embodiments (e.g., Tables, Figures and Examples, and etc.) and a pharmaceutically acceptable carrier or excipient.

### Formulation

[1509] The pharmaceutical composition may be prepared and administered in a wide variety of dosage formulations. The dsRNAi agents described herein may be administered orally, rectally, or by injection (e.g. intravenously, intramuscularly, intracutaneously, subcutaneously, intraduodenally, or intraperitoneally). In certain embodiments, the dsRNAi agents are formulated for injection (e.g. intravenously, intramuscularly, intracutaneously, subcutaneously, intraduodenally, or intraperitoneally). In certain embodiments, the dsRNAi agents are administered subcutaneously. In certain embodiments, the dsRNAi agents are administered intravenously.

[1510] For preparing pharmaceutical compositions from the dsRNAi agents described herein, the pharmaceutically acceptable carriers or excipients may be liquid. Particularly, when parenteral application (e.g., subcutaneously or intravenously administered) is needed or desired, particularly suitable admixtures for the compounds included in the pharmaceutical composition may be injectable, sterile solutions, oily or aqueous solutions, as well as suspensions, emulsions, or implants, including suppositories. In certain aspects, for parenteral injection (e.g., subcutaneous or intravenous administration), liquid form preparations may include solutions (e.g., aqueous polyethylene glycol solution), suspensions, emulsions (e.g., water/propylene glycol solutions), aqueous or crystalline compositions, liposomal formulations, and micellar formulations. In some embodiments, the dsRNAi agent(s) or any combinations thereof that are described herein may be formulated in a sterile solution including water.

[1511] The pharmaceutically acceptable carriers or excipients can include buffers to adjust the pH to a desirable range for subcutaneous or intravenous use. In some embodiments, the pH of the pharmaceutical composition including the dsRNAi agents described herein may range from about 6.0 to about 8.0, from about 6.5 to 7.5, or from about 6.8 to 7.2. In some embodiments, the pH of the pharmaceutical compositions from the dsRNAi agents described herein may be about 6.8, about 6.9, about 7.0, about 7.1, or about 7.2. In some embodiments, the pH of the pharmaceutical composition from the dsRNAi agents described herein may be about 6.8. In some embodiments, the pH of the pharmaceutical composition from the dsRNAi agents described herein may be about 6.9. In some embodiments, the pH of the pharmaceutical composition from the dsRNAi agents described herein may be about 7.0. In some embodiments, the pH of the pharmaceutical composition from the dsRNAi agents described herein may be about 7.1. In some embodiments, the pH of the pharmaceutical composition from the dsRNAi agents described herein may be about 7.2.

[1512] In some embodiments, the liquid formulation for subcutaneous or intravenous use may include an acid (e.g., proton donor) or a base (e.g., hydroxide). In some embodiments, the liquid formulation of the pharmaceutical composition including the dsRNAi agents described herein may contain the phosphoric acid and/or sodium hydroxide. In some embodiments, the liquid formulation for subcutaneous or intravenous use may include a buffer solution containing acetate, citrate, prolamine, carbonate, phosphate, borate, sulfate, or any combination thereof, for example, the buffer solution is phosphate buffered saline (PBS). In some embodiments, the buffer solution may further include an agent to control the osmolarity, for example, proteins, peptides, amino acids, non-metabolized polymers, vitamins, ions, sugars, metabolites, organic acids, lipids, or salts (e.g., sodium chloride or potassium chloride).

[1513] In some embodiments, pharmaceutical compositions containing dsRNAi agent described herein include additional components to aid in delivery, stability, efficacy, or reduction of immunogenicity.

### Effective Dosages

[1514] The pharmaceutical composition may include compositions wherein the active ingredient dsRNAi agent is contained in a therapeutically effective amount, i.e., in an amount effective to achieve its intended purpose (e.g., gene-silencing (e.g., inhibiting, downregulating, or suppressing of the gene) the expression of HMGCR in a subject, or lowering LDL-C level in a subject). The actual amount effective for a particular application will depend, inter aim, on the condition being treated.

[1515] The pharmaceutical compositions described herein typically include a therapeutically effective amount of dsRNAi agents described herein. In some embodiments, a therapeutically effective amount of the dsRNAi agent targeting the HMGCR (e.g., human HMGCR) can reduce HMGCR mRNA levels in a treated cell or subject by at least about 10, about 15, about 20, about 25, about 30, about 35, about 40, about 45, about 50, about 55, about 60, about 65, about 70, about 75, 80, about 85, about 90 or 95% compared to non-treated or control cell or subject. In some embodiments, a therapeutically effective amount of an RNAi agent targeting HMGCR can reduce HMGCR protein levels in a treated cell or subject by at least about 10%, about 15%, about 20%, about 25%, about 30%, about 35%, about 40%, about 45%, about 50%, about 55%, about 60%, about 65%, about 70%, about 75%, about 80%, about 85, about 90% or about 95% compared to non-treated or control cell or subject. In some embodiments, a therapeutically effective amount of an RNAi agent targeting HMGCR can reduce HMGCR protein levels in a treated cell or subject by at least about 40%, about 45%, about 50%, about 55%, about 60%, about 65%, about 70%, about 75%, about 80%, about 85, or about 90% compared to non-treated or control cell or subject.

[1516] A given clinical treatment (e.g., lowering LCL-C level in blood or serum of a subject) is considered effective where there is at least about 10%, about 15%, about 20%, about 25%, about 30%, about 35%, about 40%, about 45%, about 50%, about 55%, about 60%, about 65%, about 70%, about 75%, about 80%, about 85%, about 90% or about 95% reduction in a measurable parameter associated with a disease or disorder. In some embodiments, the given clinical treatment (e.g., lowering LCL-C level in blood or serum of a subject) is considered effective where there is at least about 40%, about 45%, about 50%, about 55%, about 60%, about 65%, about 70%, about 75%, about 80%, about 85%, or about 90% reduction in a measurable parameter associated with a disease or disorder. In some embodiments, therapeutically effective amount of a dsRNAi agent for the treatment of that disease or disorder (e.g., lowering LCL-C level in blood or serum of a subject) is the amount necessary to effect at least about 10%, about 15%, about 20%, about 25%, about 30%, about 35%, about 40%, about 45%, about 50%, about 55%, about 60%, about 65%, about 70%, about 75%, about 80%, about 85%, about 90% or 95% reduction, respectively, in that parameter. In some embodiments, therapeutically effective amount of a dsRNAi agent for the treatment of that disease or disorder (e.g., lowering LCL-C level in blood or serum of a subject) is the amount necessary to effect at least about 40%, about 45%, about 50%, about 55%, about 60%, about 65%, about 70%, about 75%, about 80%, about 85%, or about 90%, respectively, in that parameter.

[1517] In certain aspects, therapeutically effective amounts for use in humans can also be determined from animal models. For example, a dose for humans can be formulated to achieve a concentration that has been found to be effective in animals. The dosage in humans can be adjusted by monitoring compounds effectiveness and adjusting the dosage upwards or downwards, as described above. Adjusting the dose to achieve maximal efficacy in humans based on the methods described above and other methods is well within the capabilities of the ordinarily skilled artisan.

[1518] The dosage and frequency (single or multiple doses) of compounds administered can vary depending upon a variety of factors, including route of administration; size, age, sex, health, body weight, body mass index, and diet of the recipient; nature and extent of symptoms of the disease being treated; presence of other diseases or other health-related problems; kind of concurrent treatment; and complications from any disease or treatment regimen. Other therapeutic regimens or agents can be used in conjunction with the methods and compounds disclosed herein.

[1519] Dosage amounts and intervals can be adjusted individually to provide levels of the administered dsRNAi agents that is effective for the particular clinical indication being treated. This will provide a therapeutic regimen that is commensurate with the severity of the individual's disease state.

[1520] The effective prophylactic or therapeutic treatment regimen as described herein can be planned that does not cause substantial toxicity and yet is entirely effective to treat the clinical symptoms demonstrated by the particular patient. This planning should involve the careful choice of active compound by considering factors such as compound potency, relative bioavailability, patient body weight, presence and severity of adverse side effects, preferred mode of administration, and the toxicity profile of the selected agent.

### Toxicity

[1521] The ratio between toxicity and therapeutic effect for the dsRNAi agent is its therapeutic index and can be expressed as the ratio between LD50 (the amount of compound lethal in 50% of the population) and ED50 (the amount of compound effective in 50% of the population). The dsRNAi agents that exhibit high therapeutic indices are preferred. Therapeutic index data obtained from cell culture assays and/or animal studies can be used in formulating a range of dosages for use in humans. The dosage of such dsRNAi agents preferably lies within a range of plasma concentrations that include the ED50 with little or no toxicity. The dosage may vary within this range depending upon the dosage form employed and the route of administration utilized. The exact formulation, route of administration, and dosage may also be chosen by the individual physician in view of the patient's condition and the particular method in which the dsRNAi agents are used.

### Combination

[1522] In certain aspects, pharmaceutical compositions may be formulated to administering the dsRNAi agent as described herein for the purpose of a combination with one or more additional therapeutic agents (second agents) that has been used or proved to be useful in treating a disorder or disease (e.g., HMGCR-associated disorder or disease, ASCVD, or a disorder of lipid metabolism) in a subject. In some embodiments, the additional agents subjected to the combination therapy may induce, promote, or facilitate gene silencing (e.g., inhibiting, downregulating, or suppressing of the gene) of the HMGCR in a subject.

[1523] In certain aspects, one or more additional therapeutic agents may be administered at the same time and/or in the same combination, e.g., parenterally, subcutaneously or intravenously, or the additional therapeutic agent can be administered as part of a separate composition or at separate times and/or by another method known in the art or described herein. For example, simultaneous administration may take place in a single pharmaceutical composition with two or more active ingredients, or by simultaneously administering two or more pharmaceutical compositions that are formulated independently. Sequential administration may take place by administrating one active ingredient (e.g., HMGCR dsRNAi agent) at one time point (first administration) and by administering other components (second administration) at a different time point, e.g., which is within 1 hour to 12 hours, or 1 to 14 days after the first administration. In some embodiments, sequential administration may take place by administrating one active ingredient (e.g., additional therapeutic agent, or inclisiran) at one time point (first administration) and by administering HMGCR dsRNAi agent (second administration) at a different time point, e.g., which is within 1 hour to 12 hours, or 1 to 14 days after the first administration.

[1524] In some embodiments, the dsRNAi agent and one or more additional therapeutic agents may be formulated (e.g., pre-mixed) in one syringe. In some embodiments, the dsRNAi agent and one or more additional therapeutic agents may be formulated in separate syringes in a single device and administered via a single device (e.g., through a single cannula, tube, or needle, or other injection device) such that the dsRNA agent and the additional therapeutic agents are mixed prior to administration. In some embodiments, the dsRNAi agent and one or more additional therapeutic agents may be formulated in separate syringes and administered via separate devices (e.g., through double or multiple cannulas, tubes, or needles, or other injection devices). In some embodiments, the dsRNAi agent and one or more additional therapeutic agents may be formulated in separate syringes and administered separately from a single device (e.g., through a single cannula, tube, or needle, or other injection device). In some embodiments, a syringe containing the dsRNAi agent and one or more separate syringes containing the additional therapeutic agents respectively may be accompanied with a single device of a co-package. In some embodiments, a syringe containing the dsRNAi agent and one or more separate syringes containing the additional therapeutic agents respectively may be accompanied with two devices of a co-package.

[1525] In some embodiments, the dsRNAi agent and inclisiran may be administered in a single formulation or pharmaceutical composition. In some embodiments, two separate pharmaceutical compositions may be formulated, and a first composition includes the dsRNAi agent as described herein (HMGCR targeting dsRNAi agent) and the second composition includes at least one of the additional therapeutic agents (second agents) described herein as active pharmaceutical ingredient. In some embodiments, the two separate pharmaceutical compositions may be administered simultaneously. In some embodiments, the two separate pharmaceutical compositions may be administered subsequently, e.g., by administering the first composition (e.g., HMGCR dsRNAi agent) and then administering the second composition, or by administering the second composition and then administering the first composition thereafter.

[1526] In some embodiments, the dsRNAi agent and inclisiran may be administered in a single formulation or pharmaceutical composition. In some embodiments, two separate pharmaceutical compositions may be formulated, and a first composition includes the dsRNAi agent as described herein (HMGCR targeting dsRNAi agent) and the second composition includes inclisiran as active pharmaceutical ingredient. In some embodiments, the two separate pharmaceutical compositions may be administered simultaneously. In some embodiments, the two separate pharmaceutical compositions may be administered subsequently, e.g., by administering the first composition (e.g., HMGCR dsRNAi agent) and then administering the second composition (e.g., inclisiran), or by administering the second composition and then administering the first composition thereafter.

### Methods of Use

[1527] The methods and compositions of the present disclosure, e.g., the methods and HMGCR RNAi agent compositions, can be used in any appropriate dosage and/or composition described herein or known in the art, as well as with any suitable route of administration described herein or known in the art. Any aspects or embodiments disclosed herein that are not mutually exclusive can be combined.

[1528] In an aspect, the disclosure provides a method of or a use for inhibiting expression of 3-hydroxy-3-methylglutaryl-CoA reductase (HMGCR) in a subject. The method or the use includes administering to the subject the dsRNAi agent or a pharmaceutical composition as described herein. In some embodiments, the method includes administering to the subject a therapeutically effective amount of the dsRNAi agent or a pharmaceutical composition as described herein.

[1529] In an aspect, the disclosure provides a method of, or a use for inhibiting expression of 3-hydroxy-3-methylglutaryl-CoA reductase (HMGCR) in a subject. The method or the use includes administering to the subject the dsRNAi agent including the siRNA selected from Tables 1-4, or a pharmaceutical composition thereof. In some embodiments, the method includes administering to the subject a therapeutically effective amount of the dsRNAi agent including the siRNA selected from Tables 1-4, or a pharmaceutical composition thereof.

[1530] In certain aspects, the disclosure provides a method of, or for a use for treating or preventing the HMGCR-associated disorder or disease by reduction in HMGCR expression. The method or the use includes administering to the subject the dsRNAi agent including the siRNA selected from Tables 1-4, or a pharmaceutical composition thereof. In some embodiments, the method includes administering to the subject a therapeutically effective amount of the dsRNAi agent including the siRNA selected from Tables 1-4, or a pharmaceutical composition thereof. The level of HMGCR may be measured or detected in a sample (e.g., a blood, serum, or liver tissue) from the subject. In certain aspects, the method may include treating or preventing one or more symptoms in the subject having the HMGCR-associated disorder or disease. In some embodiments, the methods may decrease HMGCR protein accumulation.

[1531] Example HMGCR-associated disorders or diseases include acquired or inherited disorders of lipid metabolism. In some embodiments, HMGCR-associated disorders or diseases include any disorder associated with or caused by a disturbance in lipid metabolism, e.g., abnormal elevation of levels of any or all lipids and/or lipoproteins in the blood or a condition that can lead to abnormal elevation of levels of any or all lipids and/or lipoproteins in the blood, such as a hyperlipidemia, and other forms of lipid imbalance such as hypercholesterolemia, hypertriglyceridemia, mixed hyperlipidemia, primary hyperlipidemia, heterozygous familiar hypercholesterolemia (HeFH), homozygous familiar hypercholesterolemia (HoFH), as well as the pathological conditions associated with these disorders, e.g., congestive heart disease (CHD) and atherosclerosis. In some embodiments, the method is for treating hyperlipidemia. In some embodiments, the method is for treating hypercholesterolemia. In some embodiments, the method is for treating hypertriglyceridemia. In some embodiments, the method is for treating mixed hyperlipidemia. In some embodiments, the method is for treating primary hyperlipidemia. In some embodiments, the method is for treating heterozygous familiar hypercholesterolemia (HeFH). In some embodiments, the method is for treating homozygous familiar hypercholesterolemia (HoFH). In some embodiments, the method is for treating congestive heart disease (CHD). In some embodiments, the method is for treating atherosclerosis.

[1532] In an aspect, the disclosure also provides a method of, or a use for lowering a level of low-density lipoprotein cholesterol (LDL-C) in a subject. The method or the use includes administering to the subject the dsRNAi agent including the siRNA selected from Tables 1-4, or a pharmaceutical composition thereof. In some embodiments, the method includes administering to the subject a therapeutically effective amount of the dsRNAi agent including the siRNA selected from Tables 1-4, or a pharmaceutical composition thereof. In some embodiments, the level of low-density lipoprotein cholesterol (LDL-C) can be measured in a blood vessel of a subject. The method includes administering to the subject the dsRNAi agent or a pharmaceutical composition as described herein. In some embodiments, the method includes administering to the subject a therapeutically effective amount of the dsRNAi agent or a pharmaceutical composition as described herein.

[1533] In an aspect, the disclosure provides a method of, or a use for treating or preventing hyperlipidemia in a subject. The method or the use includes administering to the subject the dsRNAi agent including the siRNA selected from Tables 1-4, or a pharmaceutical composition thereof. In some embodiments, the method includes administering to the subject a therapeutically effective amount of the dsRNAi agent including the siRNA selected from Tables 1-4, or a pharmaceutical composition thereof. The method includes administering to the subject the dsRNAi agent or a pharmaceutical composition as described herein. In some embodiments, the method includes administering to the subject a therapeutically effective amount of the dsRNAi agent or a pharmaceutical composition as described herein.

[1534] In an aspect, the disclosure provides a method of, or a use for treating or preventing atherosclerotic cardiovascular disease (ASCVD) in a subject. The method includes administering to the subject the dsRNAi agent or a pharmaceutical composition as described herein. In some embodiments, the method includes administering to the subject a therapeutically effective amount of the dsRNAi agent or a pharmaceutical composition as described herein. In some embodiments, the method or the use includes administering to the subject the dsRNAi agent including the siRNA selected from Tables 1-4, or a pharmaceutical composition thereof. In some embodiments, the method includes administering to the subject a therapeutically effective amount of the dsRNAi agent including the siRNA selected from Tables 1-4, or a pharmaceutical composition thereof.

[1535] In certain aspects, for the methods described above, administration of the dsRNAi agent or the pharmaceutical composition may be, but not limited to, subcutaneous, intravenous, intramuscular, intraocular, intrabronchial, intrapleural, intraperitoneal, intraarterial, lymphatic, cerebrospinal, and any combinations thereof. In some embodiments, the dsRNAi agent or the pharmaceutical composition may be administered subcutaneously or intravenously.

[1536] In some embodiments, the dsRNAi agent is be delivered locally (e.g., to the site of the disease, such as a liver) so that levels of HMGCR outside the diseased areas can be maintained as close to normal as possible. In some embodiments, the level of HMGCR in the body can be modulated such that it is low enough to improve the disease state, but not so low that organ pathology occurs.

[1537] In some embodiments, the administration is via a depot injection that can release the dsRNAi agent in a consistent way over a prolonged time period, so as to reduce the frequency of dosing needed to obtain a desired effect, e.g., a desired inhibition of HMGCR, or a therapeutic or prophylactic effect and/or to provide more consistent serum concentrations of the therapeutic agent. In some embodiments, the administration is via a pump, e.g., external pump or a surgically implanted pump. For example, the pump is a subcutaneously implanted osmotic pump or an infusion pump for intravenous, subcutaneous, arterial, or epidural infusions. In some embodiments, the pump is a surgically implanted pump that delivers the dsRNAi agent described herein directly or closely to the liver.

[1538] In certain aspects, the methods described above further include administering to the subject an additional therapeutic agent. Combinations of two or more therapeutic agents (e.g., dsRNAi agent targeting HMGCR and an additional therapeutic agent) of sequential, separate and simultaneous administration are possible, preferably such that the combination of the therapeutic agents (e.g., dsRNAi agent targeting HMGCR and an additional therapeutic agent) show a joint therapeutic effect that exceeds the effect found when each single agent is used independently (e.g., at an interval so long that mutual or synergetic effect from combinations of therapeutic agents is not found).

[1539] Alternatively, in an aspect, the disclosure provides a method of, or use for treating or preventing the HMGCR-associated disorder or disease by reduction in HMGCR expression. The method includes administering to the subject a combination described above (i.e., composition including the combination of the dsRNAi agent as described herein and an additional therapeutic agent). In some embodiments, the method or the use includes administering to the subject the dsRNAi agent including the siRNA selected from Tables 1-4 and the and an additional therapeutic agent, or a pharmaceutical composition including the combination thereof. In some embodiments, the method includes administering to the subject a therapeutically effective amount of the dsRNAi agent including the siRNA selected from Tables 1-4 and the and an additional therapeutic agent, or a pharmaceutical composition including the combination thereof.

[1540] In an aspect, the disclosure provides a method of, or a use for treating or preventing hyperlipidemia in a subject and the method includes administering to the subject the combination described above. The method or the use includes administering to the subject the dsRNAi agent including the siRNA selected from Tables 1-4 and the and an additional therapeutic agent, or a pharmaceutical composition including the combination thereof. In some embodiments, the method includes administering to the subject a therapeutically effective amount of the dsRNAi agent including the siRNA selected from Tables 1-4 and the and an additional therapeutic agent, or a pharmaceutical composition including the combination thereof.

[1541] In an aspect, the disclosure provides a method of, or a use for treating or preventing atherosclerotic cardiovascular disease (ASCVD) in a subject and the method includes administering to the subject the combination described above. The method or the use includes administering to the subject the dsRNAi agent including the siRNA selected from Tables 1-4 and the and an additional therapeutic agent, or a pharmaceutical composition including the combination thereof. In some embodiments, the method includes administering to the subject a therapeutically effective amount of the dsRNAi agent including the siRNA selected from Tables 1-4 and the and an additional therapeutic agent, or a pharmaceutical composition including the combination thereof.

[1542] The additional therapeutic agents suitable for the combination with the dsRNAi agents described herein may include a drug or agent that has been used or proven to be useful in treating a disorder of lipid metabolism (e.g., high cholesterol). In certain aspects, pharmaceutical compositions are formulated to administering the dsRNAi agents as described herein for the purpose of a combination with one or more additional therapeutic agents that has been used or proved to be useful in lowering LDL-C in a subject. In certain aspects, the additional therapeutic agent may suitably include selected from a HMGCR small molecule inhibitor (e.g., statins), a proprotein convertase subtilisin kexin 9 (PCSK9) inhibitor, a fibrate, a bile acid sequestrant, niacin, an antiplatelet agent, an angiotensin converting enzyme inhibitor, an angiotensin II receptor antagonist, an acyl-CoA cholesterol acetyltransferase (ACAT) inhibitor, a cholesterol absorption inhibitor, a cholesterol ester transfer protein (CETP) inhibitor, a microsomal triglyceride transfer protein (MTTP) inhibitor, a cholesterol modulator, a bile acid modulator, a peroxisome proliferation activated receptor (PPAR) agonist, a gene-based therapy, a composite vascular protectant, a glycoprotein IIb/IIIa inhibitor, aspirin or an aspirin-like compound, an IBAT inhibitor, a squalene synthase inhibitor, a monocyte chemoattractant protein (MCP)-I inhibitor, and a combination thereof.

[1543] In some embodiments, the additional therapeutic agent suitable for the combination with the dsRNAi agents described herein may include a lysophosphatidic acid (LPA) receptor inhibitor. In some embodiments, the additional therapeutic agent may include an angiotensinogen (AGT) inhibitor. In some embodiments, the additional therapeutic agent may include bile sequestering agents (e.g., cholestyramin E). In some embodiments, the additional therapeutic agent includes VLDL secretion inhibitors (e.g., niacin). In some embodiments, the additional therapeutic agent includes lipophilic antioxidants (e.g., Probucol). In some embodiments, the additional therapeutic agent includes acyl-CoA cholesterol acyl transferase inhibitors. In some embodiments, the additional therapeutic agent includes farnesoid X receptor antagonists. In some embodiments, the additional therapeutic agent includes sterol regulatory binding protein cleavage activating protein (SCAP) activators. In some embodiments, the additional therapeutic agent includes microsomal triglyceride transfer protein (MTP) inhibitors. In some embodiments, the additional therapeutic agent includes inhibitors to apolipoproteins (e.g., ApoA1, ApoB, ApoC3, ApoD, ApoE, ApoF, or ApoM). In some embodiments, the additional therapeutic agent includes and therapeutic antibodies against HMGCR. In some embodiments, the additional therapeutic agents may also include agents that raise high density lipoprotein (HDL). In some embodiments, the additional therapeutic agent includes such as cholesteryl ester transfer protein (CETP) inhibitors. In some embodiments, the additional therapeutic agents may also include dietary supplements, e.g., fish oil, and omega-3 oils. In some embodiments, the additional therapeutic agents do not include a HMGCR small molecule inhibitor (e.g., statins).

[1544] In some embodiments, the additional therapeutic agent or the second agent includes the PCSK9 inhibitor. In some embodiments, the PCSK9 inhibitor may be a small molecule, antibody, peptide, or a therapeutic RNA interference agent (e.g., siRNA). In some embodiments, the additional therapeutic agent includes a second dsRNAi agent (e.g., siRNA) targeting PCSK9. In some embodiments, the additional therapeutic agent particularly includes inclisiran (e.g., Leqvio®). In some embodiments, the second dsRNAi agent includes at least one of PCSK9 siRNA as described in Tables 6a to 6o or a variant thereof.

[1545] In some embodiments, the additional therapeutic agent or the second agent is an ASO agent. In some embodiments, the additional therapeutic agent includes the apoprotein (e.g., ApoA1, ApoC3, or ApoE) inhibitor. In some embodiments, the ApoA1 inhibitor may be a small molecule, antibody, peptide, or a therapeutic oligonucleotides (e.g., antisense oligonucleotide or “ASO”). In some embodiments, the additional therapeutic agent includes an antisense oligonucleotide targeting ApoA1 or ApoC3. In some embodiments, the ASO agent targets LPA gene. In some embodiments, the additional therapeutic agent particularly includes pelacarsen. In some embodiments, the additional therapeutic agent particularly includes olezarsen.

[1546] In some embodiments, the additional therapeutic agent includes lipoprotein (a) (LPA), or otherwise Apo(a) inhibitor. In some embodiments, the LPA (ApoA) inhibitor siRNA includes at least one of LPA siRNA as described in Tables 6p or a variant thereof.

[1547] In some embodiments, the additional therapeutic agent includes angiotensinogen (AGT) protein inhibitor. In some embodiments, the AGT inhibitor siRNA includes at least one of AGT siRNA as described in Tables 6q or a variant thereof. In some embodiments, the AGT inhibitor siRNA includes zilebesiran.

[1548] The dsRNAi agent as described herein and an additional therapeutic agent can be administered in any order, simultaneously or sequentially, or in multiple doses over time. Simultaneous administration may take place in the form of one fixed combination with two or more therapeutic agents (e.g., API), or by simultaneously administering two or more therapeutic agents (e.g., API) that are formulated independently. Sequential administration may be administration of one (first) therapeutic agent of a combination at one time point, other (second) therapeutic agent at a different time point, e.g., in a chronically staggered manner. In some embodiments, the sequential administration of the combination is scheduled to provide more efficiency than the single compounds administered independently (especially showing synergism). Separate administration may be administration of the components of the combination independently of each other at different time points, for example, meaning that the components are administered such that no overlap of measurable blood levels of both compounds are present in an overlapping manner (at the same time).

[1549] In some embodiments, the dsRNAi agent or the pharmaceutical composition as described herein and the additional therapeutic agent are administered simultaneously. The additional therapeutic agents may be administered at the same time and/or in the same composition, e.g., parenterally, subcutaneously or intravenously. For example, simultaneous administration may take place in a single pharmaceutical composition with two or more therapeutic agents (e.g., API), or by simultaneously administering two or more pharmaceutical compositions that are formulated independently.

[1550] In some embodiments, the dsRNAi agent or the pharmaceutical composition as described herein and the additional therapeutic agent are administered subsequently, e.g., the additional therapeutic agent can be administered as part of a separate composition or at separate times and/or by another method known in the art or described herein. In some embodiments, sequential administration may take place by administrating one active ingredient (e.g., HMGCR dsRNAi agent) at one time point (first administration) and by administering other components (second administration) at a different time point, e.g., which is within 1 hour to 12 hours, or 1 to 14 days after the first administration, while the first administration is at least in effect. In some embodiments, sequential administration may take place by administrating one active ingredient (e.g., additional therapeutic agent, or inclisiran) at one time point (first administration) and by administering HMGCR dsRNAi agent (second administration) at a different time point, e.g., which is within 1 hour to 12 hours, or 1 to 14 days after the first administration, while the first administration is at least in effect.

[1551] Devices (e.g., depot injection, pump, or implants) described above for the administration may be independently used for the additional therapeutic agent. In some embodiments, the dsRNAi agent or the pharmaceutical composition and the additional therapeutic agent are administered subcutaneously. In some embodiments, the dsRNAi agent or the pharmaceutical composition and the additional therapeutic agent are administered intravenously. In some embodiments, the dsRNAi agent or the pharmaceutical composition and the additional therapeutic agent are administered subcutaneously and intravenously, respectively.

[1552] In some embodiments, the subject is a human. In some embodiments, the subject has or is diagnosed with hypercholesterolemia. In some embodiments, the subject has or is diagnosed with HMGCR-associated disorder or disease.

[1553] In some embodiments, the subject after treatment (e.g., after administering the dsRNAi agent or the pharmaceutical composition described herein) does not have a muscle side effect. In some embodiments, the subject the after treatment (e.g., after administering the dsRNAi agent or the pharmaceutical composition described herein) does not have a skeletal muscle side effect (e.g., muscle AE).

[1554] In certain aspects, provided is a method of reducing the risk of a major adverse cardiovascular event in a subject, comprising administering to the subject the dsRNAi agent as described herein or a pharmaceutically acceptable salt thereof, the pharmaceutical composition as described herein, the combination as described herein, or the pharmaceutical composition comprising the combination as described herein.

[1555] In some embodiments, the major adverse cardiovascular event is cardiovascular death, non-fatal myocardial infarction, non-fatal ischemic stroke, or urgent coronary revascularization.

[1556] In some embodiments, the subject has an established cardiovascular disease.

[1557] In some embodiments, the subject has not experienced a major atherosclerotic cardiovascular disease (ASCVD) event.

[1558] All methods described herein can be performed in any suitable order unless otherwise indicated herein or otherwise clearly contradicted by context. The use of any and all examples, or example language (e.g. “such as”) provided herein is intended merely to better illuminate the invention and does not pose a limitation on the scope of the invention otherwise claimed.

### Kit

[1559] In an aspect, provided is a kit including the dsRNAi agent or the pharmaceutical composition as described herein. In certain aspects, the kit further includes one or more applicator.

[1560] In certain aspects, the kit may include a suitable container containing a pharmaceutical composition (e.g., HMGCR dsRNAi agent) as described herein. In some embodiments, the container may be a vial or a pre-filled syringe. In certain aspects, the kit may include a suitable applicator (e.g., an injection device) for parenterally (e.g., subcutaneously or intravenously) administering the pharmaceutical composition (e.g., HMGCR dsRNAi agent) as described herein. In some embodiments, the kit includes a syringe as an applicator and optionally include a needle (e.g., with or without cannula). In some embodiments, the kit includes a pre-filled syringe containing the pharmaceutical composition (e.g., HMGCR dsRNAi agent), optionally with a needle (e.g., with or without cannula).

[1561] The additional therapeutic agents suitable for the combination with the dsRNAi agents described herein may include a drug or agent that has been used or proven to be useful in treating a disorder of lipid metabolism (e.g., high cholesterol). In certain aspects, pharmaceutical compositions are formulated to administering the dsRNAi agents as described herein for the purpose of a combination with one or more additional therapeutic agents that has been used or proved to be useful in lowering LDL-C in a subject. In certain aspects, the additional therapeutic agent may suitably include selected from a HMGCR small molecule inhibitor (e.g., statins), a proprotein convertase subtilisin kexin 9 (PCSK9) inhibitor, a lysophosphatidic acid (LPA) receptor inhibitor, an angiotensinogen (AGT) inhibitor, a fibrate, a bile acid sequestrant, niacin, an antiplatelet agent, an angiotensin converting enzyme inhibitor, an angiotensin II receptor antagonist, an acyl-CoA cholesterol acetyltransferase (ACAT) inhibitor, a cholesterol absorption inhibitor, a cholesterol ester transfer protein (CETP) inhibitor, a microsomal triglyceride transfer protein (MTTP) inhibitor, a cholesterol modulator, a bile acid modulator, a peroxisome proliferation activated receptor (PPAR) agonist, a gene-based therapy, a composite vascular protectant, a glycoprotein IIb/IIIa inhibitor, aspirin or an aspirin-like compound, an IBAT inhibitor, a squalene synthase inhibitor, a monocyte chemoattractant protein (MCP)-I inhibitor, and a combination thereof.

[1562] In some embodiments, the additional therapeutic agent suitable for the combination with the dsRNAi agents described herein may include a lysophosphatidic acid (LPA) receptor inhibitor. In some embodiments, the additional therapeutic agent may include an angiotensinogen (AGT) inhibitor. In some embodiments, the additional therapeutic agent may include bile sequestering agents (e.g., cholestyramin E). In some embodiments, the additional therapeutic agent includes VLDL secretion inhibitors (e.g., niacin). In some embodiments, the additional therapeutic agent includes lipophilic antioxidants (e.g., Probucol). In some embodiments, the additional therapeutic agent includes acyl-CoA cholesterol acyl transferase inhibitors. In some embodiments, the additional therapeutic agent includes farnesoid X receptor antagonists. In some embodiments, the additional therapeutic agent includes sterol regulatory binding protein cleavage activating protein (SCAP) activators. In some embodiments, the additional therapeutic agent includes microsomal triglyceride transfer protein (MTP) inhibitors. In some embodiments, the additional therapeutic agent includes inhibitors to apolipoproteins (e.g., ApoA1, ApoB, ApoC3, ApoD, ApoE, ApoF, or ApoM). In some embodiments, the additional therapeutic agent includes and therapeutic antibodies against HMGCR. In some embodiments, the additional therapeutic agents may also include agents that raise high density lipoprotein (HDL). In some embodiments, the additional therapeutic agent includes such as cholesteryl ester transfer protein (CETP) inhibitors. In some embodiments, the additional therapeutic agents may also include dietary supplements, e.g., fish oil, and omega-3 oils. In some embodiments, the additional therapeutic agents do not include a HMGCR small molecule inhibitor (e.g., statins).

[1563] In certain aspects, the additional therapeutic agent or the second agent is a second dsRNAi agent. In some embodiments, the second dsRNAi agent is a dsRNAi agent that targets one or more of the genes selected from the group consisting of PCSK9, LPA, AGT, ACE, ACE2, AGTR1, AGTR2, ApoA1, ApoB, ApoC3, ApoD, ApoE, ApoF, ApoM, ACAT, CETP, MTTP, PPAR, IBAT, FDFT1, ERG9, SQS1, Ccl2, CCR2, CCL7, CCL8, CCL13, and CCL16. In some embodiments, the second dsRNAi agent targets PCSK9 gene. In some embodiments, the second dsRNAi agent targets LPA gene. In some embodiments, the second dsRNAi agent targets AGT gene. In some embodiments, the second dsRNAi agent targets ACE gene. In some embodiments, the second dsRNAi agent targets ACE2 gene. In some embodiments, the second dsRNAi agent targets AGTR1 gene. In some embodiments, the second dsRNAi agent targets ApoA1 gene. In some embodiments, the second dsRNAi agent targets ApoB gene. In some embodiments, the second dsRNAi agent targets ApoC3 gene. In some embodiments, the second dsRNAi agent targets ApoD gene. In some embodiments, the second dsRNAi agent targets ApoE gene. In some embodiments, the second dsRNAi agent targets ApoF gene. In some embodiments, the second dsRNAi agent targets ApoM gene. In some embodiments, the second dsRNAi agent targets AGTR2 gene. In some embodiments, the second dsRNAi agent targets ACATgene. In some embodiments, the second dsRNAi agent targets CETP gene. In some embodiments, the second dsRNAi agent targets MTTP gene. In some embodiments, the second dsRNAi agent targets PPAR gene. In some embodiments, the second dsRNAi agent targets IBAT gene. In some embodiments, the second dsRNAi agent targets FDFT1 gene. In some embodiments, the second dsRNAi agent targets ERG9 gene. In some embodiments, the second dsRNAi agent targets SQS1 gene. In some embodiments, the second dsRNAi agent targets CCL2 gene. In some embodiments, the second dsRNAi agent targets CCR2 gene. In some embodiments, the second dsRNAi agent targets CCL7 gene. In some embodiments, the second dsRNAi agent targets CCL8 gene. In some embodiments, the second dsRNAi agent targets CCL13 gene. In some embodiments, the second dsRNAi agent targets CCL16 gene.

[1564] In some embodiments, the additional therapeutic agent or the second agent includes the PCSK9 inhibitor. In some embodiments, the PCSK9 inhibitor may be a small molecule, antibody, peptide, or a therapeutic RNA interference agent (e.g., siRNA). In some embodiments, the additional therapeutic agent includes a second dsRNAi agent (e.g., siRNA) targeting PCSK9. In some embodiments, the additional therapeutic agent particularly includes inclisiran (e.g., Leqvio®). In some embodiments, the second dsRNAi agent includes at least one of PCSK9 siRNA as described in Tables 6a to 6o or a variant thereof.

[1565] In some embodiments, the additional therapeutic agent or the second agent is an ASO agent. In some embodiments, the additional therapeutic agent includes the apoprotein (e.g., ApoA1, ApoC3, or ApoE) inhibitor. In some embodiments, the ApoA1 inhibitor may be a small molecule, antibody, peptide, or a therapeutic oligonucleotides (e.g., antisense oligonucleotide or “ASO”). In some embodiments, the additional therapeutic agent includes an antisense oligonucleotide targeting ApoA1 or ApoC3. In some embodiments, the ASO agent targets LPA gene. In some embodiments, the additional therapeutic agent particularly includes pelacarsen. In some embodiments, the additional therapeutic agent particularly includes olezarsen.

[1566] In some embodiments, the additional therapeutic agent includes lipoprotein (a) (LPA), or otherwise Apo(a) inhibitor. In some embodiments, the LPA (ApoA) inhibitor siRNA includes at least one of LPA siRNA as described in Tables 6p or a variant thereof.

[1567] In some embodiments, the additional therapeutic agent includes angiotensinogen (AGT) protein inhibitor. In some embodiments, the AGT inhibitor siRNA includes at least one of AGT siRNA as described in Tables 6q or a variant thereof. In some embodiments, the AGT inhibitor siRNA includes zilebesiran.

[1568] In certain aspects, the dsRNAi agent and the additional therapeutic agent may be provided in one container, e.g., a single vial or pre-filled syringe. Alternatively, the dsRNAi agent and the additional therapeutic agent may be provided separately in two or more containers, e.g., separate vials or pre-filled syringes, e.g., one container for HMGCR dsRNAi agent, compound preparation, one container for the additional therapeutics, and/or another container for carrier components. In some embodiments, the dsRNAi agent and the additional therapeutic agent may be provided in separate vials or separate pre-filled syringe.

[1569] In certain aspects, the kit may include an instruction for use, e.g., instructions for administering or determining a therapeutically effective amount of a pharmaceutical composition (e.g., HMGCR dsRNAi agent) as described herein. In some embodiments, the instruction provides information for combined administrations, e.g., how to prepare and/or administer the two or more pharmaceutical compositions, e.g., compositions including the dsRNAi agent and the additional therapeutic agent, respectively. In some embodiments, the instruction may provide instruction for simultaneous or subsequential administration as described herein.

[1570] In some embodiments, the combined administration may include using one or more needles (e.g., with or without cannula). In some embodiments, two or more separate pharmaceutical compositions may be combined and administered simultaneously. In some embodiments, two or more separate pharmaceutical compositions may be combined and administered simultaneously using a needle with two or more openings or cannulars. In some embodiments, two or more separate pharmaceutical compositions may be administered sequentially using a needle with two or more openings or cannulars. In some embodiments, two or more separate pharmaceutical compositions may be administered with separate syringes and needles.

### Embodiments (I)

[1571] Embodiment 1: A double stranded RNAi (dsRNAi) agent comprising:
[1572] (a) a sense strand comprising a nucleotide sequence selected from SEQ ID NO: 3 and an antisense strand comprising a nucleotide sequence selected from SEQ ID: 409;
[1573] (b) a sense strand comprising a nucleotide sequence selected from SEQ ID NO: 6 and an antisense strand comprising a nucleotide sequence selected from SEQ ID: 412;
[1574] (c) a sense strand comprising a nucleotide sequence selected from SEQ ID NO: 284 and an antisense strand comprising a nucleotide sequence selected from SEQ ID: 689;
[1575] (d) a sense strand comprising a nucleotide sequence selected from SEQ ID NO: 1434 and an antisense strand comprising a nucleotide sequence selected from SEQ ID: 1441;
[1576] (e) a sense strand comprising a nucleotide sequence selected from SEQ ID NO: 1435 and an antisense strand comprising a nucleotide sequence selected from SEQ ID: 1442;
[1577] (f) a sense strand comprising a nucleotide sequence selected from SEQ ID NO: 1436; and an antisense strand comprising a nucleotide sequence selected from SEQ ID: 1443;
[1578] (g) a sense strand comprising a nucleotide sequence selected from SEQ ID NO: 1437; and an antisense strand comprising a nucleotide sequence selected from SEQ ID: 1444;
[1579] (h) a sense strand comprising a nucleotide sequence selected from SEQ ID NO: 1438; and an antisense strand comprising a nucleotide sequence selected from SEQ ID: 1445;
[1580] (i) a sense strand comprising a nucleotide sequence selected from SEQ ID NO: 1439; and an antisense strand comprising a nucleotide sequence selected from SEQ ID: 1446; and
[1581] (j) a sense strand comprising a nucleotide sequence selected from SEQ ID NO: 1440; and an antisense strand comprising a nucleotide sequence selected from SEQ ID: 1447.

[1582] Embodiment 2: A double stranded RNAi (dsRNAi) agent comprising:
[1583] (i) a sense strand comprising a nucleotide sequence selected from SEQ ID Nos. 1294 to 1297 and 1448 to 1462 in Table 3;
[1584] (ii) an antisense strand forming a duplex with the sense strand and comprising a nucleotide sequence selected from SEQ ID Nos. 1298 to 1301, and 1463 to 1477 in Table 3.

[1585] Embodiment 3: The dsRNAi agent of Embodiment 1 or 2, wherein all the nucleotides in the sense strand and the antisense strand are modified nucleotides.

[1586] Embodiment 4: The dsRNAi agent of Embodiment 1 through 3, wherein each of the modified nucleotides independently comprises one or more modifications selected from a deoxy modification, a 2′-O-alkyl modification, a 2′-halo modification, a 2′-5′-linkage modification, a conformationally restricting modification, an abasic modification, a 2′-amino-modification, a 2′-O-allyl modification, 2′-C-alkyl modification, a 2′-O-alkoxyalkyl modification, a morpholino modification, a phosphoramidate modification, a modification containing a non-natural nucleobase, a modification in a tetrahydropyran, a modification containing a 1,5-anhydrohexitol, a modification containing a cyclohexenyl, a modification containing a phosphorothioate group, a modification containing a methylphosphonate group, a modification containing a 5′-phosphate, a modification to form a thermally destabilizing nucleotide, a modification containing glycol, and a 2-O-(N-methylacetamide) modification.

[1587] Embodiment 5: The dsRNAi agent of Embodiment 4, wherein each of the modified nucleotides is independently selected from GNA, 2′-O-alkoxyalkyl modified nucleotide, 2′-O-alkyl modified nucleotide, 2′-O-allyl modified nucleotide, 2′-C-allyl modified nucleotide, and 2′-halo modified nucleotide.

[1588] Embodiment 6: The dsRNAi agent of Embodiment 3, wherein all the modified nucleotides comprise a modification on a 2′ sugar ring.

[1589] Embodiment 7: The dsRNAi agent of Embodiment 6, wherein the modified nucleotides are selected from a 2′-O-alkyl modified nucleotide, a 2′-halo modified nucleotide, a 2′-deoxy modified nucleotide, and a 2′-O-alkoxyalkyl modified nucleotide.

[1590] Embodiment 8: The dsRNAi agent of any one of Embodiments 3 through 7, wherein one or more of the modified nucleotides further comprises a phosphorothioate (PS) modification.

[1591] Embodiment 9: The dsRNAi agent of any one of Embodiments 3 through 8, wherein each of the modified nucleotides comprises one or more modifications selected from 2′-O-methyl (2′-OMe) modification, 2′-fluoro (2′-F) modification, 2′-O-methoxyethyl (2′-MOE) modification, 3′-phosphorothioate (PS) modification, and 5′-vinyl-phosphonate (5′-VP) modification.

[1592] Embodiment 10: The dsRNAi agent of any one of Embodiments 1 through 9, wherein the sense strand comprises 2′-MOE modified nucleotides positioned at the 1st, 2nd, 20th, and 21st nucleotides from the 5′-end of the sense strand.

[1593] Embodiment 11: The dsRNAi agent of Embodiment 10, wherein the sense strand comprises only four 2′-MOE modified nucleotides.

[1594] Embodiment 12: The dsRNAi agent of any one of Embodiments 1 through 11, wherein the antisense strand comprises a 5′-(E)-VP group at the 1st nucleotide from 5′ end of the antisense strand.

[1595] Embodiment 13: The dsRNAi agent of any one of Embodiments 1 through 12, wherein the antisense strand comprises a 5′-(E)-VP-2′-OMe group at the 1st nucleotide from 5′ end of the antisense strand.

[1596] Embodiment 14: The dsRNAi agent of any one of Embodiments 1 and 13, wherein each of the sense strand and the antisense strand independently comprises two, three, four, five or six 2′-F modified nucleotides.

[1597] Embodiment 15: The dsRNAi agent of any one of Embodiments 1 through 14, wherein the sense strand comprises two, three, or four 2′-F modified nucleotides positioned at the 7th, 9th, 10th, and/or 11th nucleotide from 5′-end of the sense strand.

[1598] Embodiment 16: The dsRNAi agent of Embodiment 15, wherein the sense strand comprises 2′-F modified nucleotides positioned at the 7th, 9th, 10th, and 11th nucleotides from 5′-end of the sense strand.

[1599] Embodiment 17: The dsRNAi agent of Embodiment 16, wherein the sense strand comprises 2′-OMe modified nucleotides constituting the remaining positions in the sense strand.

[1600] Embodiment 18: The dsRNAi agent of any one of Embodiments 1 through 17, wherein the antisense strand comprises two, three, or four 2′-F modified nucleotides positioned at the 2nd, 6th, 14th, and/or 16th nucleotides from 5′-end of the antisense strand.

[1601] Embodiment 19: The dsRNAi agent of Embodiment 18, wherein the antisense strand comprises 2′-F modified nucleotides positioned at the 2nd, 6th, 14th, and 16th nucleotides from 5′-end of the antisense strand.

[1602] Embodiment 20: The dsRNAi agent of Embodiment 18 or 19, wherein the antisense strand comprises a GNA at the 5th nucleotide from 5′-end of the antisense strand.

[1603] Embodiment 21: The dsRNAi agent of Embodiment 19 or 20, wherein the antisense strand comprises 2′-OMe modified nucleotides constituting the remaining positions in the antisense strand.

[1604] Embodiment 22: The dsRNAi agent of any one of Embodiments 1 through 21, wherein the sense strand comprises two, three, or four 3′-(PS) modification at the 1st, 2nd, 19th and/or 20th nucleotides from 5′-end of the sense strands.

[1605] Embodiment 23: The dsRNAi agent of any one of Embodiments 1 through 22, wherein the antisense strand comprises two, three, or four 3′-(PS) modification at the 1st, 2nd, 21st and/or 22nd nucleotides from 5′-end of the antisense strands.

[1606] Embodiment 24: A double stranded RNAi (dsRNAi) agent, comprising,
[1607] (i) a sense strand comprising a nucleotide sequence of SEQ ID NO: 1294, and an antisense strand comprising a nucleotide sequence of SEQ ID NO: 1298;
[1608] (ii) a sense strand comprising a nucleotide sequence of SEQ ID NO: 1295, and an antisense strand comprising a nucleotide sequence of SEQ ID NO: 1299;
[1609] (iii) a sense strand comprising a nucleotide sequence of SEQ ID NO: 1296, and an antisense strand comprising a nucleotide sequence of SEQ ID NO: 1300; or
[1610] (iv) a sense strand comprising a nucleotide sequence of SEQ ID NO: 1297, and an antisense strand comprising a nucleotide sequence of SEQ ID NO: 1301.

[1611] Embodiment 25: The dsRNAi agent of any one of Embodiments 1 through 24, further comprising a ligand.

[1612] Embodiment 26: The dsRNAi agent of Embodiment 25, wherein the ligand comprises a N-acetylgalactosamine (GalNAc) moiety.

[1613] Embodiment 27: The dsRNAi agent of Embodiment 25 or 26, wherein the ligand has a structure of:

[chemical structure]

[1614] wherein:
[1615] each L¹ is independently a linker which may be same or different in each occurrence;
[1616] L² is a linker;
[1617] n is an integer from 1 to 3; or,

[chemical structure]

[1618] wherein:
[1619] each L¹¹, L¹², L¹³, L¹⁴, and L¹⁵ is an independently a linker;
[1620] L² is a linker;
[1621] wherein [symbol] is an attachment point to the sense strand.

[1622] Embodiment 28: The dsRNAi agent of Embodiment 27, wherein the ligand comprises the following structure of

[chemical structure]

[1623] wherein:
[1624] each p1, p2, p3, p11, q1, q2, q11, r1, r2, r3, z1, z2, and z3 is independently an integer from 0 to 12;
[1625] each n1, n2, and n3 is independently an integer from 1 to 3; and “*” is an attachment point to L².

[1626] Embodiment 29: The dsRNAi agent of any one of Embodiments 25 through 28, wherein the ligand comprises the following structure:

[chemical structure]

[1627] wherein
[1628] [symbol] is an attachment point to the sense strand.

[1629] Embodiment 30: The dsRNAi agent of Embodiment 29, wherein the ligand is conjugated to the 3′-end of the nucleotide sequence of the sense strand to form the following structure:

[chemical structure]

[1630] wherein W is —OH or —SH.

[1631] Embodiment 31: The dsRNAi agent of Embodiment 30, wherein W is —OH.

[1632] Embodiment 32: The dsRNAi agent of any one of Embodiments 1 through 31, wherein the dsRNAi agent is in a pharmaceutically acceptable salt form.

[1633] Embodiment 33: The dsRNAi agent of Embodiment 32, wherein the pharmaceutically acceptable salt is a sodium salt.

[1634] Embodiment 34: A double stranded RNAi (dsRNAi) agent comprising:
[1635] (i) a sense strand comprising a nucleotide sequence of SEQ ID NO: 1302, and an antisense strand comprising a nucleotide sequence of SEQ ID NO: 1306;
[1636] (ii) a sense strand comprising a nucleotide sequence of SEQ ID NO: 1303, and an antisense strand comprising a nucleotide sequence of SEQ ID NO: 1307;
[1637] (iii) a sense strand comprising a nucleotide sequence of SEQ ID NO: 1304, and an antisense strand comprising a nucleotide sequence of SEQ ID NO: 1308; or
[1638] (iv) a sense strand comprising a nucleotide sequence of SEQ ID NO: 1305; and an antisense strand comprising a nucleotide sequence of SEQ ID NO: 1309,
[1639] wherein the ligand is conjugated to the 3′-end of the nucleotide sequence of the sense strand to form the following structure:

[chemical structure]

[1640] of a pharmaceutically acceptable salt,
[1641] wherein W is —OH.

[1642] Embodiment 35: The dsRNAi agent of Embodiment 34, wherein the dsRNAi agent is in a pharmaceutically acceptable salt form.

[1643] Embodiment 36: The dsRNAi agent of Embodiment 35, wherein the pharmaceutically acceptable salt is a sodium salt.

[1644] Embodiment 37: A double stranded RNAi (dsRNAi) agent comprising:
[1645] (i) a sense strand consisting of a nucleotide sequence of SEQ ID NO: 1302, and an antisense strand consisting of a nucleotide sequence of SEQ ID NO: 1306;
[1646] (ii) a sense strand consisting of a nucleotide sequence of SEQ ID NO: 1303, and an antisense strand consisting of a nucleotide sequence of SEQ ID NO: 1307;
[1647] (iii) a sense strand consisting of a nucleotide sequence of SEQ ID NO: 1304, and an antisense strand consisting of a nucleotide sequence of SEQ ID NO: 1308; or
[1648] (iv) a sense strand consisting of a nucleotide sequence of SEQ ID NO: 1305; and an antisense strand consisting of a nucleotide sequence of SEQ ID NO: 1309,
[1649] wherein the ligand (L96) is conjugated to the 3′-end of the nucleotide sequence of the sense strand to form the following schematic:

[chemical structure]

or
[1650] wherein the ligand (L96) is conjugated to the 5′-end of the sense strand to form the following schematic:

[chemical structure]

[1651] or a pharmaceutically acceptable salt,
   [1652] wherein W is —OH.

[1653] Embodiment 38: The dsRNAi agent of Embodiment 37, wherein the dsRNAi agent is in a pharmaceutically acceptable salt form.

[1654] Embodiment 39: The dsRNAi agent of Embodiment 38, wherein the pharmaceutically acceptable salt is a sodium salt.

[1655] Embodiment 40: A pharmaceutical composition comprising the dsRNAi agent of any one of Embodiments 1 through 39, and a pharmaceutically acceptable carrier.

[1656] Embodiment 41: The pharmaceutical composition of Embodiment 40, wherein the composition is in an aqueous solution form.

[1657] Embodiment 42: The pharmaceutical composition of Embodiment 40 through 41, further comprising an additional therapeutic agent selected from a proprotein convertase subtilisin kexin 9 (PCSK9) inhibitor, a lysophosphatidic acid (LPA) receptor inhibitor, an angiotensinogen (AGT) inhibitor, a fibrate, a bile acid sequestrant, niacin, an antiplatelet agent, an angiotensin converting enzyme inhibitor, an angiotensin II receptor antagonist, an acylCoA cholesterol acetyltransferase (ACAT) inhibitor, a cholesterol absorption inhibitor, a cholesterol ester transfer protein (CETP) inhibitor, a microsomal triglyceride transfer protein (MTTP) inhibitor, a cholesterol modulator, a bile acid modulator, a peroxisome proliferation activated receptor (PPAR) agonist, a gene-based therapy, a composite vascular protectant, a glycoprotein IIb/IIIa inhibitor, aspirin or an aspirin-like compound, an IBAT inhibitor, a squalene synthase inhibitor, a monocyte chemoattractant protein (MCP)-I inhibitor, and a combination thereof.

[1658] Embodiment 43: The pharmaceutical composition of Embodiment 42, wherein the additional therapeutic agent comprises the PCSK9 inhibitor.

[1659] Embodiment 44: The pharmaceutical composition of Embodiment 43, wherein the PCSK9 inhibitor is a second dsRNAi agent.

[1660] Embodiment 45: The pharmaceutical composition of Embodiment 44, wherein the second dsRNAi agent comprises inclisiran.

[1661] Embodiment 46: A combination of the dsRNAi agent of any one of Embodiments 1 through 39 and a second agent selected from a proprotein convertase subtilisin kexin 9 (PCSK9) inhibitor, a lysophosphatidic acid (LPA) receptor inhibitor, an angiotensinogen (AGT) inhibitor, a fibrate, a bile acid sequestrant, niacin, an antiplatelet agent, an angiotensin converting enzyme inhibitor, an angiotensin II receptor antagonist, an acylCoA cholesterol acetyltransferase (ACAT) inhibitor, a cholesterol absorption inhibitor, a cholesterol ester transfer protein (CETP) inhibitor, a microsomal triglyceride transfer protein (MTTP) inhibitor, a cholesterol modulator, a bile acid modulator, a peroxisome proliferation activated receptor (PPAR) agonist, a gene-based therapy, a composite vascular protectant, a glycoprotein IIb/IIIa inhibitor, aspirin or an aspirin-like compound, an IBAT inhibitor, a squalene synthase inhibitor, a monocyte chemoattractant protein (MCP)-I inhibitor, and a combination thereof.

[1662] Embodiment 47: The combination of Embodiment 46, wherein the second agent is a second dsRNAi agent.

[1663] Embodiment 48: The combination of Embodiment 47, wherein the second dsRNAi agent is a dsRNAi agent that targets one or more of the genes selected from the group consisting of PCSK9, LPA, AGT, ACE, ACE2, AGTR1, AGTR2, ACAT, CETP, MTTP, PPAR, IBAT, FDFT1, ERG9, SQS1, Ccl2, CCR2, CCL7, CCL8, CCL13, and CCL16.

[1664] Embodiment 49: The combination of Embodiment 47 or 48, wherein the second dsRNAi agent comprises inclisiran.

[1665] Embodiment 50: A pharmaceutical composition comprising the combination of any one of Embodiments 46 through 49.

[1666] Embodiment 51: The pharmaceutical composition of Embodiment 50, wherein the second dsRNAi agent is in a pharmaceutically acceptable salt form.

[1667] Embodiment 52: The pharmaceutical composition of Embodiment 51, wherein the pharmaceutically acceptable salt of the second dsRNAi agent is a sodium salt.

[1668] Embodiment 53: The pharmaceutical composition of any one of Embodiments 50 to 52, wherein the dsRNAi agent and the second agent are formulated in the same composition.

[1669] Embodiment 54: The pharmaceutical composition of any one of Embodiments 50 to 52, wherein the dsRNAi agent and the second agent are formulated in the separate compositions.

[1670] Embodiment 55: A method of inhibiting expression of 3-hydroxy-3-methylglutaryl-CoA reductase (HMGCR) in a subject comprising:
[1671] administering to the subject the dsRNAi agent of any one of Embodiments 1 through 39 or a pharmaceutically acceptable salt thereof, or the pharmaceutical composition of any one of Embodiments 40 through 45.

[1672] Embodiment 56: A method of lowering a level of low-density lipoprotein cholesterol (LDL-C) in a subject, comprising:
[1673] administering to the subject the dsRNAi agent of any one of Embodiments 1 through 39 or a pharmaceutically acceptable salt thereof, or the pharmaceutical composition of any one of Embodiments 40 through 45.

[1674] Embodiment 57: A method of treating or preventing an HMGCR-associated disorder or disease in a subject, comprising:
[1675] administering to the subject the dsRNAi agent of any one of Embodiments 1 through 39 or a pharmaceutically acceptable salt thereof, or the pharmaceutical composition of any one of Embodiments 40 through 45.

[1676] Embodiment 58: The method of Embodiment 57, wherein the HMGCR-associated disorder or disease is hyperlipidemia, hypercholesterolemia, hypertriglyceridemia, mixed hyperlipidemia, congestive heart disease (CHD) or atherosclerosis.

[1677] Embodiment 59: A method of treating or preventing hyperlipidemia in a subject, comprising:
[1678] administering to the subject the dsRNAi agent of any one of Embodiments 1 through 39 or a pharmaceutically acceptable salt thereof, or the pharmaceutical composition of any one of Embodiments 40 through 45.

[1679] Embodiment 60: The method of Embodiment 59, wherein the hyperlipidemia is hypercholesterolemia, or hypertriglyceridemia.

[1680] Embodiment 61: A method of treating or preventing atherosclerotic cardiovascular disease (ASCVD) in a subject, comprising:
[1681] administering to the subject the dsRNAi agent of any one of Embodiments 1 through 39 or a pharmaceutically acceptable salt thereof, or the pharmaceutical composition of any one of Embodiments 40 through 45.

[1682] Embodiment 62: The method of any one of Embodiments 55 through 61, wherein the dsRNAi agent or the pharmaceutical composition is administered subcutaneously or intravenously.

[1683] Embodiment 63: The method of any one of Embodiments 55 through 62, further comprising administering to the subject an additional therapeutic agent selected from a proprotein convertase subtilisin kexin 9 (PCSK9) inhibitor, a lysophosphatidic acid (LPA) receptor inhibitor, an angiotensinogen (AGT) inhibitor, a fibrate, a bile acid sequestrant, niacin, an antiplatelet agent, an angiotensin converting enzyme inhibitor, an angiotensin II receptor antagonist, an acylCoA cholesterol acetyltransferase (ACAT) inhibitor, a cholesterol absorption inhibitor, a cholesterol ester transfer protein (CETP) inhibitor, a microsomal triglyceride transfer protein (MTTP) inhibitor, a cholesterol modulator, a bile acid modulator, a peroxisome proliferation activated receptor (PPAR) agonist, a gene-based therapy, a composite vascular protectant, a glycoprotein IIb/IIIa inhibitor, aspirin or an aspirin-like compound, an IBAT inhibitor, a squalene synthase inhibitor, a monocyte chemoattractant protein (MCP)-I inhibitor, and a combination thereof.

[1684] Embodiment 64: The method of Embodiment 63, wherein the additional therapeutic agent is a second dsRNAi agent.

[1685] Embodiment 65: The method of Embodiment 64, wherein the second dsRNAi agent comprises a PCSK9 inhibitor.

[1686] Embodiment 66: The method of Embodiment 65, wherein the second dsRNAi agent comprises inclisiran.

[1687] Embodiment 67: The method of any one of Embodiments 63 through 66, wherein the dsRNAi agent or the pharmaceutical composition and the additional therapeutic agent are administered simultaneously.

[1688] Embodiment 68: The method of any one of Embodiments 55 through 67, wherein the dsRNAi agent or the pharmaceutical composition and the additional therapeutic agent are administered subsequently.

[1689] Embodiment 69: The method of Embodiment 68, wherein the dsRNAi agent is administered before administering the additional therapeutic agent.

[1690] Embodiment 70: The method of Embodiment 68, wherein the additional therapeutic agent is administered before administering the dsRNAi agent.

[1691] Embodiment 71: The method of any one of Embodiments 63 through 70, wherein the additional therapeutic agent is administered subcutaneously or intravenously.

[1692] Embodiment 72: The method of any one of Embodiments 55 through 71, wherein the subject is a human.

[1693] Embodiment 73: The method of any one of Embodiments 55 through 72, wherein the subject has or is diagnosed with hyperlipidemia, hypercholesterolemia, hypertriglyceridemia, mixed hyperlipidemia, congestive heart disease (CHD) or atherosclerosis.

[1694] Embodiment 74: A method of lowering a level of low-density lipoprotein cholesterol (LDL-C) in a subject, comprising:
[1695] administering to the subject the pharmaceutical composition of any one of Embodiments 50 through 54.

[1696] Embodiment 75: A method of treating or preventing an HMGCR-associated disorder or disease in a subject, comprising:
[1697] administering to the subject the pharmaceutical composition of any one of Embodiments 50 through 54.

[1698] Embodiment 76: The method of Embodiment 74, wherein the HMGCR-associated disorder or disease is hyperlipidemia, hypercholesterolemia, hypertriglyceridemia, mixed hyperlipidemia, congestive heart disease (CHD) or atherosclerosis.

[1699] Embodiment 77: A method of treating or preventing hyperlipidemia in a subject, comprising:
[1700] administering to the subject the pharmaceutical composition of any one of Embodiments 50 through 54.

[1701] Embodiment 78: A method of treating or preventing atherosclerotic cardiovascular disease (ASCVD) in a subject, comprising:
[1702] administering to the subject the pharmaceutical composition of any one of Embodiments 50 through 54.

[1703] Embodiment 79: The method of any one of Embodiments 74 through 78, wherein the dsRNAi agent and the second agent is administered subcutaneously or intravenously.

[1704] Embodiment 80: The method of any one of Embodiments 74 through 79, wherein the dsRNAi agent and the second agent are administered simultaneously.

[1705] Embodiment 81: The method of any one of Embodiments 74 through 79, wherein the dsRNAi agent and the second agent are administered subsequently.

[1706] Embodiment 82: The method of Embodiment 81, wherein the dsRNAi agent is administered before administering the second agent.

[1707] Embodiment 83: The method of Embodiment 81, wherein the second agent is administered before administering the dsRNAi agent.

[1708] Embodiment 84: The method of any one of Embodiments 74 through 83, wherein the subject is a human.

[1709] Embodiment 85: The method of any one of Embodiments 74 through 84, wherein the subject has or is diagnosed with hyperlipidemia, hypercholesterolemia, hypertriglyceridemia, mixed hyperlipidemia, congestive heart disease (CHD) or atherosclerosis.

[1710] Embodiment 86: A kit comprising the dsRNAi agent of any one of Embodiments 1 through 39 or a pharmaceutically acceptable salt thereof, or the pharmaceutical composition of any one of Embodiments 40 through 45.

[1711] Embodiment 87: The kit of Embodiment 86, further comprising an additional therapeutic agent selected from a proprotein convertase subtilisin kexin 9 (PCSK9) inhibitor, a fibrate, a bile acid sequestrant, niacin, an antiplatelet agent, an angiotensin converting enzyme inhibitor, an angiotensin II receptor antagonist, an acylCoA cholesterol acetyltransferase (ACAT) inhibitor, a cholesterol absorption inhibitor, a cholesterol ester transfer protein (CETP) inhibitor, a microsomal triglyceride transfer protein (MTTP) inhibitor, a cholesterol modulator, a bile acid modulator, a peroxisome proliferation activated receptor (PPAR) agonist, a gene-based therapy, a composite vascular protectant, a glycoprotein IIb/IIIa inhibitor, aspirin or an aspirin-like compound, an IBAT inhibitor, a squalene synthase inhibitor, a monocyte chemoattractant protein (MCP)-I inhibitor, and a combination thereof.

[1712] Embodiment 88: The kit of Embodiment 87, wherein the additional therapeutic agent is a second dsRNAi agent.

[1713] Embodiment 89: The kit of Embodiment 88, wherein the second dsRNAi agent is a dsRNAi agent that targets one or more of the genes selected from the group consisting of PCSK9, LPA, AGT, ACE, ACE2, AGTR1, AGTR2, ACAT, CETP, MTTP, PPAR, IBAT, FDFT1, ERG9, SQS1, Ccl2, CCR2, CCL7, CCL8, CCL13, and CCL16.

[1714] Embodiment 90: The kit of Embodiment 89, wherein the second dsRNAi agent comprises a PCSK9 inhibitor.

[1715] Embodiment 91: The kit of Embodiment 90, wherein the second dsRNAi agent comprises inclisiran.

[1716] Embodiment 92: The kit of any one of Embodiments 87 through 91, wherein the dsRNAi agent and the additional therapeutic agent are contained in a single vial.

[1717] Embodiment 93: The kit of any one of Embodiments 87 through 91, wherein the dsRNAi agent and the additional therapeutic agent are contained in separate vials.

[1718] Embodiment 94: The kit of any one of Embodiments 86 through 93, further comprising one or more applicators.

[1719] Embodiment 95: The kit of Embodiment 94, wherein the one or more applicators includes a syringe.

[1720] Embodiment 96: A kit comprising the pharmaceutical composition of any one of Embodiments 50 through 54.

[1721] Embodiment 97: The kit of Embodiment 96, wherein the dsRNAi agent and the second agent are contained in a single vial.

[1722] Embodiment 98: The kit of Embodiment 96, wherein the dsRNAi agent and the second agent are contained in separate vials.

[1723] Embodiment 99: The kit of any one of Embodiments 96 through 98, further comprising one or more applicators.

[1724] Embodiment 100: The kit of Embodiment 99, wherein the one or more applicators are syringes.

### Embodiments (II)

[1725] Embodiment P1: A double stranded RNAi (dsRNAi) agent comprising:
[1726] a sense strand comprising a nucleotide sequence selected from (i) SEQ ID NOs: 1 to 405 in Table 1, or (ii) SEQ ID NOs: 1 to 405 and 1434 to 1440 in Table 1; and
[1727] an antisense strand forming a duplex with the sense strand and comprising a nucleotide sequence selected from (i) SEQ ID NOs: 406 to 810 in Table 1, or (ii) SEQ ID NOs: 406 to 810 and 1441 to 1447 in Table 1.

[1728] Embodiment P2: The dsRNAi agent of Embodiment P1, wherein the sense strand is 21 to 23 nucleotides in length and the antisense strand is 23 to 25 nucleotides in length.

[1729] Embodiment P3: The dsRNAi agent of Embodiment P1 or P2, wherein all the nucleotides in the sense strand and the antisense strand are modified nucleotides.

[1730] Embodiment P4: The dsRNAi agent of Embodiments P1 through P3, wherein each of the modified nucleotides independently comprises one or more modifications selected from a 2′-deoxy modification, a 2′-O-alkyl modification, a 2′-halo modification, a 2′-5′-linkage modification, a conformationally restricting modification, an abasic modification, a 2′-amino-modification, a 2′-O-allyl modification, 2′-C-alkyl modification, a 2′-O-alkoxyalkyl modification, a morpholino modification, a modification containing a phosphoramidate group, a modification containing a non-natural nucleobase, a modification in a tetrahydropyran, a modification containing a threose nucleic acid (TNA), a modification containing a 1,5-anhydrohexitol, a modification containing a cyclohexyl, a modification containing a cyclohexenyl, a modification containing a phosphorothioate group, a modification containing a methylphosphonate group, a modification containing an alkylphosphate, a modification containing a phosphonate, a modification containing an alkylphosphonate, a modification to form a thermally destabilizing nucleotide, a modification containing a glycol nucleic acid (GNA), and a 2-O-(N-methylacetamide) modification.

[1731] Embodiment P5: The dsRNAi agent of Embodiment P4, wherein each of the modified nucleotides is independently selected from GNA, 2′O-alkoxyalkyl modified nucleotide, 2′-O-alkyl modified nucleotide, 2′-O-allyl modified nucleotide, 2′-C-alkyl modified nucleotide, and 2′-halo modified nucleotide, and optionally comprises one or more modifications selected from a modification containing a phosphorothioate group, a modification containing a methylphosphonate group, a modification containing an alkylphosphate, a modification containing a phosphonate, a modification containing an alkylphosphonate, and an abasic modification.

[1732] Embodiment P6: The dsRNAi agent of any one of Embodiments P3 through P5, wherein all the modified nucleotides comprise a modification on a 2′ sugar ring.

[1733] Embodiment P7: The dsRNAi agent of Embodiment P6, wherein the modified nucleotides are selected from a 2′-O-alkyl modified nucleotide, a 2′-halo modified nucleotide, a 2′-deoxy modified nucleotide, and a 2′-O-alkoxyalkyl modified nucleotide.

[1734] Embodiment P8: The dsRNAi agent of Embodiment P6 or P7, wherein one or more of the modified nucleotides further comprises a 3′-phosphorothioate (PS) modification.

[1735] Embodiment P9: The dsRNAi agent of any one of Embodiments P4 through P8, wherein each of the modified nucleotides comprises one or more modifications selected from 2′-O-methyl (2′-OMe) modification, 2′-fluoro (2′-F) modification, 2′-O-methoxyethyl (2′-MOE) modification, 3′-phosphorothioate (PS) modification, and 5′-vinyl-phosphonate (5′-VP) modification.

[1736] Embodiment P10: The dsRNAi agent of any one of Embodiments P1 through P9, wherein the sense strand comprises one or two 2′-MOE modified nucleotides positioned at the 1^{st} and/or 2^{nd} nucleotides from the 5′-end of the sense strand.

[1737] Embodiment P11: The dsRNAi agent of any one of Embodiments P1 to P10, wherein the sense strand comprises one or two 2′-MOE modified nucleotides positioned at the 1^{st} and/or 2^{nd} nucleotides from the 3′-end of the sense strand.

[1738] Embodiment P12: The dsRNAi agent of any one of Embodiments P1 through P11, wherein the antisense strand comprises a 5′-VP group at the 1^{st} nucleotide from 5′ end of the antisense strand.

[1739] Embodiment P13: The dsRNAi agent of any one of Embodiments P1 through P11, wherein the antisense strand comprises a 5′-(E)-VP group at the 1^{st} nucleotide from 5′ end of the antisense strand.

[1740] Embodiment P14: The dsRNAi agent of any one of Embodiments P1 through P11, wherein the antisense strand comprises a 5′-(E)-VP-2′-OMe nucleotide at the 1^{st} position from 5′ end of the antisense strand.

[1741] Embodiment P15: The dsRNAi agent of any one of Embodiments P1 and P14, wherein each of the sense strand and the antisense strand independently comprises two, three, four, five or six 2′-F modified nucleotides.

[1742] Embodiment P16: The dsRNAi agent of any one of Embodiments P1 through P15, wherein the sense strand comprises one or two 3′-PS group at the 1^{st} and/or 2^{nd} nucleotides from 5′-end of the sense strand.

[1743] Embodiment P17: The dsRNAi agent of any one of Embodiments P1 through P16, wherein the antisense strand comprises one or two 3′-PS group at the 1^{st} and/or 2^{nd} nucleotides from 5′-end of the antisense strand, and/or one or two 3′-PS group at the 1^{st} and/or 2^{nd} nucleotides from 3′-end of the antisense strand.

[1744] Embodiment P18: The dsRNAi agent of any one of Embodiments P1 to P17, wherein the sense strand is 21 nucleotides in length and the antisense strand is 23 nucleotides in length.

[1745] Embodiment P19: The dsRNAi agent of Embodiment P18, wherein the sense strand comprises one to four 2′-MOE modified nucleotides positioned at the 1^{st}, 2^{nd}, 20^{th}, and/or 21^{st} nucleotides from the 5′-end of the sense strand.

[1746] Embodiment P20: The dsRNAi agent of Embodiment P19, wherein the sense strand comprises only four 2′-MOE modified nucleotides.

[1747] Embodiment P21: The dsRNAi agent of any one of Embodiments P18 through P20, wherein the sense strand does not comprise a 2′-MOE modified nucleotide at the 3^{rd} to 19^{th} positions from 5′-end of the sense strand.

[1748] Embodiment P22: The dsRNAi agent of Embodiment P21, wherein the sense strand comprises two, three, or four 2′-F modified nucleotides positioned at the 7^{th}, 9^{th}, 10^{th}, and/or 11^{th} nucleotide from 5′-end of the sense strand.

[1749] Embodiment P23: The dsRNAi agent of Embodiment P21, wherein the sense strand comprises 2′-F modified nucleotides positioned at the 7^{th}, 9^{th}, 10^{th}, and 11^{th} nucleotides from 5′-end of the sense strand.

[1750] Embodiment P24: The dsRNAi agent of Embodiment P22 or P23, wherein the remaining nucleotides in the sense strand comprise 2′-OMe modified modification.

[1751] Embodiment P25: The dsRNAi agent of any one of Embodiments P18 through P24, wherein the antisense strand comprises a 5′-(E)-VP group at the 1^{st} nucleotide from 5′ end of the antisense strand.

[1752] Embodiment P26: The dsRNAi agent of any one of Embodiments P18 through P25, wherein the antisense strand comprises two, three, or four 2′-F modified nucleotides positioned at the 2^{nd}, 6^{th}, 14^{th}, and/or 16^{th} nucleotides from 5′-end of the antisense strand.

[1753] Embodiment P27: The dsRNAi agent of Embodiment P26, wherein the antisense strand comprises 2′-F modified nucleotides positioned at the 2^{nd}, 6^{th}, 14^{th}, and 16^{th} nucleotides from 5′-end of the antisense strand.

[1754] Embodiment P28: The dsRNAi agent of any one of Embodiments P18 through P27, wherein the antisense strand comprises a GNA at the 5^{th} nucleotide from 5′-end of the antisense strand.

[1755] Embodiment P29: The dsRNAi agent of any one of Embodiments P25 through P28, wherein the remaining nucleotides in antisense strand comprise 2′-OMe modified modifications.

[1756] Embodiment P30: The dsRNAi agent of any one of Embodiments P18 through P29, wherein the sense strand comprises one to eight 3′-PS group at the 1^{st}, 2^{nd}, 3^{rd} 4^{th}, 17^{th}, 18^{th}, 19^{th} and/or 20^{th} nucleotides from 5′-end of the sense strand.

[1757] Embodiment P31: The dsRNAi agent of any one of Embodiments P18 through P30, wherein the antisense strand comprises one to eight 3′-PS group at the 1^{st}, 2^{nd}, 3^{rd}, 4^{th}, 19^{th}, 20^{th}, 21^{st} and/or 22^{nd} nucleotides from 5′-end of the antisense strand.

[1758] Embodiment P32: The dsRNAi agent of any one of Embodiments P16, P17, P30 and P31, wherein at least one of the 3′-PS groups in each sense strand and antisense strand has a stereopure Rp configuration.

[1759] Embodiment P33: The dsRNAi agent of any one of Embodiments P16, P17, P30 and P31, wherein at least one of the 3′-PS groups in each sense strand and antisense strand has a stereopure Sp configuration.

[1760] Embodiment P34: A double stranded RNAi (dsRNAi) agent comprising:
[1761] a sense strand having a nucleotide sequence selected from (i)SEQ ID NOs: 812 to 1052 in Table 2, or (ii) SEQ ID NOs: 812 to 1052 in Table 2 and SEQ ID NOs: 1294 to 1297 and 1448 to 1462 in Table 3;
[1762] an antisense strand forming a duplex with the sense strand and having a nucleotide sequence selected from (i) SEQ ID NOs: 1053 to 1293 in Table 2, or (ii) SEQ ID NOs: 1053 to 1293 in Table 2.

[1763] Embodiment P35: The dsRNAi agent of any one of Embodiments P1 through P34, further comprising a ligand.

[1764] Embodiment P36: The dsRNAi agent of Embodiment P35, wherein the ligand comprises a N-acetylgalactosamine (GalNAc) moiety.

[1765] Embodiment P37: The dsRNAi agent of Embodiment P35 or P36, wherein the ligand has a structure of:

[chemical structure]

[1766] wherein:
[1767] each L¹ is independently a linker which may be same or different in each occurrence;
[1768] L² is a linker;
[1769] n is an integer from 1 to 3; and
[1770] [symbol] is an attachment point to the sense strand or an antisense strand.

[1771] Embodiment P38: The dsRNAi agent of Embodiment P37, wherein the ligand comprises the following structure of

[chemical structure]

[1772] wherein:
[1773] each p1, p2, p3, q1, q2, r1, r2 and r3 is independently an integer from 0 to 12;
[1774] each n1, n2, and n3 is independently an integer from 1 to 3; and
[1775] “*” is an attachment point to L².

[1776] Embodiment P39: The dsRNAi agent of Embodiment P35 or P36, wherein the ligand has a structure of:

[chemical structure]

[1777] wherein:
[1778] each L¹¹, L¹², L¹³, L¹⁴, and L¹⁵ is an independently a linker;
[1779] L² is a linker;
[1780] [symbol] is an attachment point to the sense strand or the antisense strand.

[1781] Embodiment P40: The dsRNAi agent of Embodiment P39, wherein the ligand has a structure of:

[chemical structure]

[1782] wherein:
[1783] each p11 and q11 is independently an integer from 0 to 12;
[1784] each z1, z2, and z3 is independently an integer of 0 to 12; and
[1785] [symbol] is an attachment point to the sense strand or the antisense strand.

[1786] Embodiment P41: The dsRNAi agent of any one of Embodiments P35 through P40, wherein the ligand comprises the following structure:

[chemical structure]

[1787] where
   [1788] [symbol] is an attachment point to the sense strand or the antisense strand.

[1789] Embodiment P42: The dsRNAi agent of Embodiment P41, wherein the ligand is conjugated to 3′ end of the sense strand to form the following structure:

[chemical structure]

[1790] or a pharmaceutically acceptable salt,
   [1791] wherein W is —OH or —SH.

[1792] Embodiment P43: The dsRNAi agent of Embodiment P41, wherein the ligand is conjugated to 5′ end of the sense strand to form the following structure:

[chemical structure]

[1793] or a pharmaceutically acceptable salt,
   [1794] wherein W is —OH or —SH.

[1795] Embodiment P44: The dsRNAi agent of Embodiment P42 or P43, wherein W is —OH.

[1796] Embodiment P45: The dsRNAi agent of any one of Embodiments P1 through P44, wherein the dsRNAi agent is in a pharmaceutically acceptable salt form.

[1797] Embodiment P46: The dsRNAi agent of Embodiment P45, wherein the pharmaceutically acceptable salt is a sodium salt.

[1798] Embodiment P47: A pharmaceutical composition comprising the dsRNAi agent of any one of Embodiments P1 through P46, and a pharmaceutically acceptable carrier.

[1799] Embodiment P48: The pharmaceutical composition of Embodiment P47, wherein the composition is in an aqueous solution form.

[1800] Embodiment P49: The pharmaceutical composition of Embodiment P47 or P48, further comprising an additional therapeutic agent selected from a proprotein convertase subtilisin kexin 9 (PCSK9) inhibitor, a lysophosphatidic acid (LPA) receptor inhibitor, an angiotensinogen (AGT) inhibitor, a fibrate, a bile acid sequestrant, niacin, an antiplatelet agent, an angiotensin converting enzyme inhibitor, an angiotensin II receptor antagonist, an acylCoA cholesterol acetyltransferase (ACAT) inhibitor, a cholesterol absorption inhibitor, a cholesterol ester transfer protein (CETP) inhibitor, a microsomal triglyceride transfer protein (MTTP) inhibitor, a cholesterol modulator, a bile acid modulator, a peroxisome proliferation activated receptor (PPAR) agonist, a gene-based therapy, a composite vascular protectant, a glycoprotein IIb/IIIa inhibitor, aspirin or an aspirin-like compound, an IBAT inhibitor, a squalene synthase inhibitor, a monocyte chemoattractant protein (MCP)-I inhibitor, and a combination thereof.

[1801] Embodiment P50: The pharmaceutical composition of Embodiment P49, wherein the additional therapeutic agent comprises the PCSK9 inhibitor.

[1802] Embodiment P51: The pharmaceutical composition of Embodiment P50, wherein the PCSK9 inhibitor is a second dsRNAi agent.

[1803] Embodiment P52: The pharmaceutical composition of Embodiment P51, wherein the second dsRNAi agent comprises inclisiran.

[1804] Embodiment P53: A combination of the dsRNAi agent of any one of Embodiments P1 through P46 and a second agent selected from a proprotein convertase subtilisin kexin 9 (PCSK9) inhibitor, a lysophosphatidic acid (LPA) receptor inhibitor, an angiotensinogen (AGT) inhibitor, a fibrate, a bile acid sequestrant, niacin, an antiplatelet agent, an angiotensin converting enzyme inhibitor, an angiotensin II receptor antagonist, an acylCoA cholesterol acetyltransferase (ACAT) inhibitor, a cholesterol absorption inhibitor, a cholesterol ester transfer protein (CETP) inhibitor, a microsomal triglyceride transfer protein (MTTP) inhibitor, a cholesterol modulator, a bile acid modulator, a peroxisome proliferation activated receptor (PPAR) agonist, a gene-based therapy, a composite vascular protectant, a glycoprotein IIb/IIIa inhibitor, aspirin or an aspirin-like compound, an IBAT inhibitor, a squalene synthase inhibitor, a monocyte chemoattractant protein (MCP)-I inhibitor, and a combination thereof.

[1805] Embodiment P54: The combination of Embodiment P53, wherein the second agent is a second dsRNAi agent.

[1806] Embodiment P5: The combination of Embodiment P54, wherein the second dsRNAi agent is a dsRNA agent that targets one or more of the genes selected from the group consisting of PCSK9, LPA, AGT, ACE, ACE2, AGTR1, AGTR2, ACAT, CETP, MTTP, PPAR, IBA T, FDFT1, ERG9, SQS1, Ccl2, CCR2, CCL7, CCL8, CCL13, and CCL16.

[1807] Embodiment P56: The combination of any one of Embodiments P53 to P55, wherein the second dsRNAi agent comprises inclisiran.

[1808] Embodiment P57: A pharmaceutical composition comprising the combination of any one of Embodiments P53 through P56.

[1809] Embodiment P58: The pharmaceutical composition of Embodiment P57, wherein the second dsRNAi agent is in a pharmaceutically acceptable salt form.

[1810] Embodiment P59: The pharmaceutical composition of Embodiment P58, wherein the pharmaceutically acceptable salt of the second dsRNAi agent is a sodium salt.

[1811] Embodiment P60: The pharmaceutical composition of any one of Embodiments P57 to P59, wherein the dsRNAi agent and the second agent are formulated in the same composition.

[1812] Embodiment P61: The pharmaceutical composition of any one of Embodiments P57 to P59, wherein the dsRNAi agent and the second agent are formulated in the separate compositions.

[1813] Embodiment P62: A method of inhibiting expression of 3-hydroxy-3-methylglutaryl-CoA reductase (HMGCR) in a subject comprising:
[1814] administering to the subject the dsRNAi agent of any one of Embodiments P1 through P46 or a pharmaceutically acceptable salt thereof, or the pharmaceutical composition of any one of Embodiments P47 through P52.

[1815] Embodiment P63: A method of lowering a level of low-density lipoprotein cholesterol (LDL-C) in a subject, comprising:
[1816] administering to the subject the dsRNAi agent of any one of Embodiments P1 through P46 or a pharmaceutically acceptable salt thereof, or the pharmaceutical composition of any one of Embodiments P47 through P52.

[1817] Embodiment P64: A method of treating or preventing an HMGCR-associated disorder or disease in a subject, comprising:
[1818] administering to the subject the dsRNAi agent of any one of Embodiments P1 through P46 or a pharmaceutically acceptable salt thereof, or the pharmaceutical composition of any one of Embodiments P47 through P52.

[1819] Embodiment P65: The method of Embodiment P64, wherein the HMGCR-associated disorder or disease is hyperlipidemia, hypercholesterolemia, hypertriglyceridemia, mixed hyperlipidemia, congestive heart disease (CHD) or atherosclerosis.

[1820] Embodiment P66: A method of treating or preventing hyperlipidemia in a subject, comprising:
[1821] administering to the subject the dsRNAi agent of any one of Embodiments P1 through P46 or a pharmaceutically acceptable salt thereof, or the pharmaceutical composition of any one of Embodiments P47 through P52.

[1822] Embodiment P67: The method of Embodiment P66, wherein the hyperlipidemia is hypercholesterolemia, or hypertriglyceridemia.

[1823] Embodiment P68: A method of treating or preventing atherosclerotic cardiovascular disease (ASCVD) in a subject, comprising:
[1824] administering to the subject the dsRNAi agent of any one of Embodiments P1 through P46 or a pharmaceutically acceptable salt thereof, or the pharmaceutical composition of any one of Embodiments P47 through P52.

[1825] Embodiment P69: The method of any one of Embodiments P62 through P68, wherein the dsRNAi agent or the pharmaceutical composition is administered subcutaneously or intravenously.

[1826] Embodiment P70: The method of any one of Embodiments P62 through P69, further comprising administering to the subject an additional therapeutic agent selected from a proprotein convertase subtilisin kexin 9 (PCSK9) inhibitor, a lysophosphatidic acid (LPA) receptor inhibitor, an angiotensinogen (AGT) inhibitor, a fibrate, a bile acid sequestrant, niacin, an antiplatelet agent, an angiotensin converting enzyme inhibitor, an angiotensin II receptor antagonist, an acylCoA cholesterol acetyltransferase (ACAT) inhibitor, a cholesterol absorption inhibitor, a cholesterol ester transfer protein (CETP) inhibitor, a microsomal triglyceride transfer protein (MTTP) inhibitor, a cholesterol modulator, a bile acid modulator, a peroxisome proliferation activated receptor (PPAR) agonist, a gene-based therapy, a composite vascular protectant, a glycoprotein IIb/IIIa inhibitor, aspirin or an aspirin-like compound, an IBAT inhibitor, a squalene synthase inhibitor, a monocyte chemoattractant protein (MCP)-I inhibitor, and a combination thereof.

[1827] Embodiment P71: The method of Embodiment P70, wherein the additional therapeutic agent is a second dsRNAi agent.

[1828] Embodiment P72: The method of Embodiment P71, wherein the second dsRNAi agent comprises the PCSK9 inhibitor.

[1829] Embodiment P73: The method of Embodiment P72, wherein the second dsRNAi agent comprises inclisiran.

[1830] Embodiment P74: The method of any one of Embodiments P70 through P73, wherein the dsRNAi agent or the pharmaceutical composition and the additional therapeutic agent are administered simultaneously.

[1831] Embodiment P75: The method of any one of Embodiments P70 through P73, wherein the dsRNAi agent or the pharmaceutical composition and the additional therapeutic agent are administered subsequently.

[1832] Embodiment P76: The method of Embodiment P75, wherein the dsRNAi agent is administered before administering the additional therapeutic agent.

[1833] Embodiment P77: The method of Embodiment P75, wherein the additional therapeutic agent is administered before administering the dsRNAi agent.

[1834] Embodiment P78: The method of any one of Embodiments P70 through P77, wherein the additional therapeutic agent is administered subcutaneously or intravenously.

[1835] Embodiment P79: The method of any one of Embodiments P62 through P78, wherein the subject is a human.

[1836] Embodiment P80: The method of any one of Embodiments P62 through P79, wherein the subject has or is diagnosed with hyperlipidemia, hypercholesterolemia, hypertriglyceridemia, mixed hyperlipidemia, congestive heart disease (CHD) or atherosclerosis.

[1837] Embodiment P81: The method of any one of Embodiments P62 through P80, wherein the subject does not have a muscle side effect after the administrating the dsRNAi agent of any one of Embodiments P1 through P46 or a pharmaceutically acceptable salt thereof, or the pharmaceutical composition of any one of Embodiments P47 through P52.

[1838] Embodiment P82: A method of lowering a level of low-density lipoprotein cholesterol (LDL-C) in a subject, comprising:
[1839] administering to the subject the pharmaceutical composition of any one of Embodiments P57 through P61.

[1840] Embodiment P83: A method of treating or preventing an HMGCR-associated disorder or disease in a subject, comprising:
[1841] administering to the subject the pharmaceutical composition of any one of Embodiments P57 through P61.

[1842] Embodiment P84: The method of Embodiment P83, wherein the HMGCR-associated disorder or disease is hyperlipidemia, hypercholesterolemia, hypertriglyceridemia, mixed hyperlipidemia, congestive heart disease (CHD) or atherosclerosis.

[1843] Embodiment P85: A method of treating or preventing hyperlipidemia in a subject, comprising:
[1844] administering to the subject the pharmaceutical composition of any one of Embodiments P57 through P61.

[1845] Embodiment P86: A method of treating or preventing atherosclerotic cardiovascular disease (ASCVD) in a subject, comprising:
[1846] administering to the subject the pharmaceutical composition of any one of Embodiments P57 through P61.

[1847] Embodiment P87: The method of any one of Embodiments P82 through P86, wherein the dsRNAi agent and the second agent is administered subcutaneously or intravenously.

[1848] Embodiment P88:The method of any one of Embodiments P82 through P87, wherein the dsRNAi agent and the second agent are administered simultaneously.

[1849] Embodiment P89: The method of any one of Embodiments P82 through P88, wherein the dsRNAi agent and the second agent are administered subsequently.

[1850] Embodiment P90: The method of Embodiment P89, wherein the dsRNAi agent is administered before administering the second agent.

[1851] Embodiment P91: The method of Embodiment P89, wherein the second agent is administered before administering the dsRNAi agent.

[1852] Embodiment P92: The method of any one of Embodiments P82 through P91, wherein the subject is a human.

[1853] Embodiment P93: The method of any one of Embodiments P82 through P92, wherein the subject has or is diagnosed with hyperlipidemia, hypercholesterolemia, hypertriglyceridemia, mixed hyperlipidemia, congestive heart disease (CHD) or atherosclerosis.

[1854] Embodiment P94: The method of any one of Embodiments P82 through P93, wherein the subject does not have a muscle side effect after the administrating the pharmaceutical composition of any one of Embodiments P57 through P61.

[1855] Embodiment P95: A kit comprising the dsRNAi agent of any one of Embodiments P1 through P46 or a pharmaceutically acceptable salt thereof, or the pharmaceutical composition of any one of Embodiments P47 through P52.

[1856] Embodiment P96: The kit of Embodiment P95, further comprising an additional therapeutic agent selected from a proprotein convertase subtilisin kexin 9 (PCSK9) inhibitor, a fibrate, a bile acid sequestrant, niacin, an antiplatelet agent, an angiotensin converting enzyme inhibitor, an angiotensin II receptor antagonist, an acylCoA cholesterol acetyltransferase (ACAT) inhibitor, a cholesterol absorption inhibitor, a cholesterol ester transfer protein (CETP) inhibitor, a microsomal triglyceride transfer protein (MTTP) inhibitor, a cholesterol modulator, a bile acid modulator, a peroxisome proliferation activated receptor (PPAR) agonist, a gene-based therapy, a composite vascular protectant, a glycoprotein IIb/IIIa inhibitor, aspirin or an aspirin-like compound, an IBAT inhibitor, a squalene synthase inhibitor, a monocyte chemoattractant protein (MCP)-I inhibitor, and a combination thereof.

[1857] Embodiment P97: The kit of Embodiment P96, wherein the additional therapeutic agent is a second dsRNAi agent.

[1858] Embodiment P98: The kit of Embodiment P97, wherein the second dsRNAi agent is a dsRNA agent that targets one or more of the genes selected from the group consisting of PCSK9, LPA, AGT, ACE, ACE2, AGTR1, AGTR2, ACAT, CETP, MTTP, PPAR, IBAT, FDFT1, ERG9, SQS1, Ccl2, CCR2, CCL7, CCL8, CCL13, and CCL16.

[1859] Embodiment P99: The kit of Embodiment P98, wherein the second dsRNAi agent comprises the PCSK9 inhibitor.

[1860] Embodiment P100: The kit of Embodiment P99, wherein the second dsRNAi agent comprises inclisiran.

[1861] Embodiment P101: The kit of any one of Embodiments P96 through P100, wherein the dsRNAi agent and the additional therapeutic agent are contained in a single vial.

[1862] Embodiment P102: The kit of any one of Embodiments P96 through P100, wherein the dsRNAi agent and the additional therapeutic agent are contained in separate vials.

[1863] Embodiment P103: The kit of any one of Embodiments P95 through P101, further comprising one or more applicators.

[1864] Embodiment P104: The kit of Embodiment P103, wherein the one or more applicators comprises a syringe.

[1865] Embodiment P105: A kit comprising the pharmaceutical composition of any one of Embodiments P57 through P61.

[1866] Embodiment P106: The kit of Embodiment P105, wherein the dsRNAi agent and the second agent are contained in a single vial.

[1867] Embodiment P107: The kit of Embodiment P105, wherein the dsRNAi agent and the second agent are contained in separate vials.

[1868] Embodiment P108: The kit of any one of Embodiments P105 through P107, further comprising one or more applicators.

[1869] Embodiment P109: The kit of Embodiment P108, wherein the one or more applicators are syringes.

### EXAMPLES

### Example 1: Bioinformatics Off-Targeting/RNA-Seq

[1870] siRNA sequences were designed to be complementary to human HMGCR isoform, transcript variant 1, mRNA (GenBank: NM_000859.3) and about four hundreds of RNAi agents (siRNAs) to HMGCR were screened and tested for off-target hybridization (e.g., less off-target hybridization) and knock-down of HMGCR mRNA in a cell. Three lead sequences, siRNA286, siRNA3, and siRNA6, were evaluated with off-target profiling.

### Material and Methods

### Cell Culture and Transfection:

[1871] Hep3B cells (ATCC HB-8064) were cultured in EMEM with L-Glut (ATCC 30-2003)+10% FBS medium (heat inactivated). Hep3B cells were plated at density of 250,000 cells/well (media volume: 1000 μL) in a 12-well plate. Cells were treated with siRNA at 20 nM using RNAiMax (Thermofisher Cat: 13778150 Lipofectamine™ RNAiMAX Transfection Reagent) in quadruplicates. As negative control, cells were seeded at same density as described above and treated with PBS with same amount of RNAiMax.

### RNA Isolation and QC:

[1872] Cells were harvested, lysed and total RNA was extracted using RNeasy 96 kit from Qiagen (Cat #74181) 24 hrs post transfection. RNA quality (RIN score >7-10) and yield (>25ng/μL) was assessed using RNA tapes (Cat #5067-5576) on Agilent 4200 TapeStation (#G2991BA). RNA was stored at −80° C. until submitted for library preparation.

### TruSeq (Illumina) Library Preparation and Sequencing:

[1873] Sequencing libraires were prepared from 150 ng-500 ng of total RNA using one of the following kits: Illumina 20020594 (mRNA TruSeq); Illumina 20040534 (mRNA Ligation); NEB E7760L (polyA mRNA workflow), following manufacturers' protocols. Library size, quality, and concentration (>2 nM) are assessed using D1000 tapes (Cat #5067-5582) on 4200 TapeStation (Agilent, Catalog No. G2991AA). Libraries were pooled equimolarly. Libraries and pools were stored at −20° C. until they were used for sequencing. Sequencing was done on the NovaSeq 6000 instrument (Illumina, Catalog No. 20012850) with dedicated reagent kits from the same manufacturer, generating paired end reads, which were trimmed to 50 bp. Our target coverage was >25 million reads per sample (library).

### Differential Gene Expression:

[1874] For alignment and gene expression quantification the Exon Quantification Pipeline (EQP) (Schuierer and Roma, 2016; version 2.5, August 2023) with STAR (Dobin et al., 2013; version 2.7.3a, August 2023) as the alignment tool to align the reads against the human genome reference files from Ensembl version 98 (Cunningham et al., 2015) was used. Differential gene expression was performed using DESeq2 (version 1.38.3) (Love et al., 2014) by comparing gene expression level of group of samples treated with siRNA against negative control (i.e. PBS with RNAiMax).

### Seed-Mediated in Silico Prediction

[1875] As most siRNA-seed binding sites are inherent to 3′UTR (Lin et al., 2005), each siRNA sense and antisense strand from position 2-7 and 2-8 were searched with brute-force against the 3′UTRome (NCBI Reference Seq Release 218, Homo sapiens). A gene was considered to be putative off-targeting if the 3′UTR of any isoform of the gene can be hit by the siRNA. The seed prediction was then matched to RNA-Seq results based on Gene Symbol. As most siRNA-seed binding sites were inherent to 3′UTR (Lin et al., 2005), each siRNA sense and antisense strand from position 2-7 and 2-8 were searched with brute-force against the 3′UTRome (NCBI RefSeq Release 218, Homo sapiens). A gene was considered to be putative off-targeting if the 3′UTR of any isoform of the gene could be hit by the siRNA. The seed prediction was then matched to RNA-Seq results based on Gene Symbol.

[1876] For each oligonucleotides (e.g., 19 mer, 20 mer, 21 mer, etc) along a target mRNA of interest, i) potency prediction score, ii) species cross reactivity and iii) specificity parameters are getting analyzed. For all three categories, an algorithm applied with specific thresholds (e.g., 0.7) for multiple parameters is used to identify functional and specific siRNAs. As a result of this every single nucleotide shift can change potency prediction score, species cross-reactivity and specificity.

[1877] For example, all siRNAs are fully complementary from position 2-23 to human reference transcript (GRCh38.p7). Internal design algorithm for specificity takes into account i) cross reactive to cyno, antisense position 2-18 is a full match to cyno gene of interest, ii) no predicted human off-targets protein coding and non-coding genes for the antisense strand position 2-18 with zero mismatches or one mismatch outside of the seed sequence (2-8), iii) no predicted human off-targets for the sense strand position 2-18 with zero mismatches, iv) no predicted cyno off-targets for the antisense strand position 2-18 with zero mismatches or one mismatch outside of the seed 2-8 no predicted cyno off-targets for the sense strand position 2-18 with zero mismatches. Furthermore, the seed region 2-8 of antisense strand does not match any known human miRNAs. Finally, siRNA does not hit any SNPs that have a MAF>0.01 in dbSNP.

[1878] In vitro transfection of an siRNA followed by transcriptome-wide studies using RNA-Seq can be combined with in silico prediction for off-targets and thereby identify seed mediated off-target effects. These off-target effects mediated by antisense strand seed (position 2-8) are found to be the main mechanism of toxicity observed in vitro and in vivo.

[1879] The workhorse cell line Hep3B that for all the initial off-target characterization, irrespective of whether on-target is expressed or not, may be used. If on-target is not expressed, then the project team needs to establish a new cell line where on-target is present. The on-target expression is important because the concentration of siRNA for running such an experiment is selected where maximum on-target knockdown is achieved with the minimal siRNA concentration. Furthermore, for interpretation the distance form on-target to nearest potential, off-target is important. Identified potential off-targets must be reproducible across multiple independent experiments and they must be regulated on a dose-dependent manner. If off-targets remain on a final selection process, additional assessment may be performed to de-risk identified off-targets by either checking whether the off-target(s) are expressed in respective target tissue, whether they are predicted by in silico, and whether they are also down regulated in tox studies. When shifting from a certain target mRNA position, e.g., sequence 126−/+5 nt (121 to 131) and thereby applying our standard filters with the in-house design algorithm, only sequences having threshold above 0.7 would be preferably selected.

### Example 2: Preparation of siRNAs

[1880] Small scale synthesis was used to prepare HMGCR siRNAs; medium and large scale syntheses can also be used to prepare these siRNAs in larger quantities.

### 2.1 Small Scale Synthesis and Purification Methods for the Initial Screens (1 Mole Scale)

[1881] Small scale synthesis was used to generate siRNAs. HMGCR sequences were synthesized on MerMade 192 synthesizer (BioAutomation, Plano, Tex.) at 1 μmol scale.

[1882] All oligonucleotides were prepared at 1 μmole scale using a MerMade 192 high-throughput synthesizer and commercially available phosphoramidite monomers, following standard protocols for solid-phase synthesis and deprotection. The GalNAc ligand was introduced at the 3′ end of the sense strand of the siRNA using a functionalized solid support, as previously described. PS linkages were prepared by oxidation of phosphite utilizing 0.1 M 3-((N,N-dimethyl-aminomethylidene)amino)-3H-1, 2, 4-dithiazole-5-thione (DDTT) in pyridine. After cleavage, deprotection, and precipitation of the products, each crude solution was desalted via size exclusion using water to elute the final oligonucleotide products. The identities and purities of all oligonucleotides were confirmed using electrospray ionization mass spectrometry (ESI-MS) and ion exchange-high-performance liquid chromatography (IEX-HPLC), respectively, and equimolar amounts of the complementary strands were annealed to provide the desired siRNA duplex. All duplexes met a purity cutoff of at least 85%.

[1883] The sequence file was converted to a text file to make it compatible for loading in the MerMade 192 synthesis software.

### 2.1.1 Synthesis, Cleavage and Deprotection:

[1884] The synthesis of HMGCR sequences can use solid supported oligonucleotide synthesis using phosphoramidite chemistry.

[1885] The synthesis of the above sequences was performed at 1 μM scale in 96 well plates. The RNA, TNA, GNA, 2′-OMe modified nucleotide, 5′-(E)-VP-2′-OMe modified nucleotide, 2′-MOE modified nucleotide, and 2′-F modified nucleotide phosphoramidite solutions were prepared at 0.1 M concentration and 5-(ethylthio)tetrazole (0.25 M Acetonitrile) was used as activator. Deblocking solution, oxidizer solution and capping solution were prepared according to standard processes.

[1886] The synthesized sequences were cleaved and deprotected in 96 well plates, using methylamine solution (a 3:1 mixture of aqueous and ethanolic solutions) in the first step and fluoride reagent in the second step. The crude sequences were precipitated using acetone:ethanol (80:20) mix and the pellet were re-suspended in 0.02M sodium acetate buffer. Samples from each sequence were analyzed by LC-MS to confirm the identity, UV for quantification and a selected set of samples by IEX chromatography to determine purity.

### 2.1.2 Purification and Desalting

[1887] HMGCR tiled sequences were purified on AKTA explorer purification system using Source 15Q column. A column temperature of 65° C. was maintained during purification. Sample injection and collection were performed in 96 well (1.8 mL-deep well) plates. A single peak corresponding to the full length sequence was collected in the eluent. The purified sequences were desalted on a Sephadex G25 column using AKTA purifier. The concentration of desalted HMGCR sequences were calculated using absorbance at 260 nm wavelength and purity was measured by ion exchange chromatography.

### 2.1.3 Annealing

[1888] Purified desalted sense and antisense single strands were mixed in equimolar amounts and annealed to form HMGCR duplexes. The duplexes were prepared at 10 uM concentration in 1×PBS buffer and tested by capillary gel electrophoresis for purity.

### 2.2 Medium Scale Synthesis and Purification (1-50 μMol)

[1889] Medium scale synthesis can also be used to generate siRNAs. Single-stranded RNAs in scales between 1 and 50 μmol were prepared by solid phase synthesis using an MerMade 12 synthesizer (BioAutomation, Plano, Tex.). Universal Support was purchased from AM Chemicals LLC (VisTa, CA) and 3′-GalNAc controlled pore glass (CPG) support (500A, loading 50-100 μmol/g) were homemade. For larger scales, empty synthesis columns (10 μmol) from Glen Research Corp. and large amidite (250 mL) and reagent bottles (2000 mL) were used. RNA and RNA containing 2′-MOE, 2′-F or 2′-O-methyl nucleotides were generated by solid phase synthesis employing the corresponding phosphoramidites (Hongene Biotech Corporation, Union City, CA). These building blocks were incorporated at selected sites within the sequence of the oligoribonucleotide chain using standard nucleoside phosphoramidite chemistry such as described in Current Protocols in Nucleic Acid Chemistry, Beaucage, S. L. et al. (Edrs.), John Wiley & Sons, Inc., New York, NY, USA. Vinylphosphonates at the 5′ end of the antisense strand were introduced by using solid-phase synthesis of 5′(E)-vinylphosphonate-2′-OMe-U phosphoramidite monomers. Phosphorothioate linkages were introduced using a solution of the 0.1 M DDTT (AM Chemicals, Oceanside, CA) in pyridine.

[1890] The synthesized HMGCR sequences were cleaved and deprotected in AMA solution (1:1 mixture of methylamine solution and 40% NH₃ aqueous solutions) for 3.5 hours or in 40% NH₃ aqueous solutions at 55° C. overnight. To deprotect 5′-Vinylphosphonates oligonucleotide, additional 3% of diethyl amine was add to deprotection solution. Preparative ion-pair reverse phase high-performance liquid chromatography (IPRP-HPLC) and IEX-HPLC were applied to purified oligonucleotide products. Samples from each sequence were analyzed by LC-MS to confirm the identity, UV absorbance at 260 nm for quantification and a selected set of samples by IPRP-HPLC and IEX-HPLC to determine purity. The identities and purities of all oligonucleotides were confirmed using electrospray ionization mass spectrometry (ESI-MS), Double stranded RNA was generated by mixing an equimolar solution of complementary strands in water or annealing buffer (typically phosphate buffered solution, PBS, Ambion, Applied Biosystems, Austin, TX) at the desired concentration. The mixture was then heated in a water bath at 85-90° C. for 5 minutes and cooled to room temperature over a period of 1-4 hours. The RNA duplex was stored at −20° C. until use.

### Example 3: Introduction of 5′-(E)-VP-2′OMe to the Antisense Strand of Example siRNAs as Development Candidates

### 3.1 Animals and Experimental Design

### 3.1.1 Maintenance Conditions

[1891] All mice were received at 10 weeks of age and acclimated for at least 3 days prior to experimentation. Animals were maintained on a 12 hour light/dark cycle at 70° F. and 50% humidity, provided water and food ad libitum.

### 3.1.2 Statement on Animal Welfare

[1892] Studies described were performed according to an institutional Animal Care and Use Committee (ACUC) approved protocol. All mice were maintained in our pathogen-free and viral-free institutional housing facilities and were sacrificed by CO2 asphyxiation, and confirmed by thoracotomy, as approved by the panel on Euthanasia at the American Veterinary Association, and in the above referenced ACUC protocol.

### 3.1.3 Study Protocol

[1893] Male, 10-week-old C57BL/6J mice (Jackson Laboratories, Bar Harbor, ME) were fed a western diet (Research Diets, 12079Bi) for 21 days prior to initiation of the study. On day 0 of the study, body weight data was collected for all animals. Mice were mechanically restrained, and 25 μL of baseline blood was collected via tail snip into EDTA-K2 treated microvette tubes (Sarstedt AG, Sarstedt, Germany) stored on ice. Blood samples were centrifuged at 16,000 g, 4° C. for 10 minutes, with resulting plasma aliquoted and frozen at −80° C. for subsequent measurement of total cholesterol levels. Each mouse was then given a single subcutaneous (SC) dose of either sterile PBS (10 mL/kg) or siRNA (6 mg/kg; 10 mL/kg) formulated in PBS. A total of n=24 mice received PBS control, n=24 mice received Compound 7 and n=12 received siRNA Compound 6. Each week, for 6 weeks, n=4 animals from each of the PBS and Compound 7 treatment groups were euthanized, while, for the Compound 6 treatment group, n=4 animals were euthanized only at 1, 3 and 6 weeks post-dose. Each week, 25 μL of blood was collected via tail snip for all mice remaining in the study, for measuring of total cholesterol in the resulting plasma. Each week, designated mice were euthanized via CO2 asphyxiation and terminal blood samples were collected via cardiac puncture using a 1 mL syringe and 25-gauge needle. After removing the needle, blood was ejected from the syringe into an EDTA-K2 treated tube (Sarstedt AG, Sarstedt, Germany) stored on ice and processed as described above with plasma being assayed for total cholesterol levels. The abdomen was then opened, the left lobe of liver excised and (4) 50-75 mg pieces of liver tissue were placed into individual 2 mL Eppendorf tubes, before being frozen on dry ice and stored at −80° C. until analysis.

### 3.2 Methods

3.2.1 Determination of Liver HMGCR mRNA Abundance by RT-PCR

[1894] Liver RNA extraction was performed using RNeasy lipid mini kit protocol (Qiagen, Germany). Briefly, a 50 mg piece of frozen liver was lysed and homogenized using a Tissue Lyser II (Qiagen, Germany) with one stainless steel bead and Qiazol lysis reagent (Qiagen, Germany). Next, chloroform was added, and phases were separated. RNA was bound, washed, and eluted from RNEasy mini spin columns. The optional on column DNase digestion was performed using the RNase free DNase set (Qiagen, Germany). A total of 40 μL of RNA was eluted from each sample. RNA samples were quantified using NanoDrop 2000 (ThermoFisher, Waltham MA). Quantified RNA samples were diluted and then reverse transcribed using SuperScript Vilo Master mix (ThermoFisher, Waltham MA). Taqman qPCR was performed with the cDNA samples using Taqman gene expression assays Rn00565598_m1 and Rn01455646_m1 (ThermoFisher, Waltham MA).

3.2.2 Incorporation of Guide Strand into Liver RNA-Silencing Complex

### Tissue Lysis:

[1895] Each frozen tissue piece provided in screw cap cryo tube was transferred to a 2 mL round bottom microcentrifuge tube that was pre-chilled on dry ice. One dry ice pre-chilled 5 mm stainless steel bead (Qiagen, Germany) was added to the tube containing the frozen tissue. In the cold room, sample tubes were quickly removed from dry ice and added to each tube 1 mL of ice-cold Lysis buffer (50 mM Tris-HCl pH 7.5, 150 mM NaCl, 2 mM EDTA, 0.5% Triton X-100, 1 mM PMSF, 1×EDTA-free protease inhibitor cocktail). Immediately, tissue was lysed with TissueLyser LT (Qiagen, Germany) for 5 min at 50 Hz in cold room. Lysate was then cleared at 20000×g, 10 min, 4° C., and the soluble lysate supernatants were kept on ice. The protein concentration of the soluble lysate for each sample was determined using BCA assay (ThermoFisher, Waltham MA) according to manufacturer's protocol.

### Argonaute 2 Immunoprecipitation (IP):

[1896] Dynabead Protein G (ThermoFisher, Waltham MA) was washed with Wash buffer (50 mM Tris-HCl pH 7.5, 150 mM NaCl, 2 mM EDTA, 0.5% Triton X-100) prior to use for IP, and 50 μL of bead slurry was used per sample. Mouse argonaute2 (Ago2) antibody (FUJIFILM Wako Chemicals, Richmond VA) was pre-bound to beads in wash buffer at 4° C., for 2 h on rotating mixer (200 ng antibody used per 50 μL bead slurry). After incubation, the Ago2 antibody-bound beads were washed with Wash buffer, and 50 μL of the suspension was distributed to a 1.5 mL microcentrifuge tube per sample. For each sample, Ago2 antibody-bound beads were incubated with 500 μg soluble tissue lysate in lysis buffer at final volume of 250 μL per sample at 4° C., overnight on rotating mixer. After incubation, beads in each tube were washed 5 times with 1 mL ice cold Wash buffer. Final resuspension of beads was with 50 μL PBST (phosphate buffered saline pH 7.4, 0.25% Triton X-100) per sample. siRNAs were released from bead by heating at 95° C., 5 min. Ago2 IP eluate supernatants were recovered and kept on ice on the same day or stored at −80° C. until the subsequent stem loop-reverse transcription quantitative polymerase chain reaction (SL-RT-qPCR) step.

siRNA Standard Preparation:

[1897] siRNA was first diluted to a working stock of 10 ng/μL in H2O, then further diluted 100-fold to 100 ng/mL in PBST. siRNA standards were prepared by 10-fold serial dilution from 100 ng/mL to 0.00001 ng/mL in PBST.

### Stem Loop-Reverse Transcription Quantitative Polymerase Chain Reaction (SL-RT-qPCR):

[1898] For SL-RT-qPCR, Custom Small RNA Assay (4398987, ThermoFisher, Waltham MA) containing a set of SL-RT primer and Taqman qPCR primer against guide strand sequence was designed and ordered and cDNA was generated following manufacturer's protocol of the Taqman MicroRNA Reverse Transcription Kit (ThermoFisher, Waltham MA), using 5 μL of Ago2 TP eluate or 5 μL siRNA standard. The cDNA generated (15 μL reaction) were then diluted with 75 μL H2O prior to usage for qPCR step. qPCR was performed following manufacturer's protocol for TaqMan™ Fast Advanced Master Mix (ThermoFisher, Waltham MA), using 4 μL of the diluted cDNA.

### Calculations:

[1899] An siRNA standard curve was generated by plotting Ct values (Y) versus siRNA concentration (X) in log scale using GraphPad Prism (version 9.4.1), followed by semi-log line fitting to determine slope and y-intercept values. siRNA concentration for each sample was calculated using the obtained Ct value and the determined slope and y-intercept values.

$$ng siRNA = [ siRNA ] \times Ago 2 IP elution volume ( 50 μ L )$$

$$ng siRNA per g soluble lysate protein = ng siRNA per 500 μ g ( amount used in Ago 2 IP )$$

### Data Analysis:

[1900] Statistical significance was determined by ordinary one-way ANOVA and Dunnett's multiple comparisons test using GraphPad Prism software (version 9.4.1).

### Example 4: Introduction of 2′MOE Clamps on Sense Strand of siRNA

### 4.1 Animals and Experimental Design

### Maintenance Conditions:

[1901] All mice were received at 10 weeks of age and acclimated for at least 3 days prior to experimentation. Animals were maintained on a 12 hour light/dark cycle at 70° F. and 50% humidity, provided water and food ad libitum.

[1902] Statement on Animal Welfare: Studies described were performed according to an institutional Animal Care and Use Committee (ACUC) approved protocol. All mice were maintained in our approved pathogen-free and viral-free institutional housing facilities and were sacrificed by CO2 asphyxiation, and confirmed by thoracotomy, as approved by the panel on Euthanasia at the American Veterinary Association, and in the above referenced ACUC protocol.

TABLE 7
Treatment Groups

| Treatment (siRNA) | Animals (n) |
|---|---|
| Compound 5 | 4 |
| Compound 7 | 5 |
| Compound 8 | 10 |
| PBS control | 8 |

### 4.2 Study Protocol

[1903] Male C57BL/6 mice (Jackson Laboratories, Bar Harbor, ME) were fed a western diet (Research Diets, 12079Bi) for 28 days prior to initiation of the study. On day 0 of the study, body weight data was collected for all animals. Mice were mechanically restrained, and 25 μL of baseline blood was collected via tail snip into EDTA-K2 treated microvette tubes (Sarstedt AG, Sarstedt, Germany) stored on ice. Blood samples were centrifuged at 16,000 g, 4° C. for 10 minutes, with resulting plasma aliquoted and frozen at −80° C. for subsequent measurement of total cholesterol levels. Each mouse was then given a single subcutaneous (SC) dose of either sterile PBS (10 mL/kg) or siRNA (3 mg/kg; 10 mL/kg) formulated in PBS. Each week, 25 μL of blood was collected via tail snip for all mice in the study, for measuring of total cholesterol in the resulting plasma. After 5 weeks post-dose, all animals from Compound 5 and Compound 7 treated groups and half of the animals from Compound 8 and PBS treated groups were euthanized. At 8 weeks post-dose, all mice remaining in the study were euthanized. Designated mice were euthanized via CO2 asphyxiation and terminal blood samples were collected via cardiac puncture using a 1 mL syringe and 25-gauge needle. After removing the needle, blood was ejected from the syringe into an EDTA-K2 treated tube (Sarstedt AG, Sarstedt, Germany) stored on ice and processed as described above with plasma being assayed for total cholesterol levels. The abdomen was then opened, the left lobe of liver excised and (4) 50-75 mg pieces of liver tissue were placed into individual 2 mL Eppendorf tubes, before being frozen on dry ice and stored at −80° C. until analysis.

### 4.3 Methods

[1904] All methods are identical to those for the above experiment.

### Example 5: No Significant Findings with Rodent Cross-Reactive siRNA in Rat DRF Study

### 5.1 Animals and Experimental Design

[1905] On study day 1, 9- to 10-week old male Wistar Han rats received a single subcutaneous injection (dorsal mid-scapular region) of vehicle (0.9% sodium chloride for injection, USP) or HMGCR GalNAc-conjugated siRNA at a dose of 10, 30, 100 or 300 mg/kg (n=5 rats per group). At necropsy (30 days post-dose), liver and right bicep femoris skeletal muscle samples for the measurement of HMGCR mRNA abundance were collected from all animals.

### 5.2 Methods

5.2.1 Determination of Liver HMGCR mRNA Abundance

[1906] Liver RNA extraction was performed using RNeasy lipid mini kit protocol (Qiagen, Germany). Briefly, a 50 mg piece of frozen liver was lysed and homogenized using a Tissue Lyser II (Qiagen, Germany) with one stainless steel bead and Qiazol lysis reagent (Qiagen, Germany). Next, chloroform was added, and phases were separated. RNA was bound, washed, and eluted from RNEasy mini spin columns. The optional on column DNase digestion was performed using the RNase free DNase set (Qiagen, Germany). A total of 40 μL of RNA was eluted from each sample. RNA samples were quantified using NanoDrop 2000 (ThermoFisher, Waltham MA). Quantified RNA samples were diluted and then reverse transcribed using SuperScript Vilo Master mix (ThermoFisher, Waltham MA). Taqman qPCR was performed with the cDNA samples using Taqman gene expression assays Rn00565598_m1 and Rn01455646_m1 (ThermoFisher, Waltham MA).

5.2.2 Determination of Skeletal Muscle HMGCR mRNA Abundance

[1907] RNA extraction was performed using RNeasy fibrous tissue mini kit protocol (Qiagen, Germany). Briefly, a 30 mg piece of frozen skeletal muscle was lysed and homogenized using a Tissue Lyser II (Qiagen, Germany) with one stainless steel bead and lysis reagent containing P-mercaptoethanol. Next, proteinase k was added. RNA was bound, washed, and eluted from RNEasy mini spin columns. The optional on-column DNase digestion was performed using the RNase free DNase set (Qiagen, Germany). A total of 40 μL of RNA was eluted from each sample. RNA samples were quantified using NanoDrop 2000. Quantified RNA samples were diluted and then reverse transcribed using SuperScript Vilo Master mix (ThermoFisher, Waltham MA). Taqman qPCR was performed with the cDNA samples using Taqman gene expression assays Rn00565598_m1 and Rn01455646_m1 (ThermoFisher, Waltham MA).

5.2.3 Incorporation of Guide Strand into Liver or Skeletal Muscle RNA-Silencing Complex

### Tissue Lysis:

[1908] Each frozen tissue piece provided in screw cap cryo tube was transferred to a 2 mL round bottom microcentrifuge tube that was pre-chilled on dry ice. One dry ice pre-chilled 5 mm stainless steel bead (Qiagen, Germany) was added to the tube containing the frozen tissue. In the cold room, sample tubes were quickly removed from dry ice and added to each tube 1 mL of ice-cold Lysis buffer (50 mM Tris-HCl pH 7.5, 150 mM NaCl, 2 mM EDTA, 0.5% Triton X-100, 1 mM PMSF, 1×EDTA-free protease inhibitor cocktail). Immediately, tissue was lysed with TissueLyser LT (Qiagen, Germany) for 5 min at 50 Hz in cold room. Lysate was then cleared at 20000×g, 10 min, 4° C., and the soluble lysate supernatants were kept on ice. The protein concentration of the soluble lysate for each sample was determined using BCA assay (ThermoFisher, Waltham MA) according to manufacturer's protocol.

### Argonaute 2 Immunoprecipitation (IP):

[1909] Dynabead Protein G (ThermoFisher, Waltham MA) was washed with Wash buffer (50 mM Tris-HCl pH 7.5, 150 mM NaCl, 2 mM EDTA, 0.5% Triton X-100) prior to use for IP, and 50 μL of bead slurry was used per sample. Mouse argonaute2 (Ago2) antibody (FUJIFILM Wako Chemicals, Richmond VA) was pre-bound to beads in wash buffer at 4° C., for 2 h on rotating mixer (200 ng antibody used per 50 μL bead slurry). After incubation, the Ago2 antibody-bound beads were washed with Wash buffer, and 50 μL of the suspension was distributed to a 1.5 mL microcentrifuge tube per sample. For each sample, Ago2 antibody-bound beads were incubated with 500 μg soluble tissue lysate in lysis buffer at final volume of 250 μL per sample at 4° C., overnight on rotating mixer. After incubation, beads in each tube were washed 5 times with 1 mL ice cold Wash buffer. Final resuspension of beads was with 50 μL PBST (phosphate buffered saline pH 7.4, 0.25% Triton X-100) per sample. siRNAs were released from bead by heating at 95° C., 5 min. Ago2 IP eluate supernatants were recovered and kept on ice on the same day or stored at −80° C. until the subsequent stem loop-reverse transcription quantitative polymerase chain reaction (SL-RT-qPCR) step.

siRNA Standard Preparation:

[1910] siRNA was first diluted to a working stock of 10 ng/μL in H2O, then further diluted 100-fold to 100 ng/mL in PBST. siRNA standards were prepared by 10-fold serial dilution from 100 ng/mL to 0.00001 ng/mL in PBST.

### Stem Loop-Reverse Transcription Quantitative Polymerase Chain Reaction (SL-RT-qPCR):

[1911] For SL-RT-qPCR, Custom Small RNA Assay (4398987, ThermoFisher, Waltham MA) containing a set of SL-RT primer and Taqman qPCR primer against guide strand sequence of Compound 7 was designed and ordered. cDNA was generated following manufacturer's protocol of the Taqman MicroRNA Reverse Transcription Kit (ThermoFisher, Waltham MA), using 5 μL of Ago2 IP eluate or 5 μL siRNA standard. The cDNA generated (15 μL reaction) were then diluted with 75 μL H2O prior to usage for qPCR step. qPCR was performed following manufacturer's protocol for TaqMan™ Fast Advanced Master Mix (ThermoFisher, Waltham MA), using 4 μL of the diluted cDNA.

### Calculations:

[1912] An siRNA standard curve was generated by plotting Ct values (Y) versus siRNA concentration (X) in log scale using GraphPad Prism (version 9.4.1), followed by semi-log line fitting to determine slope and y-intercept values. siRNA concentration for each sample was calculated using the obtained Ct value and the determined slope and y-intercept values.

$$ng siRNA = [ siRNA ] \times Ago 2 IP elution volume ( 50 μ L )$$

$$ng siRNA per g soluble lysate protein = ng siRNA per 500 μ g ( amount used in Ago 2 IP )$$

### Data Analysis:

[1913] Statistical significance was determined by ordinary one-way ANOVA and Dunnett's multiple comparisons test using GraphPad Prism software (version 9.4.1).

### Example 6: HMGCR siRNA Increases LDLR Protein in Human Liver Cells

### 6.1 Primary Human Hepatocyte Culture

[1914] Cryopreserved 999Elite primary human hepatocytes (PHH, Lot 1142) were obtained from Discovery Life Sciences (Huntsville, AL), and registered in the Novartis Human Biological Sample tracking system. Thawing, counting, and plating of hepatocytes was conducted following the vendor's protocol. Briefly, cells were seeded using medium UPCM into 48-well (0.15 million/0.4 mL/well) or 24-well plates (0.32 million/0.8 mL/well) for 4h incubation in 37° C. cell culture incubator supplied with 95% 02/5% CO2. The medium was then switched to hepatocyte induction medium (HIM; DLS, Cat #81018: 0.25 mL/well, 48-well plate; 0.5 mL/well, 24-well plate) for 30 min of incubation prior to siRNA transfection or compound treatment.

### 6.2 Human Hepatoma Cell Line Huh7

[1915] Human hepatoma cell line Huh7 was obtained from ATCC. Cells were maintained in pyruvate-free DMEM (Thermo Fisher Scientific, Waltham, MA, Cat #11965-092) supplemented with 10% heat-inactivated fetal bovine serum (FBS, Thermo Fisher Scientific, Cat #10082-147). Huh7 cells (passage number 14) were split using 0.25% Trypsin/2.21 mM EDTA (Corning Life Sciences (Corning, NY), Cat #25-053-CI), seeded into 6-well plates (0.21 million/2.5 mL complete DMSM/well) for 18 h growth in a cell culture incubator. The medium was next switched to Opti-MEM (Thermo Fisher Scientific, Cat #31985062; 2.5 mL/well) for 30 min incubation prior to siRNA transfection or compound treatment.

6.3 siRNA Transfection

[1916] siRNA agents were complexed to Lipofectamine RNAiMAX (Thermo Fisher Scientific, Cat #13778150) in Opti-MEM (Thermo Fisher Scientific, Cat #31985062) according to the vendor's manual. Briefly, the siRNA-to-Lipofectamine ratio was 33.3 μmole:1 μL, with siRNA as 600 nM in the complex stock. siRNA/Lipofectamine complex was added to HIM (for PHH) or Opti-MEM (for Huh7) medium to achieve a final siRNA concentration of 10 nM or 25 nM, respectively. The PHH culture was set for 24h transfection without a change of medium. The Huh7 culture was incubated with siRNA for 6 h at 37° C., then refreshed with DMEM/10% FBS (2.5 mL/well, 6-well plate) for an additional 24h incubation. Negative control siRNA (Thermo Fisher Scientific, Cat #: 4390847) and in-house HMGCR siRNA (Compound 1) were used for siRNA transfection.

### 6.4 Statin Treatment

[1917] In PHH experiments, atorvastatin (25 μM in DMSO) was diluted in HIM medium to achieve a concentration of 10 nM. Then pre-existing HIM was replaced with an equal volume of HIM/atorvastatin (0.25 mL/well, 48-well pate; 0.5 mL/well, 24-well plate) for a 24h incubation. In Huh7 experiments, there was first a 6h incubation with Opti-MEM in parallel of 6h siRNA incubation. Then Opti-MEM was replaced with DMEM/10%/25 nM atorvastatin (2.5 mL/well) for 24h incubation. In both cell culture systems, DMSO was added to medium to serve as a control.

6.5 mRNA Quantification

[1918] After siRNA transfection or atorvastatin treatment, cells were washed twice with PBS, lysed with TRK lysis buffer (Total RNA kit, Cat #R6834-02, Omega Bio-Tek (Norcross, GA)) for RNA isolation. RNA was quantified using a NanoDrop 2000 (Thermo Fisher Scientific). cDNA was synthesized using a TaqMan Reverse Transcription Kit (Thermo Fisher Scientific, Cat #N8080234). Briefly, the RNA content in cDNA synthesis was 10 ng/μL. cDNA was then diluted 1:6 in water and subjected to Real-Time PCR assays using FAM/MGB probes for human TBP (hs00427620_m1, Thermo Fisher Scientific), HPRT1 (Hs02800695_m1), PPIA (Hs99999904_m1), HMGCR (Hs00168352_m1), and LDLR (Hs01092524_m1). cDNA input was 4 μL in each 10 μL PCR setup using Taqman Universal PCR Master Mix (Thermo Fisher Scientific, Cat #4304437). PCR assays were run in Quant Studio 5 with Design and Analysis Software v1.5.2. For Huh7 culture, target gene mRNA was normalized to house-keeping gene TBP based on Ct values derived by PCR. For PHH culture, Ct geomean was generated from 3 house-keeping genes (TBP, HPRT1, PPIA), for target gene normalization. In all cell culture controls, target mRNA expression was arbitrarily assigned a value of 1. mRNA expression in treatment group(s) was calculated as a fold-change relative to control.

### 6.6 Western Blotting

[1919] After treatment, cells were washed twice with PBS and lysed with 1×NuPAGE LDS sample buffer/1× reducing agent (Thermo Fisher Scientific: Cat #NP0007, NP0009). The volume of sample buffer was 100 μL/well (24-well plate) or 500 μL/well (6-well plate), respectively. Cellular lysate samples were subject to sonication (25 sec×3, output level=6, MICROSON Ultrasonic Cell Disruptor, MISONIX Inc. (Farmingdale, NY). Cellular proteins were resolved in NuPAGE 4-12% Bis-Tris gel (Thermo Fisher Scientific, NP02323 Box) and transferred onto nitrocellulose membrane in an iBlot2 Dry Blotting System (Thermo Fisher Scientific). Proteins were probed using rabbit monoclonal antibody for GAPDH (Cat #5174S, 1:4500; Cell Signaling Technology, Danvers, MA) or rabbit polyclonal antibody for human LDL receptor (Cat #LS-C146979, 1:1000, LifeSpan Bioscience, Shirley MA). Primary antibodies were detected using HRP-conjugated Ab (goat anti-rabbit IgG, Cat ##7074S, 1:2500; or goat anti-mouse IgG, Cat #7076S, 1:2500. Cell Signaling Technology). Protein bands were visualized using a SuperSignal West Femto Kit (Thermo Fisher Scientific, Cat #34096), with images captured using Amersham Imager 680 (GE Healthcare) and quantified using ImageQuant TL Software. Densitometric values for target protein were normalized to that of GAPDH. Target protein level for the control was arbitrarily set as 1, therefore protein expression in treatment group(s) represents fold-change relative to control.

### Example 7: HMGCR siRNA Reduces HMGCR Protein in Huh7 Cells

### 7.1 Human Hepatoma Cell Line Huh7

[1920] Human hepatoma cell line Huh7 was obtained from ATCC. Cells were maintained in pyruvate-free DMEM (Thermo Fisher Scientific, Waltham, MA, Cat #11965-092) supplemented with 10% heat-inactivated fetal bovine serum (FBS, Thermo Fisher Scientific, Cat #10082-147). Huh7 cells (passage number 14) were split using 0.25% Trypsin/2.21 mM EDTA (Corning Life Sciences (Corning, NY), Cat #25-053-CI), seeded into 6-well plates (0.21 million/2.5 mL complete DMSM/well) for 18 h growth in a cell culture incubator. The medium was next switched to Opti-MEM (Thermo Fisher Scientific, Cat #31985062; 2.5 mL/well) for 30 min incubation prior to siRNA transfection or compound treatment.

7.2 siRNA Transfection

[1921] siRNA agents were complexed to Lipofectamine RNAiMAX (Thermo Fisher Scientific, Cat #13778150) in Opti-MEM (Thermo Fisher Scientific, Cat #31985062) according to the vendor's manual. Briefly, the siRNA-to-Lipofectamine ratio was 33.3 pmole:1 μL, with siRNA as 600 nM in the complex stock. siRNA/Lipofectamine complex was added to Opti-MEM medium to achieve a final siRNA concentration of 12.5 nM or 25 nM (FIG. 7A). The Huh7 culture was incubated with siRNA for 6 h at 37° C., then refreshed with DMEM/10% FBS (2.5 mL/well, 6-well plate) for an additional 24h incubation. Negative control siRNA (Thermo Fisher Scientific, Cat #: 4390847) or HMGCR siRNA 3 (Compound 1) were used for siRNA transfection.

### 7.3 Statin Treatment

[1922] Huh7 cells were incubated with Opti-MEM for 6h. This was followed by replacement of Opti-MEM with DMEM/10%/12.5 or 25 nM atorvastatin (2.5 mL/well) and incubation for 24h (FIG. 7B). DMSO was added to medium to serve as a control.

### 7.4 Western Blotting

[1923] After treatment, cells were washed twice with PBS and lysed with 1×NuPAGE LDS sample buffer/1× reducing agent (Thermo Fisher Scientific: Cat #NP0007, NP0009). The volume of sample buffer was 100 μL/well (24-well plate) or 500 μL/well (6-well plate), respectively. Cellular lysate samples were subject to sonication (25 sec×3, output level=6, MICROSON Ultrasonic Cell Disruptor, MISONIX Inc. (Farmingdale, NY). Cellular proteins were resolved in NuPAGE 4-12% Bis-Tris gel (Thermo Fisher Scientific, NP02323 Box) and transferred onto nitrocellulose membrane in an iBlot2 Dry Blotting System (Thermo Fisher Scientific). Proteins were probed using rabbit monoclonal antibody for GAPDH (Cat #5174S, 1:4500; Cell Signaling Technology, Danvers, MA) or rabbit polyclonal antibody for human LDL receptor (Cat #LS-C146979, 1:1000, LifeSpan Bioscience, Shirley MA). Primary antibodies were detected using HRP-conjugated Ab (goat anti-rabbit IgG, Cat ##7074S, 1:2500; or goat anti-mouse IgG, Cat #7076S, 1:2500. Cell Signaling Technology). Protein bands were visualized using a SuperSignal West Femto Kit (Thermo Fisher Scientific, Cat #34096), with images captured using Amersham Imager 680 (GE Healthcare) and quantified using ImageQuant TL Software. Densitometric values for target protein were normalized to that of GAPDH. Target protein level for the control was arbitrarily set as 1, therefore protein expression in the treatment group(s) represents fold-change relative to control.

### 7.5 Results

[1924] Relative to the control siRNA, Compound 1 reduced HMGCR protein content by 51% and 73% at concentrations of 12.5 and 25 nM, respectively (FIG. 7A). These results demonstrate that Compound 1 significantly, and dose-dependently, reduces HMGCR protein content in a human liver cell line.

[1925] In contrast, relative to DMSO, atorvastatin markedly augmented HMGCR protein levels, with 96% and 123% increases observed relative to control at concentrations of 12.5 and 25 nM, respectively (FIG. 7B). These results demonstrate that, in contrast to Compound 1, atorvastatin robustly increases HMGCR protein expression in a human liver cell line.

### Example 8: In Vitro Screening

[1926] Extended siRNA sequences were designed to be complementary to human HMGCR isoform, transcript variant 1, mRNA (GenBank: NM_000859.3) and about four hundreds of RNAi agents (siRNAs) to HMGCR were screened and tested for off-target hybridization (e.g., less off-target hybridization) and knock-down of HMGCR mRNA in Hepa-1-6-cells and HEK293 cells for evaluating off-target profiling.

### 8.1 Assays Using Reporter in Hepa-1-6 Cells

[1927] Hepa-1-6 cells (ATCC, cat. CRL-1830) were cultured in DMEM (ATCC, cat. 30-2002) medium containing 10% FBS at 37 C with 5% CO2. Cells were seeded in a 96-well plate and reverse transfected using lipofectamine (Thermo, Liopfecatmine 2000, cat. 11668019) with 10Ong/well psiCheck2 (Promega, cat. C8021) containing an insert for HMGCR (NM_000859.3) in combination with siRNAs starting from 50 nM using a 1:4 dilution factor in a 10-point dose response as indicated in respective figures and tables. Firefly and renilla luciferase signals were obtained using Dual-Glo® Stop & Glo® Reagent (Promega, cat. E2940). The degree of knockdown was calculated from the ratio of renilla luminescence signal to firefly luminescence signal.

[1928] The results of suppression by example HMGCR siRNA agents in Hepa-1-6 cells are shown in Table 7.

TABLE 7
Suppression in HMGCR protein expression in Hepa-1-6

| | | | | 12.5 nM | | 3.125 nM | | 0.78125 nM | | |
|---|---|---|---|---|---|---|---|---|---|---|
| | | 50 nM siRNA | | siRNA | | siRNA | | siRNA | | |
| | position | (%) | | (%) | | (%) | | (%) | | |
| siRNA | in | protein | (%) | protein | (%) | protein | (%) | protein | (%) | IC₈₀ |
| No. | mRNA | expression | SD | expression | SD | expression | SD | expression | SD | (nM) |
| 408 | 126 | 4.07 | 0.03 | 3.43 | 0.08 | 3.85 | 0.12 | 6.14 | 0.12 | 0.13 |
| 409 | 127 | 2.99 | 0.13 | 2.89 | 0.20 | 3.07 | 0.08 | 5.14 | 0.33 | 0.10 |
| 411 | 131 | 6.81 | 0.19 | 4.45 | 0.28 | 4.56 | 0.34 | 6.06 | 0.44 | 0.12 |
| 412 | 133 | 10.57 | 0.35 | 8.05 | 0.48 | 8.66 | 0.76 | 11.90 | 0.60 | 0.22 |
| 415 | 277 | 4.87 | 0.12 | 4.08 | 0.22 | 4.13 | 0.02 | 4.74 | 0.06 | 0.13 |
| 417 | 313 | 7.97 | 0.11 | 6.21 | 0.10 | 7.30 | 0.09 | 9.02 | 0.35 | 0.16 |
| 420 | 318 | 10.96 | 1.20 | 9.18 | 0.57 | 10.01 | 0.60 | 13.16 | 0.53 | 0.23 |
| 425 | 366 | 8.17 | 0.68 | 6.52 | 0.30 | 6.90 | 0.36 | 8.32 | 0.56 | 0.19 |
| 427 | 371 | 6.54 | 0.19 | 6.11 | 0.19 | 6.02 | 0.45 | 7.00 | 0.20 | 0.06 |
| 445 | 683 | 25.26 | 1.30 | 25.14 | 0.51 | 26.63 | 1.18 | 30.41 | 0.06 | 0.67 |
| 453 | 739 | 20.94 | 1.03 | 20.34 | 0.97 | 24.61 | 0.29 | 27.47 | 0.97 | 0.27 |
| 464 | 967 | 25.41 | 1.38 | 25.81 | 1.07 | 26.62 | 1.61 | 30.49 | 1.44 | 0.20 |
| 465 | 968 | 28.00 | 0.82 | 25.55 | 1.27 | 27.53 | 1.58 | 30.07 | 1.03 | 0.24 |
| 466 | 972 | 30.52 | 1.03 | 30.76 | 1.50 | 28.31 | 1.11 | 32.28 | 0.87 | 0.26 |
| 467 | 1083 | 27.50 | 1.62 | 24.40 | 0.74 | 24.66 | 0.11 | 27.36 | 1.66 | 0.17 |
| 487 | 1328 | 33.31 | 1.48 | 31.39 | 0.31 | 37.63 | 1.81 | 47.58 | 1.08 | 1.05 |
| 489 | 1357 | 35.87 | 1.47 | 32.03 | 0.22 | 35.44 | 1.88 | 44.06 | 2.72 | 0.71 |
| 491 | 1381 | 38.72 | 0.56 | 31.56 | 0.59 | 35.61 | 2.05 | 44.59 | 0.45 | 0.63 |
| 498 | 1521 | 27.60 | 2.27 | 24.47 | 1.16 | 25.47 | 1.03 | 27.18 | 1.08 | 0.13 |
| 502 | 1531 | 21.58 | 0.26 | 20.06 | 0.50 | 21.64 | 0.62 | 23.91 | 0.69 | 0.16 |
| 511 | 1567 | 30.87 | 0.48 | 27.18 | 0.13 | 28.72 | 1.46 | 37.56 | 1.74 | 0.48 |
| 514 | 1583 | 33.54 | 0.10 | 30.69 | 0.93 | 33.47 | 0.59 | 39.06 | 1.90 | 0.57 |
| 516 | 1587 | 24.04 | 1.65 | 23.44 | 0.15 | 23.75 | 0.34 | 28.33 | 1.77 | 0.16 |
| 533 | 1953 | 35.00 | 0.68 | 29.87 | 0.26 | 32.87 | 1.37 | 41.37 | 2.26 | 0.58 |
| 545 | 2007 | 29.51 | 1.08 | 24.34 | 0.92 | 25.78 | 1.15 | 30.41 | 0.81 | 0.19 |
| 547 | 2042 | 41.33 | 1.57 | 35.03 | 0.75 | 36.39 | 0.16 | 49.26 | 2.20 | 0.85 |
| 555 | 2266 | 31.20 | 2.45 | 26.73 | 0.55 | 26.94 | 0.96 | 27.98 | 0.27 | 0.11 |
| 557 | 2274 | 22.65 | 1.21 | 23.03 | 0.28 | 23.37 | 1.07 | 26.75 | 0.51 | 0.38 |
| 577 | 2399 | 39.41 | 0.22 | 34.70 | 2.70 | 38.65 | 0.51 | 50.62 | 0.38 | 1.68 |
| 578 | 2424 | 29.88 | 0.69 | 32.32 | 1.85 | 34.96 | 0.24 | 46.43 | 1.52 | 1.90 |
| 579 | 2426 | 27.66 | 1.64 | 26.01 | 1.31 | 28.06 | 1.60 | 29.25 | 0.24 | 0.31 |
| 580 | 2429 | 29.69 | 0.14 | 24.86 | 0.13 | 25.97 | 0.74 | 28.19 | 1.23 | 0.11 |
| 583 | 2484 | 8.17 | 0.24 | 5.94 | 0.27 | 5.90 | 0.62 | 6.51 | 0.31 | 0.14 |
| 585 | 2575 | 16.25 | 2.30 | 14.82 | 0.91 | 15.53 | 0.45 | 29.44 | 3.89 | 1.10 |
| 588 | 2592 | 27.42 | 0.11 | 24.18 | 2.09 | 24.79 | 1.83 | 33.95 | 4.68 | 0.95 |
| 591 | 2627 | 50.90 | 3.00 | 41.09 | 3.48 | 43.79 | 4.46 | 47.64 | 4.69 | 0.34 |
| 597 | 2723 | 14.03 | 0.96 | 9.12 | 0.07 | 8.52 | 0.16 | 9.51 | 0.65 | 0.05 |
| 601 | 2731 | 17.50 | 0.37 | 15.00 | 1.28 | 15.62 | 0.60 | 15.32 | 0.36 | 0.03 |
| 603 | 2734 | 22.44 | 0.95 | 16.30 | 1.39 | 14.06 | 0.49 | 21.93 | 2.20 | 0.43 |
| 604 | 2735 | 22.34 | 1.48 | 9.36 | 1.08 | 8.09 | 0.37 | 10.56 | 0.74 | 0.00 |
| 611 | 2994 | 10.96 | 0.87 | 9.39 | 0.09 | 9.69 | 0.05 | 12.54 | 0.31 | 0.10 |
| 613 | 3071 | 43.86 | 2.58 | 28.14 | 0.66 | 22.97 | 1.04 | 27.92 | 2.08 | 0.08 |
| 614 | 3102 | 8.48 | 0.90 | 7.04 | 0.21 | 7.24 | 0.46 | 8.43 | 0.30 | 0.13 |
| 616 | 3105 | 7.54 | 0.70 | 5.41 | 0.22 | 6.32 | 0.72 | 8.32 | 0.61 | 0.23 |
| 620 | 3126 | 11.81 | 0.80 | 9.93 | 0.52 | 10.39 | 1.21 | 13.26 | 1.48 | 0.20 |
| 621 | 3129 | 15.00 | 0.55 | 10.61 | 0.37 | 11.76 | 0.36 | 15.94 | 1.37 | 0.22 |
| 622 | 3130 | 10.54 | 0.82 | 10.89 | 1.33 | 9.57 | 0.74 | 11.59 | 0.24 | 0.05 |
| 633 | 3484 | 31.49 | 2.21 | 23.55 | 1.77 | 23.04 | 1.43 | 27.88 | 4.37 | 0.21 |

### 8.2 HEK293T Cell Assay

[1929] Adherent HEK293T cells (ATCC, cat. CRL-3216) were cultured as recommended by the manufacture. Cells were transfected 24 hrs post-seeding using lipofectamine (Invitrogen, Lipofectamine™ RNAiMax 13778150) in a 96-well plate. Cells were lysed using FastLance (Qiagen, cat. 216713) and followed manufacturer protocol for RT-qPCR using specific primer probes for HMGCR (Thermo, Hs00168352_m1) which was normalized to the house keeping gene PGK (Thermo, Hs9999906_m1). Changes in expression were calculated using delta-delta CT method.

[1930] siRNAs for transfection are listed in Table 8.

TABLE 8

| | position | | SEQ | | SEQ |
|---|---|---|---|---|---|
| siRNA | in | | ID | | ID |
| No. | mRNA | Sense Strand | NO: | Antisense strand | NO: |
| 655 | 126 | U007p001U004p001G007pU004 | 1310 | U004p001U007p001C004pG007p | 1357 |
| | | pC007pA004pA007pG004pA007 | | A004pA007pA004pA007pA004pG | |
| | | pC004pU007pU004pU007pU004 | | 007pU004pC007pU004pU007pG0 | |
| | | pU007pC004pG007pA004pA007 | | 04pA007pC004pA007pA004p001 | |
| | | pX2000 | | U004p001U004 | |
| 656 | 131 | G007p001A004p001U007pU004 | 1311 | A004p001G007p001A004pC007p | 1358 |
| | | pG007pG004pC007pU004pA007 | | A004pU007pG004pU007pU004pA | |
| | | pU004pA007pA004pC007pA004 | | 007pU004pA007pG004pC007pC0 | |
| | | pU007pG004pU007pC004pU007 | | 04pA007pA004pU007pC004p001 | |
| | | pX2000 | | U004p001U004 | |
| 657 | 277 | G007p001A004p001A007pG004 | 1312 | U004p001U007p001A004pU007p | 1359 |
| | | pG007pG004pU007pU004pC007 | | C004pA007pC004pU007pG004pC | |
| | | pG004pC007pA004pG007pU004 | | 007pG004pA007pA004pC007pC0 | |
| | | pG007pA004pU007pA004pA007 | | 04pC007pU004pU007pC004p001 | |
| | | px2000 | | U004p001U004 | |
| 658 | 295 | U007p001G004p001A007pG004 | 1313 | A004p001U007p001U004pA007p | 1360 |
| | | pc007pA004pG007pU004pG007 | | U004pA007pA004pU007pG004pU | |
| | | pA004pC007pA004pU007pU004 | | 007pC004pA007pC004pU007pG0 | |
| | | pA007pU004pA007pA004pU007 | | 04pC007pU004pC007pA004p001 | |
| | | pX2000 | | U004p001U004 | |
| 659 | 445 | C007p001A004p001G007pU004 | 1314 | A004p001A007p001G004pA007p | 1361 |
| | | pu007pG004pU007pC004pA007 | | A004pG007pU004pG007pA004pA | |
| | | pU004pU007pC004pA007pC004 | | 007pU004pG007pA004pC007pA0 | |
| | | pu007pU004pC007pU004pU007 | | 04pA007pC004pU007pG004p001 | |
| | | pX2000 | | U004p001U004 | |
| 660 | 730 | C007p001C004p001A007pA004 | 1315 | A004p001U007p001G004pA007p | 1362 |
| | | pc007pU004pA007pC004pU007 | | A004pC007pA004pC007pG004pA | |
| | | pU004pC007pG004pU007pG004 | | 007pA004pG007pU004pA007pG0 | |
| | | pU007pU004pC007pA004pU007 | | 04pU007pU004pG007pG004p001 | |
| | | px2000 | | U004p001U004 | |
| 661 | 736 | A007p001C004p001U007pU004 | 1316 | A004p001A007p001A004pG007p | 1363 |
| | | pC007pG004pU007pG004pU007 | | U004pC007pA004pU007pG004pA | |
| | | pU004pC007pA004pU007pG004 | | 007pA004pC007pA004pC007pG0 | |
| | | pA007pC004pU007pU004pU007 | | 04pA007pA004pG007pU004p001 | |
| | | pX2000 | | U004p001U004 | |
| 662 | 739 | U007p001C004p001G007pU004 | 1317 | A004p001A007p001G004pA007p | 1364 |
| | | pG007pU004pU007pC004pA007 | | A004pA007pG004pU007pC004pA | |
| | | pU004pG007pA004pC007pU004 | | 007pU004pG007pA004pA007pC0 | |
| | | pU007pU004pC007pU004pU007 | | 04pA007pC004pG007pA004p001 | |
| | | pX2000 | | U004p001U004 | |
| 663 | 1328 | C007p001U004p001U007pA004 | 1318 | A004p001U007p001C004pU007p | 1365 |
| | | pG007pU004pG007pG004pC007 | | G004pU007pU004pU007pC004pA | |
| | | pU004pG007pA004pA007pA004 | | 007pG004pC007pC004pA007pC0 | |
| | | pc007pA004pG007pA004pU007 | | 04pU007pA004pA007pG004p001 | |
| | | pX2000 | | U004p001U004 | |
| 664 | 1516 | C007p001U004p001G007pA004 | 1319 | A004p001C007p001U004pA007p | 1366 |
| | | pG007pA004pU007pC004pA007 | | A004pC007pU004pG007pG004pA | |
| | | pU004pC007pC004pA007pG004 | | 007pU004pG007pA004pU007pC0 | |
| | | pU007pU004pA007pG004pU007 | | 04pU007pC004pA007pG004p001 | |
| | | px2000 | | U004p001U004 | |
| 665 | 1555 | C007p001C004p001U007pA004 | 1320 | A004p001G007p001A004pG007p | 1367 |
| | | pc007pA004pA007pG004pU007 | | U004pU007pU004pC007pC004pA | |
| | | pU004pG007pG004pA007pA004 | | 007pA004pC007pU004pU007pG0 | |
| | | pA007pC004pU007pC004pU007 | | 04pU007pA004pG007pG004p001 | |
| | | pX2000 | | U004p001U004 | |
| 666 | 1558 | A007p001C004p001A007pA004 | 1321 | A004p001U007p001C004pA007p | 1368 |
| | | pG007pU004pU007pG004pG007 | | G004pA007pG004pU007pU004pU | |
| | | pA004pA007pA004pC007pU004 | | 007pC004pC007pA004pA007pC0 | |
| | | pC007pU004pG007pA004pU007 | | 04pU007pU004pG007pU004p001 | |
| | | px2000 | | U004p001U004 | |
| 667 | 1586 | U007p001G004p001A007pG004 | 1322 | A004p001A007p001U004pA007p | 1369 |
| | | pC007pG004pU007pG004pG007 | | G004pA007pU004pA007pC004pA | |
| | | pU004pG007pU004pA007pU004 | | 007pC004pC007pA004pC007pG0 | |
| | | pc007pU004pA007pU004pU007 | | 04pC007pU004pC007pA004p001 | |
| | | pX2000 | | U004p001U004 | |
| 668 | 1996 | C007p001U004p001A007pG004 | 1323 | A004p001G007p001A004pC007p | 1370 |
| | | pC007pA004pG007pA004pU007 | | G004pU007pG004pC007pA004pA | |
| | | pU004pU007pG004pC007pA004 | | 007pA004pU007pC004pU007pG0 | |
| | | pC007pG004pU007pC004pU007 | | 04pC007pU004pA007pG004p001 | |
| | | pX2000 | | U004p001U004 | |
| 669 | 2169 | G007p001U004p001U007pA004 | 1324 | U004p001A007p001C004pA007p | 1371 |
| | | pG007pU004pG007pG004pU007 | | A004pU007pA004pG007pU004pU | |
| | | pA004pA007pC004pU007pA004 | | 007pA004pC007pC004pA007pC0 | |
| | | pU007pU004pG007pU004pA007 | | 04pU007pA004pA007pC004p001 | |
| | | pX2000 | | U004p001U004 | |
| 670 | 2269 | U007p001U004p001G007pU004 | 1325 | U004p001U007p001U004pA007p | 1372 |
| | | pC007pA004pG007pA004pG007 | | A004pU007pA004pC007pU004pU | |
| | | pA004pA007pG004pU007pA004 | | 007pC004pU007pC004pU007pG0 | |
| | | pU007pU004pA007pA004pA007 | | 04pA007pC004pA007pA004p001 | |
| | | pX2000 | | U004p001U004 | |
| 671 | 2274 | A007p001G004p001A007pG004 | 1326 | U004p001A007p001G004pU007p | 1373 |
| | | pA007pA004pG007pU004pA007 | | C004pU007pU004pU007pA004pA | |
| | | pU004pU007pA004pA007pA004 | | 007pU004pA007pC004pU007pU0 | |
| | | pG007pA004pC007pU004pA007 | | 04pC007pU004pC007pU004p001 | |
| | | pX2000 | | U004p001U004 | |
| 672 | 2424 | G007p001C004p001A007pG004 | 1327 | U004p001A007p001C004pC007p | 1374 |
| | | pC007pA004pC007pA004pG007 | | A004pA007pC004pA007pU004pU | |
| | | pA004pA007pU004pG007pU004 | | 007pC004pU007pG004pU007pG0 | |
| | | pU007pG004pG007pU004pA007 | | 04pC007pU004pG007pC004p001 | |
| | | px2000 | | U004p001U004 | |
| 673 | 2484 | A007p001A004p001U007pG004 | 1328 | U004p001G007p001A004pU007p | 1375 |
| | | pA007pA004pG007pA004pU007 | | A004pU007pA004pU007pA004pA | |
| | | pU004pU007pA004pU007pA004 | | 007pA004pU007pC004pU007pU0 | |
| | | pU007pA004pU007pC004pA007 | | 04pC007pA004pU007pU004p001 | |
| | | pX2000 | | U004p001U004 | |
| 674 | 2575 | U007p001G004p001C007pA004 | 1329 | U004p001G007p001A004pA007p | 1376 |
| | | pG007pA004pU007pG004pC007 | | C004pA007pC004pC007pU004pA | |
| | | pU004pA007pG004pG007pU004 | | 007pG004pC007pA004pU007pC0 | |
| | | pG007pU004pU007pC004pA007 | | 04pU007pG004pC007pA004p001 | |
| | | pX2000 | | U004p001U004 | |
| 675 | 2576 | G007p001C004p001A007pG004 | 1330 | U004p001U007p001G004pA007p | 1377 |
| | | pA007pU004pG007pC004pU007 | | A004pC007pA004pC007pC004pU | |
| | | pA004pG007pG004pU007pG004 | | 007pA004pG007pC004pA007pU0 | |
| | | pU007pU004pC007pA004pA007 | | 04pC007pU004pG007pC004p001 | |
| | | pX2000 | | U004p001U004 | |
| 676 | 2592 | C007p001A004p001A007pG004 | 1331 | U004p001A007p001U004pC007p | 1378 |
| | | pG007pA004pG007pC004pA007 | | U004pU007pU004pG007pC004pA | |
| | | pU004pG007pC004pA007pA004 | | 007pU004pG007pC004pU007pC0 | |
| | | pA007pG004pA007pU004pA007 | | 04pC007pU004pU007pG004p001 | |
| | | pX2000 | | U004p001U004 | |
| 677 | 2627 | C007p001C004p001G007pG004 | 1332 | A004p001A007p001U004pU007p | 1379 |
| | | pC007pA004pG007pC004pU007 | | C004pG007pG004pG007pC004pA | |
| | | pU004pG007pC004pC007pC004 | | 007pA004pG007pC004pU007pG0 | |
| | | pG007pA004pA007pU004pU007 | | 04pC007pC004pG007pG004p001 | |
| | | pX2000 | | U004p001U004 | |
| 678 | 2728 | A007p001C004p001A007pA004 | 1333 | U004p001U007p001G004pA007p | 1380 |
| | | pC007pA004pG007pG004pU007 | | U004pC007pU004pU007pC004pG | |
| | | pC004pG007pA004pA007pG004 | | 007pA004pC007pC004pU007pG0 | |
| | | pA007pU004pC007pA004pA007 | | 04pU007pU004pG007pU004p001 | |
| | | pX2000 | | U004p001U004 | |
| 679 | 2731 | A007p001C004p001A007pG004 | 1334 | A004p001A007p001A004pU007p | 1381 |
| | | pG007pU004pC007pG004pA007 | | U004pG007pA004pU007pC004pU | |
| | | pA004pG007pA004pU007pC004 | | 007pU004pC007pG004pA007pC0 | |
| | | pA007pA004pU007pU004pU007 | | 04pC007pU004pG007pU004p001 | |
| | | px2000 | | U004p001U004 | |
| 680 | 2737 | C007p001G004p001A007pA004 | 1335 | U004p001C007p001U004pU007p | 1382 |
| | | pG007pA004pU007pC004pA007 | | G004pU007pA004pA007pA004pU | |
| | | pA004pU007pU004pU007pA004 | | 007pU004pG007pA004pU007pC0 | |
| | | pC007pA004pA007pG004pA007 | | 04pU007pU004pC007pG004p001 | |
| | | pX2000 | | U004p001U004 | |
| 681 | 2937 | A007p001G004p001A007pG004 | 1336 | A004p001A007p001G004pA007p | 1383 |
| | | pA007pG004pG007pU004pC007 | | A004pC007pC004pU007pG004pA | |
| | | pU004pC007pA004pG007pG004 | | 007pG004pA007pC004pC007pU0 | |
| | | pu007pU004pC007pU004pU007 | | 04pC007pU004pC007pU004p001 | |
| | | pX2000 | | U004p001U004 | |
| 682 | 3108 | U007p001G004p001A007pU004 | 1337 | A004p001A007p001C004pU007p | 1384 |
| | | pG007pA004pA007pA004pU007 | | U004pC007pA004pA007pG004pA | |
| | | pU004pC007pU004pU007pG004 | | 007pA004pU007pU004pU007pC0 | |
| | | pA007pA004pG007pU004pU007 | | 04pA007pU004pC007pA004p001 | |
| | | pX2000 | | U004p001U004 | |
| 683 | 3111 | U007p001G004p001A007pA004 | 1338 | A004p001U007p001G004pA007p | 1385 |
| | | pA007pU004pU007pC004pU007 | | A004pC007pU004pU007pC004pA | |
| | | pU004pG007pA004pA007pG004 | | 007pA004pG007pA004pA007pU0 | |
| | | pU007pU004pC007pA004pU007 | | 04pU007pU004pC007pA004p001 | |
| | | pX2000 | | U004p001U004 | |
| 684 | 3208 | A007p001C004p001U007pC004 | 1339 | U004p001A007p001A004pC007p | 1386 |
| | | pc007pU004pG007pA004pU007 | | U004pA007pC004pA007pA004pA | |
| | | pU004pU007pU004pG007pU004 | | 007pA004pU007pC004pA007pG0 | |
| | | pA007pG004pU007pU004pA007 | | 04pG007pA004pG007pU004p001 | |
| | | pX2000 | | U004p001U004 | |
| 685 | 3209 | C007p001U004p001C007pC004 | 1340 | U004p001U007p001A004pA007p | 1387 |
| | | pU007pG004pA007pU004pU007 | | C004pU007pA004pC007pA004pA | |
| | | pU004pU007pG004pU007pA004 | | 007pA004pA007pU004pC007pA0 | |
| | | pG007pU004pU007pA004pA007 | | 04pG007pG004pA007pG004p001 | |
| | | pX2000 | | U004p001U004 | |
| 686 | 3210 | U007p001C004p001C007pU004 | 1341 | A004p001U007p001U004pA007p | 1388 |
| | | pG007pA004pU007pU004pU007 | | A004pC007pU004pA007pC004pA | |
| | | pU004pG007pU004pA007pG004 | | 007pA004pA007pA004pU007pC0 | |
| | | pU007pU004pA007pA004pU007 | | 04pA007pG004pG007pA004p001 | |
| | | pX2000 | | U004p001U004 | |
| 687 | 3254 | C007p001A004p001A007pG004 | 1342 | A004p001C007p001U004pU007p | 1389 |
| | | pA007pA004pG007pU004pA007 | | A004pG007pC004pU007pC004pU | |
| | | pA004pG007pA004pG007pC004 | | 007pU004pA007pC004pU007pU0 | |
| | | pU007pA004pA007pG004pU007 | | 04pC007pU004pU007pG004p001 | |
| | | pX2000 | | U004p001U004 | |
| 688 | 3400 | A007p001C004p001U007pA004 | 1343 | U004p001A007p001A004pC007p | 1390 |
| | | pC007pA004pG007pA004pA007 | | A004pC007pA004pU007pU004pA | |
| | | pU004pA007pA004pU007pG004 | | 007pU004pU007pC004pU007pG0 | |
| | | pU007pG004pU007pU004pA007 | | 04pU007pA004pG007pU004p001 | |
| | | pX2000 | | U004p001U004 | |
| 689 | 3401 | C007p001U004p001A007pC004 | 1344 | U004p001U007p001A004pA007p | 1391 |
| | | pA007pG004pA007pA004pU007 | | C004pA007pC004pA007pU004pU | |
| | | pA004pA007pU004pG007pU004 | | 007pA004pU007pU004pC007pU0 | |
| | | pG007pU004pU007pA004pA007 | | 04pG007pU004pA007pG004p001 | |
| | | pX2000 | | U004p001U004 | |
| 690 | 3483 | A007p001G004p001A007pG004 | 1345 | U004p001U007p001A004pA007p | 1392 |
| | | pA007pG004pG007pC004pC007 | | A004pC007pA004pA007pA004pA | |
| | | pU004pU007pU004pU007pG004 | | 007pG004pG007pC004pC007pU0 | |
| | | pU007pU004pU007pA004pA007 | | 04pC007pU004pC007pU004p001 | |
| | | pX2000 | | U004p001U004 | |
| 691 | 3484 | G007p001A004p001G007pA004 | 1346 | U004p001U007p001U004pA007p | 1393 |
| | | pG007pG004pC007pC004pU007 | | A004pA007pC004pA007pA004pA | |
| | | pU004pU007pU004pG007pU004 | | 007pA004pG007pG004pC007pC0 | |
| | | pU007pU004pA007pA004pA007 | | 04pU007pC004pU007pC004p001 | |
| | | pX2000 | | U004p001U004 | |
| 692 | 3485 | A007p001G004p001A007pG004 | 1347 | A004p001U007p001U004pU007p | 1394 |
| | | pG007pC004pC007pU004pU007 | | A004pA007pA004pC007pA004pA | |
| | | pU004pU007pG004pU007pU004 | | 007pA004pA007pG004pG007pC0 | |
| | | pU007pA004pA007pA004pU007 | | 04pC007pU004pC007pU004p001 | |
| | | pX2000 | | U004p001U004 | |
| 693 | 3533 | G007p001A004p001U007pU004 | 1348 | A004p001G007p001A004pC007p | 1395 |
| | | pG007pG004pC007pU004pA007 | | A004pU007pG004pU007pU004pA | |
| | | pU004pA007pA004pC007pA004 | | 007pU004pA007pG004pC007pC0 | |
| | | pU007pG004pU007pC004pU007 | | 04pA007pA004pU007pC004p001 | |
| | | pX2000 | | U004p001U004 | |
| 694 | 3597 | U007p001A004p001A007pA004 | 1349 | A004p001A007p001G004pA007p | 1396 |
| | | pG007pA004pU007pA004pU007 | | G004pC007pU004pC007pU004pG | |
| | | pC004pA007pG004pA007pG004 | | 007pA004pU007pA004pU007pC0 | |
| | | pc007pU004pC007pU004pU007 | | 04pU007pU004pU007pA004p001 | |
| | | pX2000 | | U004p001U004 | |
| 695 | 3654 | A007p001G004p001A007pC004 | 1350 | A004p0010007p001U004pU007p | 1397 |
| | | pU007pG004pG007pG004pA007 | | C004pU007pA004pA007pG004pG | |
| | | pC004pC007pU004pU007pA004 | | 007pU004pC007pC004pC007pA0 | |
| | | pG007pA004pA007pA004pU007 | | 04pG007pU004pC007pU004p001 | |
| | | pX2000 | | U004p001U004 | |
| 696 | 3826 | G007p001G004p001A007pA004 | 1351 | U004p001U007p001A004pU007p | 1398 |
| | | pG007pU004pG007pU004pU007 | | U004pU007pC004pU007pU004pG | |
| | | pC004pA007pA004pG007pA004 | | 007pA004pA007pC004pA007pC0 | |
| | | pA007pA004pU007pA004pA007 | | 04pU007pU004pC007pC004p001 | |
| | | pX2000 | | U004p001U004 | |
| 697 | 4099 | G007p001C004p001A007pG004 | 1352 | U004p001A007p001A004pG007p | 1399 |
| | | pA007pG004pU007pU004pA007 | | A004pU007pU004pC007pA004pA | |
| | | pU004pU007pG004pA007pA004 | | 007pU004pA007pA004pC007pU0 | |
| | | pU007pC004pU007pU004pA007 | | 04pC007pU004pG007pC004p001 | |
| | | pX2000 | | U004p001U004 | |
| 698 | 4100 | C007p001A004p001G007pA004 | 1353 | U004p001U007p001A004pA007p | 1400 |
| | | pG007pU004pU007pA004pU007 | | G004pA007pU004pU007pC004pA | |
| | | pU004pG007pA004pA007pU004 | | 007pA004pU007pA004pA007pC0 | |
| | | pC007pU004pU007pA004pA007 | | 04pU007pC004pU007pG004p001 | |
| | | pX2000 | | U004p001U004 | |
| 699 | 4102 | G007p001A004p001G007pU004 | 1354 | A004p001A007p001U004pU007p | 1401 |
| | | pU007pA004pU007pU004pG007 | | A004pA007pG004pA007pU004pU | |
| | | pA004pA007pU004pC007pU004 | | 007pC004pA007pA004pU007pA0 | |
| | | pU007pA004pA007pU004pU007 | | 04pA007pC004pU007pC004p001 | |
| | | pX2000 | | U004p001U004 | |
| 700 | 4103 | A007p001G004p001U007pU004 | 1355 | A004p001A007p001A004pU007p | 1402 |
| | | pA007pU004pU007pG004pA007 | | U004pA007pA004pG007pA004pU | |
| | | pA004pU007pC004pU007pU004 | | 007pU004pC007pA004pA007pU0 | |
| | | pA007pA004pU007pU004pU007 | | 04pA007pA004pC007pU004p001 | |
| | | pX2000 | | U004p001U004 | |
| 701 | 4154 | A007p001G004p001A007pA004 | 1356 | A004p001U007p001A004pC007p | 1403 |
| | | pC007pU004pC007pC004pU007 | | A004pA007pA004pA007pU004pA | |
| | | pU004pA007pU004pU007pU004 | | 007pA004pG007pG004pA007pG0 | |
| | | pU007pG004pU007pA004pU007 | | 04pU007pU004pC007pU004p001 | |
| | | pX2000 | | U004p001U004 | |

X2000:

[chemical structure]

[1931] The results of suppression by example HMGCR siRNA agents in Hepa-1-6 cells are shown in Table 9.

TABLE 9

| | | | 80 nM | | 40 nM | | 20 nM | | 10 nM |
|---|---|---|---|---|---|---|---|---|---|
| siRNA | | | Remaining | | Remaining | | Remaining | | Remaining |
| No. | position | IC₅₀ | avr. | SD | avr. | SD | avr. | SD | avr. |
| 655 | 126 | 15.2 | 19.8 | 6.8 | 26.8 | 6.2 | 42.4 | 4.2 | 61.3 |
| 656 | 131 | 11.9 | 19.4 | 6.5 | 24 | 3.6 | 35.6 | 7.5 | 52.3 |
| 657 | 277 | 13.4 | 26.6 | 2.3 | 30.9 | 7.9 | 40 | 10.6 | 53.9 |
| 658 | 295 | 10.4 | 14.9 | 7.2 | 31 | 14.3 | 39.2 | 8.2 | 60.8 |
| 659 | 445 | 9.6 | 15.9 | 1.7 | 21.5 | 1.9 | 33.2 | 6.3 | 52.6 |
| 660 | 730 | 24.4 | 32.3 | 9 | 39.4 | 8.1 | 50.9 | 10.5 | 65.5 |
| 661 | 736 | 7.7 | 20.9 | 4.6 | 26.4 | 1.8 | 35.2 | 3.6 | 44.9 |
| 662 | 739 | 12.2 | 26.2 | 2.9 | 32.1 | 4.4 | 39.9 | 3.8 | 54.3 |
| 663 | 1328 | 7.7 | 24.5 | 15.8 | 29.7 | 11.2 | 42.7 | 4.6 | 40 |
| 664 | 1516 | 34.2 | 40.6 | 3.5 | 45.7 | 7.2 | 57.7 | 6.2 | 67.2 |
| 665 | 1555 | 25.7 | 34.5 | 7.3 | 42.3 | 5.8 | 50.4 | 11.6 | 65.6 |
| 666 | 1558 | 17.8 | 25.8 | 3.4 | 46.2 | 27.4 | 43 | 5.1 | 56.9 |
| 667 | 1586 | 13.4 | 21.8 | 1.9 | 30.7 | 9.9 | 40.3 | 9 | 54.3 |
| 668 | 1996 | 19 | 29.6 | 7.6 | 32.5 | 5.8 | 48.1 | 10.7 | 60.7 |
| 669 | 2169 | 10.4 | 26.2 | 2.5 | 27.7 | 6.4 | 35.9 | 5 | 45.8 |
| 670 | 2269 | 2.7 | 9.1 | 3.4 | 11.4 | 0.8 | 18.9 | 3.7 | 26.9 |
| 671 | 2274 | 9.9 | 25.6 | 1.8 | 28.1 | 2.4 | 34.7 | 4.5 | 45.1 |
| 672 | 2424 | 12.3 | 23.1 | 8.8 | 28.3 | 8.2 | 37 | 7.8 | 52.1 |
| 673 | 2484 | 6.4 | 17.8 | 0.6 | 18.5 | 1.2 | 26.5 | 5.9 | 37.6 |
| 674 | 2575 | 9.4 | 13.5 | 0.9 | 18.7 | 1.4 | 30.5 | 6.3 | 48.5 |
| 675 | 2576 | 6.7 | 18 | 2.8 | 17.8 | 1.1 | 26.7 | 3.4 | 37.6 |
| 676 | 2592 | 7.1 | 19.5 | 1.7 | 21.3 | 1.3 | 30.8 | 1.4 | 40.5 |
| 677 | 2627 | 15 | 25.2 | 6.9 | 28.1 | 6.8 | 39.2 | 10.5 | 56.4 |
| 678 | 2728 | 12.5 | 21.8 | 3.5 | 28.5 | 6 | 38.3 | 4 | 55.9 |
| 679 | 2731 | 10 | 18 | 6.2 | 24.9 | 6 | 33.1 | 8 | 48 |
| 680 | 2737 | 10.7 | 25.5 | 2.1 | 26.8 | 3.4 | 39 | 3.1 | 50.9 |
| 681 | 2937 | 9.3 | 20.2 | 2 | 22.5 | 1.9 | 35.3 | 3.8 | 46.1 |
| 682 | 3108 | 6.5 | 21.3 | 1.2 | 23.8 | 1.7 | 30.3 | 7 | 40.9 |
| 683 | 3111 | 9.7 | 19.1 | 1.9 | 24 | 1.2 | 29.4 | 2.4 | 53.9 |
| 684 | 3208 | 14.2 | 25.4 | 7.6 | 28.7 | 11.1 | 40.6 | 10.9 | 55.8 |
| 685 | 3209 | 6.6 | 20.4 | 1.6 | 20.2 | 1 | 26.2 | 2.1 | 39.8 |
| 686 | 3210 | 12.2 | 27.3 | 4 | 31.9 | 6.7 | 41.5 | 5.9 | 58.3 |
| 687 | 3254 | 5.8 | 20.6 | 9.3 | 16.9 | 4.6 | 38.6 | 7.4 | 42.6 |
| 688 | 3400 | 13 | 33.2 | 5.7 | 31.1 | 4.9 | 37 | 3.9 | 54.2 |
| 689 | 3401 | 17.7 | 36.3 | 7.3 | 37.8 | 7.6 | 43.2 | 13.7 | 55.4 |
| 690 | 3483 | 10.6 | 29 | 4.1 | 31.2 | 4.4 | 36 | 7.9 | 48.2 |
| 691 | 3484 | 7.8 | 25.5 | 5.3 | 27.8 | 2.4 | 32.4 | 4.7 | 37.4 |
| 692 | 3485 | 12.3 | 31.5 | 3.4 | 34.6 | 8.1 | 39.6 | 7.8 | 47.3 |
| 693 | 3533 | 13.6 | 31.7 | 4.8 | 33.9 | 3.4 | 39.6 | 2.4 | 50.2 |
| 694 | 3597 | 19.1 | 40.8 | 4.1 | 37.5 | 4.9 | 45.2 | 11.2 | 56 |
| 695 | 3654 | 9.1 | 28.2 | 4.5 | 27.8 | 1 | 33.8 | 0.5 | 46 |
| 696 | 3826 | 16.4 | 36.2 | 7.6 | 33.2 | 7 | 39.1 | 5.8 | 53.3 |
| 697 | 4099 | 13.4 | 32.1 | 1.9 | 32.2 | 2.2 | 42.5 | 3.6 | 51 |
| 698 | 4100 | 23.9 | 49.7 | 7.3 | 40.8 | 9.5 | 42.5 | 6.4 | 54.3 |
| 699 | 4102 | 17.6 | 39.9 | 2.7 | 38.6 | 6.2 | 41.8 | 8.8 | 56.3 |
| 700 | 4103 | 13.8 | 40.4 | 4.4 | 35.6 | 1.1 | 41.5 | 3.3 | 49.2 |
| 701 | 4154 | 22.7 | 47.4 | 4.4 | 40.1 | 2.7 | 42 | 3.9 | 57.1 |

| | | | | 5 nM | | SD_2.5 nM | | 1.25 nM | |
|---|---|---|---|---|---|---|---|---|---|
| siRNA | | | 10 nM | Remaining | | Remaining | | Remaining | |
| No. | position | IC₅₀ | SD | avr. | SD | avr. | SD | avr. | SD |
| 655 | 126 | 15.2 | 9.1 | 79 | 5.3 | 78.9 | 7.6 | 86.3 | 18.9 |
| 656 | 131 | 11.9 | 14.9 | 70.2 | 8.4 | 75.8 | 15.3 | 91.2 | 13.3 |
| 657 | 277 | 13.4 | 14.8 | 76 | 6.3 | 70.8 | 9.1 | 72.8 | 14.3 |
| 658 | 295 | 10.4 | 19.3 | 57.4 | 16.1 | 79.8 | 37.7 | 68.3 | 10.8 |
| 659 | 445 | 9.6 | 14.2 | 69.1 | 8.6 | 72.5 | 5.3 | 85.2 | 19.9 |
| 660 | 730 | 24.4 | 14 | 81.1 | 8.4 | 81.8 | 8 | 91.2 | 22.7 |
| 661 | 736 | 7.7 | 3.9 | 53.4 | 4.1 | 67.8 | 5.7 | 76.5 | 14.1 |
| 662 | 739 | 12.2 | 11.4 | 63.1 | 5.9 | 71.9 | 8.8 | 80.3 | 13 |
| 663 | 1328 | 7.7 | 8.8 | 51.7 | 13.9 | 66.4 | 15.1 | 69 | 14.8 |
| 664 | 1516 | 34.2 | 4.7 | 76 | 4.7 | 80.5 | 5.5 | 90.3 | 6.1 |
| 665 | 1555 | 25.7 | 18.2 | 78 | 10.3 | 78.1 | 13 | 87.9 | 18.9 |
| 666 | 1558 | 17.8 | 9.3 | 66.8 | 8.5 | 77.7 | 10 | 86.9 | 20.7 |
| 667 | 1586 | 13.4 | 12.3 | 70.4 | 12.5 | 83 | 19 | 80.3 | 21 |
| 668 | 1996 | 19 | 16.3 | 77.3 | 15.9 | 81.5 | 10.7 | 87.3 | 18.8 |
| 669 | 2169 | 10.4 | 7.9 | 61.1 | 5.6 | 68.6 | 7 | 84.7 | 19.5 |
| 670 | 2269 | 2.7 | 5.2 | 57.2 | 6 | 61.4 | 10.6 | 57.6 | 7.2 |
| 671 | 2274 | 9.9 | 6.3 | 60.5 | 6.1 | 74.5 | 9.1 | 82.3 | 10.5 |
| 672 | 2424 | 12.3 | 16.3 | 67.5 | 7.4 | 76.4 | 6.8 | 87.7 | 19.2 |
| 673 | 2484 | 6.4 | 10.5 | 59 | 6.1 | 68.5 | 17.5 | 70 | 7.1 |
| 674 | 2575 | 9.4 | 8.8 | 74.6 | 9.4 | 76.9 | 8 | 79.7 | 8.2 |
| 675 | 2576 | 6.7 | 4.9 | 56.9 | 3.3 | 66.8 | 11.5 | 82.9 | 14.1 |
| 676 | 2592 | 7.1 | 2.4 | 54.9 | 1.9 | 65.2 | 9.1 | 83.4 | 18 |
| 677 | 2627 | 15 | 14.4 | 77.9 | 13.7 | 80.8 | 13.5 | 87.1 | 16.9 |
| 678 | 2728 | 12.5 | 12 | 67.7 | 14.1 | 75.9 | 6.6 | 88.1 | 18.5 |
| 679 | 2731 | 10 | 8.3 | 66.3 | 5.4 | 75.4 | 4.7 | 80.2 | 20 |
| 680 | 2737 | 10.7 | 12.1 | 66.9 | 7.8 | 73.6 | 11.9 | 73.8 | 11.2 |
| 681 | 2937 | 9.3 | 7.6 | 66.4 | 4.4 | 72.4 | 13.8 | 77.8 | 6.7 |
| 682 | 3108 | 6.5 | 6.8 | 54.6 | 10.9 | 61.4 | 2.2 | 78.1 | 6.7 |
| 683 | 3111 | 9.7 | 9.8 | 67.8 | 6.1 | 73.7 | 4.7 | 79.4 | 7 |
| 684 | 3208 | 14.2 | 24.9 | 66.6 | 12.2 | 81.9 | 14.1 | 89.1 | 28.2 |
| 685 | 3209 | 6.6 | 5.5 | 57 | 5.5 | 67 | 6 | 71.7 | 2.5 |
| 686 | 3210 | 12.2 | 10.7 | 64.8 | 7.1 | 69.9 | 7.9 | 71.9 | 9.1 |
| 687 | 3254 | 5.8 | 10.6 | 49.1 | 13 | 60.7 | 13.9 | 74.1 | 17 |
| 688 | 3400 | 13 | 8.4 | 66.5 | 4.7 | 75.7 | 14.9 | 75.7 | 16.6 |
| 689 | 3401 | 17.7 | 15.6 | 62.1 | 5.6 | 78.1 | 14.9 | 83.7 | 23.3 |
| 690 | 3483 | 10.6 | 6.9 | 63.5 | 2 | 70.4 | 11.5 | 81.4 | 11.3 |
| 691 | 3484 | 7.8 | 3.4 | 52.4 | 5.6 | 73.4 | 9.5 | 76 | 11.9 |
| 692 | 3485 | 12.3 | 6.2 | 65.1 | 5.2 | 70.4 | 5.9 | 77.7 | 14.3 |
| 693 | 3533 | 13.6 | 7.8 | 67.6 | 2.9 | 74.5 | 7.8 | 81 | 11.9 |
| 694 | 3597 | 19.1 | 11.9 | 66 | 6.2 | 74.7 | 15.1 | 75.9 | 5.7 |
| 695 | 3654 | 9.1 | 2 | 58.2 | 1.8 | 68.1 | 6.3 | 80.2 | 17.8 |
| 696 | 3826 | 16.4 | 8.5 | 67 | 6.3 | 79.6 | 17.4 | 98.7 | 29.6 |
| 697 | 4099 | 13.4 | 4.7 | 64.5 | 4.4 | 77 | 17.3 | 73.3 | 6.7 |
| 698 | 4100 | 23.9 | 12.1 | 64 | 6.9 | 82.1 | 8.9 | 98.2 | 32.6 |
| 699 | 4102 | 17.6 | 12.8 | 66.6 | 9 | 73.9 | 18.2 | 71.3 | 6 |
| 700 | 4103 | 13.8 | 6 | 57.9 | 4.2 | 70.9 | 9.6 | 74.7 | 15.1 |
| 701 | 4154 | 22.7 | 10.7 | 65.8 | 7.6 | 73.9 | 7.1 | 87.9 | 16.2 |

[1932] The siRNA sequences were selected using a bioinformatics algorithm to identify antisense strands that are complementary to the human and cynomolgus monkey HMGCR transcripts. In the primary screen, human primary hepatocytes (PHH) in 96-well plates were treated with 10 μM or 0.5 μM GalNAc-conjugated siRNA to facilitate free uptake via the asialoglycoprotein receptor (ASPGR). Forty-eight hours post-treatment, percent remaining HMGCR mRNA, relative to mock-treated (PBS) cells, was measured by a branched DNA assay. The 48 most active siRNAs from this primary screen progressed to full dose response curve analysis using a sensitive reporter assay. To this end, a plasmid expressing HMGCR mRNA upstream of a luciferase reporter cassette was transfected in Hepa 1-6 cells (a murine hepatoma cell line) together with the siRNAs. Percent remaining luciferase activity was then measured 24 hours post-transfection relative to mock-treated cells.

[1933] The active sequences were carried forward for lead optimization, where in the first phase 5 different chemical formats with specific positioning of 2′-Fluoro (2′-F), 2′O-Methyl (2′-OMe) and/or 2′-Deoxy along the antisense and sense strands were tested in each of the 12 siRNAs using a reporter DRC readout. Phosphorothioate (PS) linkages were kept constant, with 6 in total. Chemical characteristics that improved or did not diminish in vitro potency included increased 2′-OMe content and reduced 2′-F content. In this optimized 2′-F/2′OMe format, all 12 sequences were next characterized for their target specificity by transcriptome-wide analysis using RNA sequencing (RNA-Seq).

[1934] Briefly, siRNAs were transfected into Hep3B cells (a human hepatoma cell line) at a concentration of 20 nM using RNAiMax, and differential gene expression relative to mock-treated (PBS+RNAiMax) cells was calculated 24 hours post-treatment. The selected sequences were shown to be highly specific, with no gene other than its target, HMGCR, showing significant regulation.

[1935] The additional optimization led to siRNA sequences of Table 4 or Compounds in Table 5. For example, Compound 1 exhibited an in vitro potency of IC₅₀=3.4 μM. In human liver cell lines, Compound 1 significantly reduces HMGCR mRNA and protein concentrations, while it increases LDLR mRNA and protein levels.

### Example 9: Pharmacology of HMGCR siRNA in Animal Models

[1936] Increased hepatic LDLR density and, in turn, enhanced clearance of LDL from the circulation, is observed with statin treatment; thus, it is anticipated that Compound 1 will similarly reduce plasma LDL levels in humans.

9.1 In Vivo in Chimeric Mice with Humanized Liver

[1937] Consistent with this hypothesis, Compound 1 reduced plasma total cholesterol concentrations by >50% through day 34 in a chimeric mouse model with humanized liver.

[1938] Compound 1 was evaluated in chimeric mice engrafted with primary human hepatocytes. Similar to humans, the majority of plasma cholesterol in this model is carried in LDL and not in HDL as is the case for mice. Male mice were administered a single subcutaneous dose of Compound 1 at 3 mg/kg or PBS (n=4 per group), and blood samples were collected through day 56 for the measurement of total plasma cholesterol. On day 56, livers were harvested for the determination of HMGCR mRNA abundance and RISC-loading. As shown in FIGS. 8A-8B a single 3 mg/kg dose of Compound 1 reduced plasma cholesterol versus baseline by >50% through day 34. Plasma total cholesterol levels were reduced in all mice treated with Compound 1, with 3 of 4 mice having maximum reductions >50%. Liver HMGCR mRNA levels 56 days post-dose did not differ between the PBS and Compound 1 groups, with mean values of 4.0+1.7 and 4.1+1.8, respectively, relative to the house-keeping gene (TATA-binding protein). Consistent with the lack of mRNA reduction seen at day 56 post—dose, RISC-loading for Compound 1 was very low (0.11+0.06 ng siRNA/g tissue).

### 9.2 Pharmacology of Compound 1 in Cynomolgus Monkeys

[1939] The pharmacodynamic effects of a single 10 mg/kg subcutaneous dose of Compound 1 were evaluated in male cynomolgus monkeys (n=4 per group). Liver biopsy samples were obtained 21 days post-dose to enable the measurement of liver HMGCR mRNA abundance, total liver siRNA levels, and incorporation of the guide strand of Compound 1 into RISC. Compound 1 reduced liver HMGCR mRNA abundance by a mean of 63% (P<0.001) when compared to vehicle (sterile saline). The magnitude of mRNA reduction was similar among the 4 animals, ranging from −55% to −74%. Mean liver siRNA and RISC-loading values 21 days post-dose were 127100±90529 and 17.4±12.1 ng siRNA/g tissue, respectively. These results show that a single 10 mg/kg dose of Compound 1 elicits a significant pharmacodynamic response in cynomolgus monkeys.

[1940] Compound 1's impact on the magnitude and durability of liver HMGCR mRNA knockdown was assessed in male cynomolgus monkeys. On days 1 and 35, animals received Compound 1 at 5 or 10 mg/kg (n=4 per group) via subcutaneous injection. Liver biopsy samples were obtained at pre-dose (day −12) and two post-dose timepoints (days 28 and 85 after the first dose) to enable the measurement of liver HMGCR mRNA abundance, total liver siRNA levels, and incorporation of the guide strand of Compound 1 into RISC. In animals administered Compound 1 at 5 mg/kg, hepatic HMGCR mRNA abundance at day 28 was reduced by 54% (P<0.0003) versus pre-dose (FIGS. 9A-9B), with a similar magnitude of target knockdown (KD) observed on day 85 (−49%, P<0.05), 50 days after administration of a second Compound 1 dose. As shown in FIGS. 9A-9B, Compound 1 did not reduce liver HMGCR mRNA abundance in a dose-dependent manner, with animals in the 10 mg/kg group showing relatively inferior HMGCR KD versus pre-dose compared to animals in the 5 mg/kg group at both day 28 (−43%, P<0.05) and 85 (−16%, P=NS).

[1941] In contrast to the HMGCR mRNA results, where dose-dependency was not observed for animals administered Compound 1, dose-dependency was seen for liver total siRNA concentrations and RISC-loading. Mean liver siRNA concentrations (ng siRNA/g tissue) for the Compound 1 5 and 10 mg/kg groups were 10300±4600 and 15900±3100, respectively, on day 28 post-dose, with corresponding values of 16000±5900 and 43700±24000 on day 85 post initial dose. Mean RISC-loading values (ng siRNA/g tissue) at day 28 post-dose were 3.4±1.4 and 10.3±2.2 for the Compound 1 5 and 10 mg/kg groups, respectively, with corresponding values of 13.9±9.3 and 27.3±10.9 for day 85 post-dose. Greater RISC-loading was observed after two doses (day 85) versus a single dose (day 28) of siRNA had been given.

[1942] As expected, Compound 1 did not significantly alter serum cholesterol levels in this study (data not shown); however, it should be noted that the magnitude of HDL cholesterol reduction observed in the Compound 1 10 mg/kg group (−25%; FIG. 10) is on par with that of −28% reported for male cynomolgus monkeys treated with high dose atorvastatin for 85 days, In summary, Compound 1 at 5 or 10 mg/kg reduced mean hepatic HMGCR mRNA abundance versus pre-dose at both day 28 and 85; however, only the Compound 1, 5 mg/kg group showed statistically significant reductions in target knockdown at both timepoints.

### Example 10: In Vitro Comparison

### 10.1 Methods

[1943] Sample siRNAs tested in Example 10 are listed in Table 10. Specific codes in the nucleotide sequences are indicated in above, e.g., Tables A and A-1.

TABLE 10

| | position | | SEQ | | SEQ |
|---|---|---|---|---|---|
| | in | Sense Strand | ID | Antisense strand | ID |
| siRNA | mRNA | Sense Strand (modified) | NO | Antisense Strand (modified) | NO |
| S1 | 127 | GUUGUCAAGACUUUUUCGAAU | 1404 | AUUCGAAAAAGUCUUGACAACAU | 1419 |
| | | G004p001U004p001U004pG004 | 1405 | A004p001U007p001U004pC004p | 1420 |
| | | pU004pC004pA007pA004pG007 | | G004pA007pA004pA007pA007pA | |
| | | pA007pC007pU004pU004pU004 | | 004pG004pU004pC004pU007pU0 | |
| | | pU004pU004pC004pG004pA004 | | 04pG007pA004pC004pA004pA00 | |
| | | pA004pU004pX2000 | | 4pC004p001A004p001U004 | |
| S2 | 127 | GUUGUCAAGACUUUUUCGAAA | 1406 | UUUCGAAAAAGUCUUGACAAC | 1421 |
| | | G004p001U004p001U004pG004 | 1407 | U004p001U007p001U004pC004p | 1422 |
| | | pU004pC004pA004pA004pG007 | | G004pA004pA007pA004pA004pA | |
| | | pA004pC007pU004pU007pU004 | | 004pG004pU007pC004pU007pU0 | |
| | | pU004pU004pC004pG004pA004 | | 04pG007pA004pC004pA004p001 | |
| | | pA004p001A004pX2000 | | A004p001C004 | |
| S3 | 129 | UGUCAAGACUUUUUCGAAUGA | 1408 | UCAUUCGAAAAAGUCUUGACA | 1423 |
| | | U004p001G004p001U004pC004 | 1409 | U004p001C007p001A004pU004p | 1424 |
| | | pA004pA004pG004pA004pC007 | | U004pC004pG007pA004pA004pA | |
| | | pU004pU007pU004pU007pU004 | | 004pA004pA007pG004pU007pC0 | |
| | | pC004pG004pA004pA004pU004 | | 04pU007pU004pG004pA004p001 | |
| | | pG004p001A004pX2000 | | C004p001A004 | |
| S4 | 124 | AAUGUUGUCAAGACUUUUUCA | 1410 | UGAAAAAGUCUUGACAACAUU | 1425 |
| | | A004p001A004p001U004pG004 | 1411 | U004p001G007p001A004pA004p | 1426 |
| | | pU004pU004pG004pU004pC007 | | A004pA004pA007pG004pU004pC | |
| | | pA004pA007pG004pA007pC004 | | 004pU004pU007pG004pA007pC0 | |
| | | pU004pU004pU004pU004pU004 | | 04pA007pA004pC004pA004p001 | |
| | | p001C004p001A004pX2000 | | U004p001U004 | |
| S5 | 125 | AUGUUGUCAAGACUUUUUCGA | 1412 | UCGAAAAAGUCUUGACAACAU | 1427 |
| | | A004p001U004p001G004pU004 | 1413 | U004p001C007p001G004pA004p | 1428 |
| | | pU004pG004pU004pC004pA007 | | A004pA004pA007pA004pG004pU | |
| | | pA004pG007pA004pC007pU004 | | 004pC004pU007pU004pG007pA0 | |
| | | pU004pU004pU004pU004pC004 | | 04pC007pA004pA004pC004p001 | |
| | | p001G004p001A004pX2000 | | A004p001U004 | |
| S6 | 126 | UGUUGUCAAGACUUUUUCGAA | 1414 | UUCGAAAAAGUCUUGACAACA | 1429 |
| | | U004p001G004p001U004pU004 | 1415 | U004p001U007p001C004pG004p | 1430 |
| | | pG004pU004pC004pA004pA007 | | A004pA004pA007pA004pA004pG | |
| | | pG004pA007pC004pU007pU004 | | 004pU004pC007pU004pU007pG0 | |
| | | pU004pU004pU004pC004pG004 | | 04pA007pC004pA004pA004p001 | |
| | | p001A004p001A004pX2000 | | C004p001A004 | |
| S7 | 123 | GAAUGUUGUCAAGACUUUUUA | 1416 | UAAAAAGUCUUGACAACAUUC | 1431 |
| | | G004p001A004p001A004pU004 | 1417 | U004p001A007p001A004pA004p | 1432 |
| | | pG004pU004pU004pG004pU007 | | A004pA004pG007pU004pC004pU | |
| | | pC004pA007pA004pG007pA004 | | 004pU004pG007pA004pC007pA0 | |
| | | pC004pU004pU004pU004pU004 | | 04pA007pC004pA004pU004p001 | |
| | | p001U004p001A004pX2000 | | U004p001C004 | |
| S8 | 126 | UGUUGUCAAGACUUUUUCGAA | 3 | UUCGAAAAAGUCUUGACAACAUU | 408 |
| | | T005p001G005p001U004pU004 | 1418 | X033U1027p001U007p001C004p | 1433 |
| | | pG004pU004pC007pA004pA007 | | G004pA004pA007pA004pA004pA | |
| | | pG007pA007pC004pU004pU004 | | 004pG004pU004pC004pU004pU0 | |
| | | pU004pU004pU004pC004pG004 | | 07pG004pA007pC004pA004pA00 | |
| | | pA005pA005px2000 | | 4pC004pA004p001U004p001U00 | |
| | | | | 4 | |
| S9 | 126 | UGUUGUCAAGACUUUUUCGAA | 3 | UUCGAAAAAGUCUUGACAACAUU | 408 |
| | | T005p001G005p001U004pU004 | 1302 | X033U1027p001U007p001C004p | 1306 |
| | | pG004pU004pC007pA004pA007 | | G004pA004pA007pA004pA004pA | |
| | | pG007pA007pC004pU004pU004 | | 004pG004pU004pC004pU004pU0 | |
| | | pU004pU004pU004pC004pG004 | | 07pG004pA007pC004pA004pA00 | |
| | | pA005pA005px1085 | | 4pC004pA004p001U004p001U00 | |
| | | | | 4 | |

### 10.1.1 Cell Culture

[1944] The human hepatoma Hep3B cell line was obtained from ATCC (cat #HB-8064). Hep3B cells are cultured in EMEM with L-Glut (ATCC 30-2003)+10% FBS medium (heat inactivated). At confluence, the cells were detached with a 2- to 5-min incubation at 37° C. in a Trypsin/EDTA solution (Sigma, cat. T3924) and passaged at a split ratio of 1:4. The medium was renewed every three days. Hepa 1-6 cells (ATCC, cat #CRL-1830), a murine hepatoma cell line, were cultured in DMEM (Gibco Cat.10313021)+1% L-Glut (Gibco, Cat.25030081)+10% FBS (Gibco, cat #A5256701) medium at 37° C. with 5% CO2. At confluence, the cells were detached with a 2-5 min incubation with 0.25% Trypsin/EDTA (Gibco, cat #25200056) and passaged at a split ratio of 1:3.

### 10.1.2 Luciferase Reporter Assay

[1945] Hepa-1-6 cells were seeded at 15,000 cells/well in a 96-well plate. At the same time, 100ng/well of reporter plasmid contain human HMGCR mRNA combined with an siRNA at a given concentration were transfected with lipofecamine (Invitrogen, Lipofectamine 2000, cat #11668500). 24 hrs post-transfection, cells were lysed, and luciferase activity was measured based on manufacturer protocol (Promega, DualGlow, cat #E2910). Luciferase signal got normalized to renilla signal to calculate % remaining luciferase. Plasmid herein used were either TR030, which contains HMGCR mRNA form 1-2452 (NM_000859) or TR029 plasmid containing the targeting site for siRNA Sample 9 and others with each a flanking region of 50 bases up- and downstream.

10.1.3 qPCR

[1946] Hep3B cells were seeded at 30,000 cells/well in a 96-well plate. Cells were treated simultaneously with siRNA in an 8-step dose response starting at 40 nM in a 1:6 dilution factor.

24 hrs post-transfection cells were lysed using Fast Lane kit (Qiagen, Cat: 204845) as qPCR was performed as described by manufacturer protocol using HMGCR primer (Thermofisher, Cat: Hs00168352_m1) and for housekeeping PGK1 (Thermofisher, Cat: Hs99999906_m1) to calculate fold change by delta delta CT method.

### 10.2 Results

### 10.2.1 Dose Response Curve in Hep3B Cells

[1947] A set of nine siRNAs (S1-S9) was tested for potency in an immortalized hepatoma cell line (Hep3) using lipid-mediated transfection as these cells do not express the receptor ASGPR that would enable GalNAc-mediated uptake. In order to characterize IC₅₀, a dose response for all nine siRNA was done and HMGCR mRNA levels were determined by RT-qPCR 24 hrs post-transfection (FIG. 11). S1-S8 all carry the same GalNAc. Among them, S8 demonstrated the lowest IC₅₀ (0.00835), indicating that S8 is most effective in their potency to lower HMGCR mRNA levels. This is consistent with area under the curve (AUC) from the dose response curves (DRC) S8=0.2013. At the concentration of 0.18 nM, where S8 still achieves maximum inhibition, the delta in terms of % remaining HMGCR mRNA levels is most pronounced (Table 11). Maximum inhibition values as displayed in Table 11 are irrespective of concentrations.

TABLE 11
IC₅₀, AUC and max. inhibition values
from Hep3B does response curve

| | | | max. | % remaining mRNA |
|---|---|---|---|---|
| Sample ID | IC₅₀ (nM) | AUC | inhib. [%] | (0.18 nM) |
| S1 | 0.031644 | 0.233774 | 79.216 | 27.952 |
| S2 | 0.009125 | 0.284179 | 71.235 | 31.618 |
| S3 | 3.959853 | 0.290596 | 78.713 | 41.421 |
| S4 | 0.101888 | 0.316848 | 75.652 | 37.482 |
| S5 | 0.167659 | 0.349543 | 69.033 | 44.624 |
| S6 | 0.058659 | 0.229060 | 78.678 | 32.941 |
| S7 | 0.217291 | 0.261891 | 77.241 | 50.779 |
| S8 | 0.00835 | 0.201322 | 79.388 | 23.382 |
| S9 | 0.016668 | 0.194750 | 80.816 | 25.292 |

### 10.2.2 Dose Response Curve Using a Reporter Assay

[1948] To confirm the results as observed in Hep3B, where S8 und S9 were the most active siRNAs, an independent assay was established to assess activity of siRNAs S1-S9. To this end, HMGCR mRNA from position 1-2452 (NM_000859, e.g., SEQ ID NO: 811 (human HMGCR isoform, transcript variant 1, mRNA (GenBank: NM_000859.3)) was cloned downstream of a luciferase reporter cassette in a plasmid. Co-transfection of this plasmid with siRNA S1-59 in a dose-dependent manner confirmed the observations in Hep3B cells, where S8 and S9 were most active (FIG. 12). S8 that has the matching GalNAc to S1-57, rose to the top again with an IC₅₀ value=0.005320 nM (Table 12). Although maximum inhibition for all tested siRNAs was very comparable, S8 and S9 still achieved maximum luciferase repression at 1.086 nM compared to S1 to S7 (Table 12).

TABLE 12
IC₅₀, AUC and max. inhibition values
from reporter assay in Hepa-1-6 cells

| Sample | | | max. | % remaining luciferase |
|---|---|---|---|---|
| ID | IC₅₀ (nM) | AUC | inhib. [%] | (1.086 nM) |
| S1 | 0.022436 | 0.034901052 | 97.460 | 3.018 |
| S2 | 0.015888 | 0.027642447 | 97.087 | 3.729 |
| S3 | 0.085223 | 0.068634754 | 96.367 | 7.617 |
| S4 | 0.050911 | 0.080424185 | 94.544 | 8.330 |
| S5 | 0.424173 | 0.288725907 | 80.662 | 37.192 |
| S6 | 0.059638 | 0.068209618 | 95.783 | 6.874 |
| S7 | 0.096148 | 0.130199048 | 90.366 | 13.404 |
| S8 | 0.005320 | 0.032591102 | 97.381 | 2.653 |
| S9 | 0.012704 | 0.030741005 | 97.543 | 2.545 |

[1949] This result of plasmid TR030 could be further confirmed in another reporter plasmid (TR029), that only contains the binding sites, such as the one from S8 and S9 with a flanking region of 50 nucleotides upstream and downstream to also enable binding of S1 to S7 siRNAs. As previously described for TR030, also TR029 was co-transfected with respective siRNA in Hepa-1-6 cells. The overall ranking of the experiment in TR029 is the same as previously observed for TR030. S8 rose once again to the top with an IC₅₀ of 0.003896 nM (Table 13). Furthermore, differences in potency could be observed at 0.181 nM, where S8 and S9 still achieve maximum repression of luciferase signal, but not siRNAs S1 to S7 (Table 13).

TABLE 13
IC₅₀, AUC and max. inhibition values
from reporter assay in Hepa-1-6 cells

| Sample | | | max. inhib. | % remaining luciferase |
|---|---|---|---|---|
| ID | IC₅₀ (nM) | AUC | [%] | (0.181 nM) |
| S1 | 0.011523 | 0.02273 | 98.958 | 5.931 |
| S2 | 0.011253 | 0.018336 | 98.907 | 6.014 |
| S3 | 0.043469 | 0.044469 | 98.052 | 18.181 |
| S4 | 0.039048 | 0.05676 | 96.908 | 20.323 |
| S5 | 0.184495 | 0.334289 | 74.679 | 66.325 |
| S6 | 0.023317 | 0.046287 | 98.399 | 14.718 |
| S7 | 0.054763 | 0.079133 | 95.300 | 26.864 |
| S8 | 0.003896 | 0.011732 | 98.944 | 1.958 |
| S9 | 0.005801 | 0.009271 | 98.997 | 2.406 |

### Example 11: Introduction of TNA Clamps on Sense Strand of siRNA

### 11.1 Methods

[1950] Sample siRNAs tested in Example 11 are listed in Table 14 and prepared as described above.

TABLE 14

| | position | | SEQ | | SEQ |
|---|---|---|---|---|---|
| | in | | ID | | ID |
| siRNA | mRNA | Sense Strand | NO: | Antisense Strand | NO: |
| No1 | 2576 | T005p001T005p001G004pC00 | 1483 | X033U1027p001U007p001G004p | 1299 |
| | | 4pA004pG004pA007pU004pG0 | | A004pA004pC007pA004pC004pC | |
| | | 07pC007pU007pA004pG004pG | | 004pU004pA004pG004pC004pA0 | |
| | | 004pU004pG004pU004pU004p | | 07pU004pC007pU004pG004pC00 | |
| | | C004pA005pA005pX2000 | | 4pA004pA004p001A004p001C00 | |
| | | | | 4 | |
| No2 | 2576 | T005p001T005p001G004pC00 | 1484 | X033U1027p001U007p001G004p | 1299 |
| | | 4pA004pG004pA007pU004pG0 | | A004pA004pC007pA004pC004pC | |
| | | 07pC007pU007pA004pG004pG | | 004pU004pA004pG004pC004pA0 | |
| | | 004pU004pG004pU004pU004p | | 07pU004pC007pU004pG004pC00 | |
| | | C004p001A005p001A005px20 | | 4pA004pA004p001A004p001C00 | |
| | | 00 | | 4 | |
| No3 | 2576 | U042p001U042p001G004pC00 | 1485 | X033U1027p001U007p001G004p | 1299 |
| | | 4pA004pG004pA007pU004pG0 | | A004pA004pC007pA004pC004pC | |
| | | 07pC007pU007pA004pG004pG | | 004pU004pA004pG004pC004pA0 | |
| | | 004pU004pG004pU004pU004p | | 07pU004pC007pU004pG004pC00 | |
| | | C004pA042pA042pX2000 | | 4pA004pA004p001A004p001C00 | |
| | | | | 4 | |
| No4 | 2576 | U042p001U042p001G004pC00 | 1486 | X033U1027p001U007p001G004p | 1299 |
| | | 4pA004pG004pA007pU004pG0 | | A004pA004pC007pA004pC004pC | |
| | | 07pC007pU007pA004pG004pG | | 004pU004pA004pG004pC004pA0 | |
| | | 004pU004pG004pU004pU004p | | 07pU004pC007pU004pG004pC00 | |
| | | C004pA042p001A042p001X20 | | 4pA004pA004p001A004p001C00 | |
| | | 00 | | 4 | |
| No5 | 2576 | U004p001U004p001G004pC00 | 1487 | X033U1027p001U007p001G004p | 1299 |
| | | 4pA004pG004pA007pU004pG0 | | A004pA004pC007pA004pC004pC | |
| | | 07pC007pU007pA004pG004pG | | 004pU004pA004pG004pC004pA0 | |
| | | 004pU004pG004pU004pU004p | | 07pU004pC007pU004pG004pC00 | |
| | | C004pA004pA004pX2000 | | 4pA004pA004p001A004p001C00 | |
| | | | | 4 | |

### 11.2 Animals and Experimental Design

### 11.2.1 Maintenance Conditions

[1951] All mice were received at 10 weeks of age and acclimated for at least 3 days prior to experimentation. Animals were maintained on a 12 hour light/dark cycle at 70° F. and 50% humidity, provided water and food ad libitum.

### 11.2.2 Statement on Animal Welfare

[1952] Studies described were performed according to an institutional Animal Care and Use Committee (ACUC) approved protocol. All mice were maintained in our pathogen-free and viral-free institutional housing facilities and were sacrificed by CO2 asphyxiation, and confirmed by thoracotomy, as approved by the panel on Euthanasia at the American Veterinary Association, and in the above referenced ACUC protocol.

### 11.2.3 Study Protocol

[1953] Male, 10-week-old C57BL/6J mice (Jackson Laboratories, Bar Harbor, ME) were fed a western diet (Research Diets, 12079Bi) for 21 days prior to initiation of the study. On day 0 of the study, body weight data was collected for all animals. Mice were mechanically restrained, and 25 μL of baseline blood was collected via tail snip into EDTA-K2 treated microvette tubes (Sarstedt AG, Sarstedt, Germany) stored on ice. Blood samples were centrifuged at 16,000 g, 4° C. for 10 minutes, with resulting plasma aliquoted and frozen at −80° C. for subsequent measurement of total cholesterol levels.

[1954] Each mouse was then given a single subcutaneous (SC) dose of either sterile PBS (10 mL/kg) or siRNA (3 mg/kg) formulated in PBS. Each group of three or four mice received PBS control or siRNAs (No1, No2, No3, No4, and No5). Each week, for 6 weeks, animals from each of the PBS and treatment groups receiving the siRNAs (No1, No2, No3, No4, and No5) were euthanized, while, and each week, 25 μL of blood was collected via tail snip for all mice remaining in the study, for measuring of total cholesterol in the resulting plasma. Each week, designated mice were euthanized via CO₂ asphyxiation and terminal blood samples were collected via cardiac puncture using a 1 mL syringe and 25-gauge needle. After removing the needle, blood was ejected from the syringe into an EDTA-K2 treated tube (Sarstedt AG, Sarstedt, Germany) stored on ice and processed as described above with plasma being assayed for total cholesterol levels. The abdomen was then opened, the left lobe of liver excised and (4) 50-75 mg pieces of liver tissue were placed into individual 2 mL Eppendorf tubes, before being frozen on dry ice and stored at −80° C. until analysis.

11.2.4 Determination of Liver HMGCR mRNA Abundance by RT-PCR

[1955] Liver RNA extraction was performed using RNeasy lipid mini kit protocol (Qiagen, Germany). Briefly, a 50 mg piece of frozen liver was lysed and homogenized using a Tissue Lyser II (Qiagen, Germany) with one stainless steel bead and Qiazol lysis reagent (Qiagen, Germany). Next, chloroform was added, and phases were separated. RNA was bound, washed, and eluted from RNEasy mini spin columns. The optional on column DNase digestion was performed using the RNase free DNase set (Qiagen, Germany). A total of 40 μL of RNA was eluted from each sample. RNA samples were quantified using NanoDrop 2000 (ThermoFisher, Waltham MA). Quantified RNA samples were diluted and then reverse transcribed using SuperScript Vilo Master mix (ThermoFisher, Waltham MA). Taqman qPCR was performed with the cDNA samples using Taqman gene expression assays Rn00565598_m1 and Rn01455646_m1 (ThermoFisher, Waltham MA).

11.2.5 Incorporation of Guide Strand into Liver RNA-Silencing Complex

### Tissue Lysis:

[1956] Each frozen tissue piece provided in screw cap cryo tube was transferred to a 2 mL round bottom microcentrifuge tube that was pre-chilled on dry ice. One dry ice pre-chilled 5 mm stainless steel bead (Qiagen, Germany) was added to the tube containing the frozen tissue. In the cold room, sample tubes were quickly removed from dry ice and added to each tube 1 mL of ice-cold Lysis buffer (50 mM Tris-HCl pH 7.5, 150 mM NaCl, 2 mM EDTA, 0.5% Triton X-100, 1 mM PMSF, 1×EDTA-free protease inhibitor cocktail). Immediately, tissue was lysed with TissueLyser LT (Qiagen, Germany) for 5 min at 50 Hz in cold room. Lysate was then cleared at 20000×g, 10 min, 4° C., and the soluble lysate supernatants were kept on ice. The protein concentration of the soluble lysate for each sample was determined using BCA assay (ThermoFisher, Waltham MA) according to manufacturer's protocol.

### Argonaute 2 Immunoprecipitation (IP):

[1957] Dynabead Protein G (ThermoFisher, Waltham MA) was washed with Wash buffer (50 mM Tris-HCl pH 7.5, 150 mM NaCl, 2 mM EDTA, 0.5% Triton X-100) prior to use for IP, and 50 μL of bead slurry was used per sample. Mouse argonaute2 (Ago2) antibody (FUJIFILM Wako Chemicals, Richmond VA) was pre-bound to beads in wash buffer at 4° C., for 2 h on rotating mixer (200 ng antibody used per 50 μL bead slurry). After incubation, the Ago2 antibody-bound beads were washed with Wash buffer, and 50 μL of the suspension was distributed to a 1.5 mL microcentrifuge tube per sample. For each sample, Ago2 antibody-bound beads were incubated with 500 μg soluble tissue lysate in lysis buffer at final volume of 250 μL per sample at 4° C., overnight on rotating mixer. After incubation, beads in each tube were washed 5 times with 1 mL ice cold Wash buffer. Final resuspension of beads was with 50 μL PBST (phosphate buffered saline pH 7.4, 0.25% Triton X-100) per sample. siRNAs were released from bead by heating at 95° C., 5 min. Ago2 TP eluate supernatants were recovered and kept on ice on the same day or stored at −80° C. until the subsequent stem loop-reverse transcription quantitative polymerase chain reaction (SL-RT-qPCR) step.

siRNA Standard Preparation:

[1958] siRNA was first diluted to a working stock of 10 ng/μL in H2O, then further diluted 100-fold to 100 ng/mL in PBST. siRNA standards were prepared by 10-fold serial dilution from 100 ng/mL to 0.00001 ng/mL in PBST.

### Stem Loop-Reverse Transcription Quantitative Polymerase Chain Reaction (SL-RT-qPCR):

[1959] For SL-RT-qPCR, Custom Small RNA Assay (4398987, ThermoFisher, Waltham MA) containing a set of SL-RT primer and Taqman qPCR primer against guide strand sequence was designed and ordered and cDNA was generated following manufacturer's protocol of the Taqman MicroRNA Reverse Transcription Kit (ThermoFisher, Waltham MA), using 5 μL of Ago2 IP eluate or 5 μL siRNA standard. The cDNA generated (15 μL reaction) were then diluted with 75 μL H2O prior to usage for qPCR step. qPCR was performed following manufacturer's protocol for TaqMan™ Fast Advanced Master Mix (ThermoFisher, Waltham MA), using 4 μL of the diluted cDNA.

### Calculations:

[1960] An siRNA standard curve was generated by plotting Ct values (Y) versus siRNA concentration (X) in log scale using GraphPad Prism (version 9.4.1), followed by semi-log line fitting to determine slope and y-intercept values. siRNA concentration for each sample was calculated using the obtained Ct value and the determined slope and y-intercept values.
[1961] ng siRNA=[siRNA]×Ago2 IP elution volume (50 μL)
[1962] ng siRNA per g soluble lysate protein=ng siRNA per 500 μg (amount used in Ago2 IP)

[1963] Data analysis: Statistical significance was determined by ordinary one-way ANOVA and Dunnett's multiple comparisons test using GraphPad Prism software (version 9.4.1).

### 11.3 Results

[1964] Consistent with the results in Example 4, siRNA Nol containing MOE clamps showed stronger HMGCR mRNA silencing effect than the siRNA No5 without MOE clamps at Day 35 (FIG. 14A). Likewise, siRNA Nol with MOE clamps showed increased higher RISC loading compared to siRNA No5 (FIG. 14B).

[1965] In addition, when the 2′-MOE clamps were replaced with TNA clamps in the same sequence (siRNA No3 and No4), similar HMGCR silencing effects were shown in both Day 10 and Day 42 compared to siRNAs Nol and No2 (FIG. 15A). siRNAs with TNA clamps (No3 and No4) also showed comparable RISC-loading as MOE clamps (siRNAs Nol and No2) in Day 42 (FIG. 15B).

### Example 12: Additional HMGCR siRNAs Tested In Vitro

### 12.1 Methods

[1966] Sample siRNAs tested in Example 12 are prepared as described above (e.g., Example 1). The siRNA agents in Tables 15-16 were conjugated with X2000 ligand, and specifically, each 3′-end of the sense strand of each siRNA was conjugated to the XC2000 ligand via phosphodiester linkage.

### 12.1.1 Luciferase Reporter Assay

[1967] Hepa-1-6 cells were seeded at 20,000 cells/well in a 96-well plate. At the same time, 100ng/well of reporter plasmid were transfected; the reporter plasmids containing part of HMGCR (1-2438 or 2251-4530 for human HMGCR NCBI NM_000859.3). The reporter plasmid was co-transfected with siRNA 7-point dose response, starting at 6.7 nM with a dilution factor of 1:6 using lipofecamine (Invitrogen, Lipofectamine 2000, cat #11668500). 24 hrs post-transfection, cells were lysed, and luciferase activity was measured based on the manufacturer's protocol (Promega, DualGlow, cat #E2910). The luciferase signal was normalized to Firefly signal to calculate 00 remaining luciferase.

### 12.2 Results

[1968] HMGCR siRNAs in Table 15 were tested using the luciferase reporter assay described above and IC50, max. inhibition values and AUC from reporter assay in Hepa-1-6 cells are shown (Table 15).

TABLE 15
IC50, max. inhibition values and AUC
from reporter assay in Hepa-1-6 cells

| | | | | max. |
|---|---|---|---|---|
| siRNA | position | IC50 (nM) | AUC | inhib. [%] |
| 709 | 110 | 0.004296 | 0.0255745 | 97.713 |
| 710 | 111 | 0.006191 | 0.0293495 | 97.463 |
| 712 | 115 | 0.002148 | 0.0295688 | 96.623 |
| 711 | 115 | 0.003058 | 0.0387679 | 96.806 |
| 727 | 115 | 0.003682 | 0.0348478 | 96.992 |
| 713 | 126 | 0.002640 | 0.0266422 | 97.717 |
| 729 | 126 | 0.003042 | 0.0295515 | 96.906 |
| 647 | 126 | 0.005300 | 0.0247178 | 97.434 |
| 728 | 2835 | 0.006231 | 0.0646743 | 94.267 |
| 717 | 2835 | 0.008409 | 0.0722428 | 94.024 |
| 716 | 2835 | 0.016019 | 0.0876096 | 93.002 |
| 714 | 2843 | 0.020361 | 0.0919948 | 92.960 |
| 730 | 2843 | 0.024391 | 0.0945989 | 93.228 |
| 715 | 2843 | 0.030010 | 0.0936334 | 92.498 |
| 720 | 3277 | 0.004929 | 0.0845796 | 93.216 |
| 731 | 3277 | 0.004950 | 0.0740606 | 94.342 |
| 718 | 3277 | 0.004987 | 0.0763132 | 94.409 |
| 722 | 3418 | 0.007055 | 0.1014623 | 93.751 |
| 732 | 3418 | 0.009877 | 0.0780560 | 93.745 |
| 721 | 3418 | 0.030652 | 0.0836624 | 92.941 |

[1969] Among others, dose dependent the luciferase reporter assay for siRNAs targeting position 115 and 2835 (listed in Table 16) are shown in FIGS. 16 and 17, respectively.

TABLE 16
Compound list in FIGS. 16 and 17

| | | Sequence | |
|---|---|---|---|
| Compound | | Sense Strand | |
| No. | position | Antisense Strand | Ligand |
| 10 | 126 | SEQ ID NO: 1294 | X2000 |
| | | SEQ ID NO: 1298 | |
| 11 | 115 | SEQ ID NO: 1450 | X2000 |
| | | SEQ ID NO: 1465 | |
| 12 | 115 | SEQ ID NO: 1451 | X2000 |
| | | SEQ ID NO: 1466 | |
| 13 | 115 | SEQ ID NO: 1451 | X2000 |
| | | SEQ ID NO: 2600 | |
| 14 | 2835 | SEQ ID NO: 1455 | X2000 |
| | | SEQ ID NO: 1470 | |
| 15 | 2835 | SEQ ID NO: 1456 | X2000 |
| | | SEQ ID NO: 1471 | |
| 16 | 2835 | SEQ ID NO: 1456 | X2000 |
| | | SEQ ID NO: 2601 | |

[1970] As shown in Table 15 and FIGS. 16-17, siRNAs described herein (e.g., Compounds 11 to 16) targeting positions 115 and 2835 of HMGCR mRNA exhibited similar inhibition of HMGCR expression levels as Compound 10 targeting position 126 of HMGCR mRNA. Therefore, they can be potential dsRNAi agents for inhibiting HMGCR expression.

### Example 13: Combination Therapy with Inclisiran

[1971] Male cynomolgus monkeys (n=10) were administered a single 3 mg/kg subcutaneous (SC) dose of inclisiran on Day 0. On Day 21 after the inclisiran dose, animals were separated into two groups. One group received a single 5 mg/kg SC dose of an HMGCR siRNA of Table 4 (Compound 1) (n=6), while the other group received a single dose of PBS. Blood samples were collected at multiple times prior to Day 0 and weekly thereafter through Day 77 for the determination of plasma low density lipoprotein (LDL-C) levels. Data are expressed as a percent change in plasma LDL-C versus the group that received inclisiran on Day 0 and PBS on Day 21. Animals in the group that received inclisiran on Day 0 and the HMGCR siRNA on Day 21 showed a nearly 40% further reduction in plasma LDL-C concentrations compared with animals on a background of inclisiran that received PBS on Day 21.

The application's sequence listing, which the Patent Office published only in electronic form, follows.

SEQUENCE LISTING (2613 sequences)

SEQ ID NO: 1 - RNA, 21 nt, synthetic construct
  source 1..21: mol_type = other RNA
acaatgttgtcaagacttttt

SEQ ID NO: 2 - RNA, 21 nt, synthetic construct
  source 1..21: mol_type = other RNA
atgttgtcaagactttttcga

SEQ ID NO: 3 - RNA, 21 nt, synthetic construct
  source 1..21: mol_type = other RNA
tgttgtcaagactttttcgaa

SEQ ID NO: 4 - RNA, 21 nt, synthetic construct
  source 1..21: mol_type = other RNA
gttgtcaagactttttcgaat

SEQ ID NO: 5 - RNA, 21 nt, synthetic construct
  source 1..21: mol_type = other RNA
gtcaagactttttcgaatgca

SEQ ID NO: 6 - RNA, 21 nt, synthetic construct
  source 1..21: mol_type = other RNA
tcaagactttttcgaatgcat

SEQ ID NO: 7 - RNA, 21 nt, synthetic construct
  source 1..21: mol_type = other RNA
aagactttttcgaatgcatga

SEQ ID NO: 8 - RNA, 21 nt, synthetic construct
  source 1..21: mol_type = other RNA
gcctcccatccctgggaagta

SEQ ID NO: 9 - RNA, 21 nt, synthetic construct
  source 1..21: mol_type = other RNA
tcccatccctgggaagtcata

SEQ ID NO: 10 - RNA, 21 nt, synthetic construct
  source 1..21: mol_type = other RNA
gacactgaccatctgcatgat

SEQ ID NO: 11 - RNA, 21 nt, synthetic construct
  source 1..21: mol_type = other RNA
ccatgaacatgtttactggta

SEQ ID NO: 12 - RNA, 21 nt, synthetic construct
  source 1..21: mol_type = other RNA
acatgtttactggtaacaata

SEQ ID NO: 13 - RNA, 21 nt, synthetic construct
  source 1..21: mol_type = other RNA
catgtttactggtaacaataa

SEQ ID NO: 14 - RNA, 21 nt, synthetic construct
  source 1..21: mol_type = other RNA
atgtttactggtaacaataaa

SEQ ID NO: 15 - RNA, 21 nt, synthetic construct
  source 1..21: mol_type = other RNA
caataagatctgtggttggaa

SEQ ID NO: 16 - RNA, 21 nt, synthetic construct
  source 1..21: mol_type = other RNA
ataagatctgtggttggaatt

SEQ ID NO: 17 - RNA, 21 nt, synthetic construct
  source 1..21: mol_type = other RNA
taagatctgtggttggaatta

SEQ ID NO: 18 - RNA, 21 nt, synthetic construct
  source 1..21: mol_type = other RNA
ccaaagtttgaagaggatgtt

SEQ ID NO: 19 - RNA, 21 nt, synthetic construct
  source 1..21: mol_type = other RNA
aaagtttgaagaggatgtttt

SEQ ID NO: 20 - RNA, 21 nt, synthetic construct
  source 1..21: mol_type = other RNA
tttgagcagtgacattataat

SEQ ID NO: 21 - RNA, 21 nt, synthetic construct
  source 1..21: mol_type = other RNA
agtgacattataattctgaca

SEQ ID NO: 22 - RNA, 21 nt, synthetic construct
  source 1..21: mol_type = other RNA
gacattataattctgacaata

SEQ ID NO: 23 - RNA, 21 nt, synthetic construct
  source 1..21: mol_type = other RNA
attataattctgacaataaca

SEQ ID NO: 24 - RNA, 21 nt, synthetic construct
  source 1..21: mol_type = other RNA
aattctgacaataacacgata

SEQ ID NO: 25 - RNA, 21 nt, synthetic construct
  source 1..21: mol_type = other RNA
ttctgacaataacacgatgca

SEQ ID NO: 26 - RNA, 21 nt, synthetic construct
  source 1..21: mol_type = other RNA
tctgacaataacacgatgcat

SEQ ID NO: 27 - RNA, 21 nt, synthetic construct
  source 1..21: mol_type = other RNA
ctgacaataacacgatgcata

SEQ ID NO: 28 - RNA, 21 nt, synthetic construct
  source 1..21: mol_type = other RNA
tgacaataacacgatgcataa

SEQ ID NO: 29 - RNA, 21 nt, synthetic construct
  source 1..21: mol_type = other RNA
catcctgtatatttacttcca

SEQ ID NO: 30 - RNA, 21 nt, synthetic construct
  source 1..21: mol_type = other RNA
gtatatttacttccagttcca

SEQ ID NO: 31 - RNA, 21 nt, synthetic construct
  source 1..21: mol_type = other RNA
tccagttccagaatttacgta

SEQ ID NO: 32 - RNA, 21 nt, synthetic construct
  source 1..21: mol_type = other RNA
agttccagaatttacgtcaaa

SEQ ID NO: 33 - RNA, 21 nt, synthetic construct
  source 1..21: mol_type = other RNA
ttccagaatttacgtcaactt

SEQ ID NO: 34 - RNA, 21 nt, synthetic construct
  source 1..21: mol_type = other RNA
ccagaatttacgtcaacttga

SEQ ID NO: 35 - RNA, 21 nt, synthetic construct
  source 1..21: mol_type = other RNA
cagaatttacgtcaacttgga

SEQ ID NO: 36 - RNA, 21 nt, synthetic construct
  source 1..21: mol_type = other RNA
agaatttacgtcaacttggat

SEQ ID NO: 37 - RNA, 21 nt, synthetic construct
  source 1..21: mol_type = other RNA
tttacgtcaacttggatcaaa

SEQ ID NO: 38 - RNA, 21 nt, synthetic construct
  source 1..21: mol_type = other RNA
ttacgtcaacttggatcaaaa

SEQ ID NO: 39 - RNA, 21 nt, synthetic construct
  source 1..21: mol_type = other RNA
tttgtattcagtacagttgta

SEQ ID NO: 40 - RNA, 21 nt, synthetic construct
  source 1..21: mol_type = other RNA
attcagtacagttgtcattca

SEQ ID NO: 41 - RNA, 21 nt, synthetic construct
  source 1..21: mol_type = other RNA
tacagttgtcattcacttctt

SEQ ID NO: 42 - RNA, 21 nt, synthetic construct
  source 1..21: mol_type = other RNA
ttgtcattcacttcttagaca

SEQ ID NO: 43 - RNA, 21 nt, synthetic construct
  source 1..21: mol_type = other RNA
tgtcattcacttcttagacaa

SEQ ID NO: 44 - RNA, 21 nt, synthetic construct
  source 1..21: mol_type = other RNA
ttcacttcttagacaaagaat

SEQ ID NO: 45 - RNA, 21 nt, synthetic construct
  source 1..21: mol_type = other RNA
ttcttagacaaagaattgaca

SEQ ID NO: 46 - RNA, 21 nt, synthetic construct
  source 1..21: mol_type = other RNA
agacaaagaattgacaggctt

SEQ ID NO: 47 - RNA, 21 nt, synthetic construct
  source 1..21: mol_type = other RNA
caaagaattgacaggcttgaa

SEQ ID NO: 48 - RNA, 21 nt, synthetic construct
  source 1..21: mol_type = other RNA
tagcaaagtttgccctcagtt

SEQ ID NO: 49 - RNA, 21 nt, synthetic construct
  source 1..21: mol_type = other RNA
gttccaactcacaggatgaaa

SEQ ID NO: 50 - RNA, 21 nt, synthetic construct
  source 1..21: mol_type = other RNA
gaaaatattgctcgtggaata

SEQ ID NO: 51 - RNA, 21 nt, synthetic construct
  source 1..21: mol_type = other RNA
aaaatattgctcgtggaatga

SEQ ID NO: 52 - RNA, 21 nt, synthetic construct
  source 1..21: mol_type = other RNA
aaatattgctcgtggaatgga

SEQ ID NO: 53 - RNA, 21 nt, synthetic construct
  source 1..21: mol_type = other RNA
aatattgctcgtggaatggca

SEQ ID NO: 54 - RNA, 21 nt, synthetic construct
  source 1..21: mol_type = other RNA
attgctcgtggaatggcaatt

SEQ ID NO: 55 - RNA, 21 nt, synthetic construct
  source 1..21: mol_type = other RNA
tgctcgtggaatggcaatttt

SEQ ID NO: 56 - RNA, 21 nt, synthetic construct
  source 1..21: mol_type = other RNA
gctcgtggaatggcaatttta

SEQ ID NO: 57 - RNA, 21 nt, synthetic construct
  source 1..21: mol_type = other RNA
gtggaatggcaattttaggta

SEQ ID NO: 58 - RNA, 21 nt, synthetic construct
  source 1..21: mol_type = other RNA
cctacgtttaccctcgatgct

SEQ ID NO: 59 - RNA, 21 nt, synthetic construct
  source 1..21: mol_type = other RNA
ctacgtttaccctcgatgcta

SEQ ID NO: 60 - RNA, 21 nt, synthetic construct
  source 1..21: mol_type = other RNA
ctcttgttgaatgtcttgtga

SEQ ID NO: 61 - RNA, 21 nt, synthetic construct
  source 1..21: mol_type = other RNA
cttgttgaatgtcttgtgatt

SEQ ID NO: 62 - RNA, 21 nt, synthetic construct
  source 1..21: mol_type = other RNA
gttgaatgtcttgtgattgga

SEQ ID NO: 63 - RNA, 21 nt, synthetic construct
  source 1..21: mol_type = other RNA
gtacgtcagcttgaaattata

SEQ ID NO: 64 - RNA, 21 nt, synthetic construct
  source 1..21: mol_type = other RNA
tacgtcagcttgaaattatgt

SEQ ID NO: 65 - RNA, 21 nt, synthetic construct
  source 1..21: mol_type = other RNA
tcagcttgaaattatgtgcta

SEQ ID NO: 66 - RNA, 21 nt, synthetic construct
  source 1..21: mol_type = other RNA
ttgaaattatgtgctgcttta

SEQ ID NO: 67 - RNA, 21 nt, synthetic construct
  source 1..21: mol_type = other RNA
aattatgtgctgctttggcta

SEQ ID NO: 68 - RNA, 21 nt, synthetic construct
  source 1..21: mol_type = other RNA
tttggctgcatgtcagttctt

SEQ ID NO: 69 - RNA, 21 nt, synthetic construct
  source 1..21: mol_type = other RNA
ttgccaactacttcgtgttca

SEQ ID NO: 70 - RNA, 21 nt, synthetic construct
  source 1..21: mol_type = other RNA
tgccaactacttcgtgttcat

SEQ ID NO: 71 - RNA, 21 nt, synthetic construct
  source 1..21: mol_type = other RNA
aactacttcgtgttcatgact

SEQ ID NO: 72 - RNA, 21 nt, synthetic construct
  source 1..21: mol_type = other RNA
ctacttcgtgttcatgacttt

SEQ ID NO: 73 - RNA, 21 nt, synthetic construct
  source 1..21: mol_type = other RNA
acttcgtgttcatgactttct

SEQ ID NO: 74 - RNA, 21 nt, synthetic construct
  source 1..21: mol_type = other RNA
cttcgtgttcatgactttctt

SEQ ID NO: 75 - RNA, 21 nt, synthetic construct
  source 1..21: mol_type = other RNA
gtgttcatgactttcttccca

SEQ ID NO: 76 - RNA, 21 nt, synthetic construct
  source 1..21: mol_type = other RNA
ccagcttgtgtgtccttggta

SEQ ID NO: 77 - RNA, 21 nt, synthetic construct
  source 1..21: mol_type = other RNA
ttgtgtgtccttggtattaga

SEQ ID NO: 78 - RNA, 21 nt, synthetic construct
  source 1..21: mol_type = other RNA
gtattagagctttctcgggaa

SEQ ID NO: 79 - RNA, 21 nt, synthetic construct
  source 1..21: mol_type = other RNA
agccgcgagggtcgtccaatt

SEQ ID NO: 80 - RNA, 21 nt, synthetic construct
  source 1..21: mol_type = other RNA
gccgcgagggtcgtccaattt

SEQ ID NO: 81 - RNA, 21 nt, synthetic construct
  source 1..21: mol_type = other RNA
tttgcccgagttttagaagaa

SEQ ID NO: 82 - RNA, 21 nt, synthetic construct
  source 1..21: mol_type = other RNA
gcccgagttttagaagaagaa

SEQ ID NO: 83 - RNA, 21 nt, synthetic construct
  source 1..21: mol_type = other RNA
ctgtaactcagagggtcaaga

SEQ ID NO: 84 - RNA, 21 nt, synthetic construct
  source 1..21: mol_type = other RNA
taactcagagggtcaagatga

SEQ ID NO: 85 - RNA, 21 nt, synthetic construct
  source 1..21: mol_type = other RNA
aactcagagggtcaagatgat

SEQ ID NO: 86 - RNA, 21 nt, synthetic construct
  source 1..21: mol_type = other RNA
ctcagagggtcaagatgatta

SEQ ID NO: 87 - RNA, 21 nt, synthetic construct
  source 1..21: mol_type = other RNA
tcagagggtcaagatgattat

SEQ ID NO: 88 - RNA, 21 nt, synthetic construct
  source 1..21: mol_type = other RNA
gtcaagatgattatgtctcta

SEQ ID NO: 89 - RNA, 21 nt, synthetic construct
  source 1..21: mol_type = other RNA
atgtctctaggcttggttctt

SEQ ID NO: 90 - RNA, 21 nt, synthetic construct
  source 1..21: mol_type = other RNA
gtctctaggcttggttcttgt

SEQ ID NO: 91 - RNA, 21 nt, synthetic construct
  source 1..21: mol_type = other RNA
taggcttggttcttgttcata

SEQ ID NO: 92 - RNA, 21 nt, synthetic construct
  source 1..21: mol_type = other RNA
tcttgttcatgctcacagtca

SEQ ID NO: 93 - RNA, 21 nt, synthetic construct
  source 1..21: mol_type = other RNA
atgctcacagtcgctggataa

SEQ ID NO: 94 - RNA, 21 nt, synthetic construct
  source 1..21: mol_type = other RNA
tgctcacagtcgctggataga

SEQ ID NO: 95 - RNA, 21 nt, synthetic construct
  source 1..21: mol_type = other RNA
cacagtcgctggatagctgat

SEQ ID NO: 96 - RNA, 21 nt, synthetic construct
  source 1..21: mol_type = other RNA
agtcgctggatagctgatcct

SEQ ID NO: 97 - RNA, 21 nt, synthetic construct
  source 1..21: mol_type = other RNA
cgctggatagctgatccttct

SEQ ID NO: 98 - RNA, 21 nt, synthetic construct
  source 1..21: mol_type = other RNA
cttctcctcaaaacagtacaa

SEQ ID NO: 99 - RNA, 21 nt, synthetic construct
  source 1..21: mol_type = other RNA
ctcctcaaaacagtacagcaa

SEQ ID NO: 100 - RNA, 21 nt, synthetic construct
  source 1..21: mol_type = other RNA
acagtacagcagatacttcta

SEQ ID NO: 101 - RNA, 21 nt, synthetic construct
  source 1..21: mol_type = other RNA
cagtacagcagatacttctaa

SEQ ID NO: 102 - RNA, 21 nt, synthetic construct
  source 1..21: mol_type = other RNA
agtacagcagatacttctaaa

SEQ ID NO: 103 - RNA, 21 nt, synthetic construct
  source 1..21: mol_type = other RNA
acagcagatacttctaaggtt

SEQ ID NO: 104 - RNA, 21 nt, synthetic construct
  source 1..21: mol_type = other RNA
cagcagatacttctaaggttt

SEQ ID NO: 105 - RNA, 21 nt, synthetic construct
  source 1..21: mol_type = other RNA
taaaatgatcagcatggatat

SEQ ID NO: 106 - RNA, 21 nt, synthetic construct
  source 1..21: mol_type = other RNA
aatgatcagcatggatattga

SEQ ID NO: 107 - RNA, 21 nt, synthetic construct
  source 1..21: mol_type = other RNA
atcagcatggatattgaacaa

SEQ ID NO: 108 - RNA, 21 nt, synthetic construct
  source 1..21: mol_type = other RNA
atggatattgaacaagttatt

SEQ ID NO: 109 - RNA, 21 nt, synthetic construct
  source 1..21: mol_type = other RNA
tggatattgaacaagttatta

SEQ ID NO: 110 - RNA, 21 nt, synthetic construct
  source 1..21: mol_type = other RNA
attgaacaagttattacccta

SEQ ID NO: 111 - RNA, 21 nt, synthetic construct
  source 1..21: mol_type = other RNA
ttgaacaagttattaccctaa

SEQ ID NO: 112 - RNA, 21 nt, synthetic construct
  source 1..21: mol_type = other RNA
gaacaagttattaccctaagt

SEQ ID NO: 113 - RNA, 21 nt, synthetic construct
  source 1..21: mol_type = other RNA
aacaagttattaccctaagtt

SEQ ID NO: 114 - RNA, 21 nt, synthetic construct
  source 1..21: mol_type = other RNA
acaagttattaccctaagttt

SEQ ID NO: 115 - RNA, 21 nt, synthetic construct
  source 1..21: mol_type = other RNA
caagttattaccctaagttta

SEQ ID NO: 116 - RNA, 21 nt, synthetic construct
  source 1..21: mol_type = other RNA
agttattaccctaagtttaga

SEQ ID NO: 117 - RNA, 21 nt, synthetic construct
  source 1..21: mol_type = other RNA
ctccttctggctgtcaagtaa

SEQ ID NO: 118 - RNA, 21 nt, synthetic construct
  source 1..21: mol_type = other RNA
tctggctgtcaagtacatctt

SEQ ID NO: 119 - RNA, 21 nt, synthetic construct
  source 1..21: mol_type = other RNA
gtcaagtacatcttctttgaa

SEQ ID NO: 120 - RNA, 21 nt, synthetic construct
  source 1..21: mol_type = other RNA
caagtacatcttctttgaaca

SEQ ID NO: 121 - RNA, 21 nt, synthetic construct
  source 1..21: mol_type = other RNA
aagtacatcttctttgaacaa

SEQ ID NO: 122 - RNA, 21 nt, synthetic construct
  source 1..21: mol_type = other RNA
cagagacagaatctacactct

SEQ ID NO: 123 - RNA, 21 nt, synthetic construct
  source 1..21: mol_type = other RNA
ttaaaaaaccctatcacatct

SEQ ID NO: 124 - RNA, 21 nt, synthetic construct
  source 1..21: mol_type = other RNA
cctatcacatctcctgtagta

SEQ ID NO: 125 - RNA, 21 nt, synthetic construct
  source 1..21: mol_type = other RNA
tatcacatctcctgtagtgaa

SEQ ID NO: 126 - RNA, 21 nt, synthetic construct
  source 1..21: mol_type = other RNA
attgttgtagacgtgaaccta

SEQ ID NO: 127 - RNA, 21 nt, synthetic construct
  source 1..21: mol_type = other RNA
gaagagacagggataaaccga

SEQ ID NO: 128 - RNA, 21 nt, synthetic construct
  source 1..21: mol_type = other RNA
aagagacagggataaaccgaa

SEQ ID NO: 129 - RNA, 21 nt, synthetic construct
  source 1..21: mol_type = other RNA
agagacagggataaaccgaga

SEQ ID NO: 130 - RNA, 21 nt, synthetic construct
  source 1..21: mol_type = other RNA
gagacagggataaaccgagaa

SEQ ID NO: 131 - RNA, 21 nt, synthetic construct
  source 1..21: mol_type = other RNA
agacagggataaaccgagaaa

SEQ ID NO: 132 - RNA, 21 nt, synthetic construct
  source 1..21: mol_type = other RNA
gacagggataaaccgagaaaa

SEQ ID NO: 133 - RNA, 21 nt, synthetic construct
  source 1..21: mol_type = other RNA
acagggataaaccgagaaaga

SEQ ID NO: 134 - RNA, 21 nt, synthetic construct
  source 1..21: mol_type = other RNA
cagggataaaccgagaaagaa

SEQ ID NO: 135 - RNA, 21 nt, synthetic construct
  source 1..21: mol_type = other RNA
agggataaaccgagaaagaaa

SEQ ID NO: 136 - RNA, 21 nt, synthetic construct
  source 1..21: mol_type = other RNA
aaaccgagaaagaaaagttga

SEQ ID NO: 137 - RNA, 21 nt, synthetic construct
  source 1..21: mol_type = other RNA
gttgaggttataaaaccctta

SEQ ID NO: 138 - RNA, 21 nt, synthetic construct
  source 1..21: mol_type = other RNA
ggttataaaacccttagtgga

SEQ ID NO: 139 - RNA, 21 nt, synthetic construct
  source 1..21: mol_type = other RNA
aacccttagtggctgaaacaa

SEQ ID NO: 140 - RNA, 21 nt, synthetic construct
  source 1..21: mol_type = other RNA
acccttagtggctgaaacaga

SEQ ID NO: 141 - RNA, 21 nt, synthetic construct
  source 1..21: mol_type = other RNA
cccttagtggctgaaacagat

SEQ ID NO: 142 - RNA, 21 nt, synthetic construct
  source 1..21: mol_type = other RNA
ccttagtggctgaaacagata

SEQ ID NO: 143 - RNA, 21 nt, synthetic construct
  source 1..21: mol_type = other RNA
cagagctacatttgtggttga

SEQ ID NO: 144 - RNA, 21 nt, synthetic construct
  source 1..21: mol_type = other RNA
agctacatttgtggttggtaa

SEQ ID NO: 145 - RNA, 21 nt, synthetic construct
  source 1..21: mol_type = other RNA
actcctccttactcgatactt

SEQ ID NO: 146 - RNA, 21 nt, synthetic construct
  source 1..21: mol_type = other RNA
ctcctccttactcgatactta

SEQ ID NO: 147 - RNA, 21 nt, synthetic construct
  source 1..21: mol_type = other RNA
tggtgacacaggaacctgaaa

SEQ ID NO: 148 - RNA, 21 nt, synthetic construct
  source 1..21: mol_type = other RNA
aaggtgcaaaattccttagta

SEQ ID NO: 149 - RNA, 21 nt, synthetic construct
  source 1..21: mol_type = other RNA
ttccttagtgatgctgagata

SEQ ID NO: 150 - RNA, 21 nt, synthetic construct
  source 1..21: mol_type = other RNA
tagtgatgctgagatcatcca

SEQ ID NO: 151 - RNA, 21 nt, synthetic construct
  source 1..21: mol_type = other RNA
gatgctgagatcatccagtta

SEQ ID NO: 152 - RNA, 21 nt, synthetic construct
  source 1..21: mol_type = other RNA
tgctgagatcatccagttagt

SEQ ID NO: 153 - RNA, 21 nt, synthetic construct
  source 1..21: mol_type = other RNA
tgagatcatccagttagtcaa

SEQ ID NO: 154 - RNA, 21 nt, synthetic construct
  source 1..21: mol_type = other RNA
gagatcatccagttagtcaat

SEQ ID NO: 155 - RNA, 21 nt, synthetic construct
  source 1..21: mol_type = other RNA
agatcatccagttagtcaata

SEQ ID NO: 156 - RNA, 21 nt, synthetic construct
  source 1..21: mol_type = other RNA
atcatccagttagtcaatgct

SEQ ID NO: 157 - RNA, 21 nt, synthetic construct
  source 1..21: mol_type = other RNA
catccagttagtcaatgctaa

SEQ ID NO: 158 - RNA, 21 nt, synthetic construct
  source 1..21: mol_type = other RNA
tccagttagtcaatgctaaga

SEQ ID NO: 159 - RNA, 21 nt, synthetic construct
  source 1..21: mol_type = other RNA
ccagttagtcaatgctaagca

SEQ ID NO: 160 - RNA, 21 nt, synthetic construct
  source 1..21: mol_type = other RNA
cagttagtcaatgctaagcat

SEQ ID NO: 161 - RNA, 21 nt, synthetic construct
  source 1..21: mol_type = other RNA
agttagtcaatgctaagcata

SEQ ID NO: 162 - RNA, 21 nt, synthetic construct
  source 1..21: mol_type = other RNA
gttagtcaatgctaagcatat

SEQ ID NO: 163 - RNA, 21 nt, synthetic construct
  source 1..21: mol_type = other RNA
ttagtcaatgctaagcatata

SEQ ID NO: 164 - RNA, 21 nt, synthetic construct
  source 1..21: mol_type = other RNA
gtcaatgctaagcatatccca

SEQ ID NO: 165 - RNA, 21 nt, synthetic construct
  source 1..21: mol_type = other RNA
tgctaagcatatcccagccta

SEQ ID NO: 166 - RNA, 21 nt, synthetic construct
  source 1..21: mol_type = other RNA
taagcatatcccagcctacaa

SEQ ID NO: 167 - RNA, 21 nt, synthetic construct
  source 1..21: mol_type = other RNA
gcatatcccagcctacaagtt

SEQ ID NO: 168 - RNA, 21 nt, synthetic construct
  source 1..21: mol_type = other RNA
catatcccagcctacaagtta

SEQ ID NO: 169 - RNA, 21 nt, synthetic construct
  source 1..21: mol_type = other RNA
atatcccagcctacaagttga

SEQ ID NO: 170 - RNA, 21 nt, synthetic construct
  source 1..21: mol_type = other RNA
tcccagcctacaagttggaaa

SEQ ID NO: 171 - RNA, 21 nt, synthetic construct
  source 1..21: mol_type = other RNA
agcctacaagttggaaactct

SEQ ID NO: 172 - RNA, 21 nt, synthetic construct
  source 1..21: mol_type = other RNA
ctacaagttggaaactctgat

SEQ ID NO: 173 - RNA, 21 nt, synthetic construct
  source 1..21: mol_type = other RNA
caagttggaaactctgatgga

SEQ ID NO: 174 - RNA, 21 nt, synthetic construct
  source 1..21: mol_type = other RNA
aagttggaaactctgatggaa

SEQ ID NO: 175 - RNA, 21 nt, synthetic construct
  source 1..21: mol_type = other RNA
ggaaactctgatggaaactca

SEQ ID NO: 176 - RNA, 21 nt, synthetic construct
  source 1..21: mol_type = other RNA
gaaactcatgagcgtggtgta

SEQ ID NO: 177 - RNA, 21 nt, synthetic construct
  source 1..21: mol_type = other RNA
aactcatgagcgtggtgtata

SEQ ID NO: 178 - RNA, 21 nt, synthetic construct
  source 1..21: mol_type = other RNA
actcatgagcgtggtgtatct

SEQ ID NO: 179 - RNA, 21 nt, synthetic construct
  source 1..21: mol_type = other RNA
ctcatgagcgtggtgtatcta

SEQ ID NO: 180 - RNA, 21 nt, synthetic construct
  source 1..21: mol_type = other RNA
tcatgagcgtggtgtatctat

SEQ ID NO: 181 - RNA, 21 nt, synthetic construct
  source 1..21: mol_type = other RNA
catgagcgtggtgtatctatt

SEQ ID NO: 182 - RNA, 21 nt, synthetic construct
  source 1..21: mol_type = other RNA
atgagcgtggtgtatctatta

SEQ ID NO: 183 - RNA, 21 nt, synthetic construct
  source 1..21: mol_type = other RNA
tgagcgtggtgtatctattca

SEQ ID NO: 184 - RNA, 21 nt, synthetic construct
  source 1..21: mol_type = other RNA
gagcgtggtgtatctattcga

SEQ ID NO: 185 - RNA, 21 nt, synthetic construct
  source 1..21: mol_type = other RNA
acctaccttacagggattata

SEQ ID NO: 186 - RNA, 21 nt, synthetic construct
  source 1..21: mol_type = other RNA
cctaccttacagggattataa

SEQ ID NO: 187 - RNA, 21 nt, synthetic construct
  source 1..21: mol_type = other RNA
ctaccttacagggattataat

SEQ ID NO: 188 - RNA, 21 nt, synthetic construct
  source 1..21: mol_type = other RNA
tacagggattataattactca

SEQ ID NO: 189 - RNA, 21 nt, synthetic construct
  source 1..21: mol_type = other RNA
ttgtgagaatgttattggata

SEQ ID NO: 190 - RNA, 21 nt, synthetic construct
  source 1..21: mol_type = other RNA
ttgtgagaatgttattggata

SEQ ID NO: 191 - RNA, 21 nt, synthetic construct
  source 1..21: mol_type = other RNA
ttgtgagaatgttattggata

SEQ ID NO: 192 - RNA, 21 nt, synthetic construct
  source 1..21: mol_type = other RNA
agcagccgagtccttgcagat

SEQ ID NO: 193 - RNA, 21 nt, synthetic construct
  source 1..21: mol_type = other RNA
ttgcagatgggatgactcgta

SEQ ID NO: 194 - RNA, 21 nt, synthetic construct
  source 1..21: mol_type = other RNA
tgcagatgggatgactcgtga

SEQ ID NO: 195 - RNA, 21 nt, synthetic construct
  source 1..21: mol_type = other RNA
cagatgggatgactcgtggca

SEQ ID NO: 196 - RNA, 21 nt, synthetic construct
  source 1..21: mol_type = other RNA
agatgggatgactcgtggcca

SEQ ID NO: 197 - RNA, 21 nt, synthetic construct
  source 1..21: mol_type = other RNA
actcgtggcccagttgtgcgt

SEQ ID NO: 198 - RNA, 21 nt, synthetic construct
  source 1..21: mol_type = other RNA
ccagttgtgcgtcttccacgt

SEQ ID NO: 199 - RNA, 21 nt, synthetic construct
  source 1..21: mol_type = other RNA
gttgtgcgtcttccacgtgct

SEQ ID NO: 200 - RNA, 21 nt, synthetic construct
  source 1..21: mol_type = other RNA
aagtgaaagcctggctcgaaa

SEQ ID NO: 201 - RNA, 21 nt, synthetic construct
  source 1..21: mol_type = other RNA
agtgaaagcctggctcgaaaa

SEQ ID NO: 202 - RNA, 21 nt, synthetic construct
  source 1..21: mol_type = other RNA
gcctggctcgaaacatctgaa

SEQ ID NO: 203 - RNA, 21 nt, synthetic construct
  source 1..21: mol_type = other RNA
ctggctcgaaacatctgaaga

SEQ ID NO: 204 - RNA, 21 nt, synthetic construct
  source 1..21: mol_type = other RNA
gaaacatctgaagggttcgca

SEQ ID NO: 205 - RNA, 21 nt, synthetic construct
  source 1..21: mol_type = other RNA
aaacatctgaagggttcgcaa

SEQ ID NO: 206 - RNA, 21 nt, synthetic construct
  source 1..21: mol_type = other RNA
tctgaagggttcgcagtgata

SEQ ID NO: 207 - RNA, 21 nt, synthetic construct
  source 1..21: mol_type = other RNA
ctgaagggttcgcagtgataa

SEQ ID NO: 208 - RNA, 21 nt, synthetic construct
  source 1..21: mol_type = other RNA
tgaagggttcgcagtgataaa

SEQ ID NO: 209 - RNA, 21 nt, synthetic construct
  source 1..21: mol_type = other RNA
gaagggttcgcagtgataaaa

SEQ ID NO: 210 - RNA, 21 nt, synthetic construct
  source 1..21: mol_type = other RNA
agggttcgcagtgataaagga

SEQ ID NO: 211 - RNA, 21 nt, synthetic construct
  source 1..21: mol_type = other RNA
aggcatttgacagcactagca

SEQ ID NO: 212 - RNA, 21 nt, synthetic construct
  source 1..21: mol_type = other RNA
gcatttgacagcactagcaga

SEQ ID NO: 213 - RNA, 21 nt, synthetic construct
  source 1..21: mol_type = other RNA
tttgacagcactagcagattt

SEQ ID NO: 214 - RNA, 21 nt, synthetic construct
  source 1..21: mol_type = other RNA
ttgacagcactagcagattta

SEQ ID NO: 215 - RNA, 21 nt, synthetic construct
  source 1..21: mol_type = other RNA
gacagcactagcagatttgca

SEQ ID NO: 216 - RNA, 21 nt, synthetic construct
  source 1..21: mol_type = other RNA
gcactagcagatttgcacgta

SEQ ID NO: 217 - RNA, 21 nt, synthetic construct
  source 1..21: mol_type = other RNA
cactagcagatttgcacgtct

SEQ ID NO: 218 - RNA, 21 nt, synthetic construct
  source 1..21: mol_type = other RNA
ctagcagatttgcacgtctaa

SEQ ID NO: 219 - RNA, 21 nt, synthetic construct
  source 1..21: mol_type = other RNA
tagcagatttgcacgtctaca

SEQ ID NO: 220 - RNA, 21 nt, synthetic construct
  source 1..21: mol_type = other RNA
agcagatttgcacgtctacaa

SEQ ID NO: 221 - RNA, 21 nt, synthetic construct
  source 1..21: mol_type = other RNA
gatttgcacgtctacagaaaa

SEQ ID NO: 222 - RNA, 21 nt, synthetic construct
  source 1..21: mol_type = other RNA
tttgcacgtctacagaaactt

SEQ ID NO: 223 - RNA, 21 nt, synthetic construct
  source 1..21: mol_type = other RNA
ttgcacgtctacagaaactta

SEQ ID NO: 224 - RNA, 21 nt, synthetic construct
  source 1..21: mol_type = other RNA
tagctggacgcaacctttata

SEQ ID NO: 225 - RNA, 21 nt, synthetic construct
  source 1..21: mol_type = other RNA
ctggacgcaacctttatatca

SEQ ID NO: 226 - RNA, 21 nt, synthetic construct
  source 1..21: mol_type = other RNA
ggacgcaacctttatatccgt

SEQ ID NO: 227 - RNA, 21 nt, synthetic construct
  source 1..21: mol_type = other RNA
gacgcaacctttatatccgtt

SEQ ID NO: 228 - RNA, 21 nt, synthetic construct
  source 1..21: mol_type = other RNA
acgcaacctttatatccgttt

SEQ ID NO: 229 - RNA, 21 nt, synthetic construct
  source 1..21: mol_type = other RNA
cgcaacctttatatccgttta

SEQ ID NO: 230 - RNA, 21 nt, synthetic construct
  source 1..21: mol_type = other RNA
caacctttatatccgtttcca

SEQ ID NO: 231 - RNA, 21 nt, synthetic construct
  source 1..21: mol_type = other RNA
tgatttcaaagggtacagaga

SEQ ID NO: 232 - RNA, 21 nt, synthetic construct
  source 1..21: mol_type = other RNA
ccgttagtggtaactattgta

SEQ ID NO: 233 - RNA, 21 nt, synthetic construct
  source 1..21: mol_type = other RNA
cgttagtggtaactattgtaa

SEQ ID NO: 234 - RNA, 21 nt, synthetic construct
  source 1..21: mol_type = other RNA
ttagtggtaactattgtacta

SEQ ID NO: 235 - RNA, 21 nt, synthetic construct
  source 1..21: mol_type = other RNA
gtggtaactattgtactgaca

SEQ ID NO: 236 - RNA, 21 nt, synthetic construct
  source 1..21: mol_type = other RNA
tggtaactattgtactgacaa

SEQ ID NO: 237 - RNA, 21 nt, synthetic construct
  source 1..21: mol_type = other RNA
taactattgtactgacaagaa

SEQ ID NO: 238 - RNA, 21 nt, synthetic construct
  source 1..21: mol_type = other RNA
tattgtactgacaagaaacct

SEQ ID NO: 239 - RNA, 21 nt, synthetic construct
  source 1..21: mol_type = other RNA
acaagaaacctgctgctataa

SEQ ID NO: 240 - RNA, 21 nt, synthetic construct
  source 1..21: mol_type = other RNA
gttgtttgtgaagctgtcatt

SEQ ID NO: 241 - RNA, 21 nt, synthetic construct
  source 1..21: mol_type = other RNA
gccaaggttgtcagagaagta

SEQ ID NO: 242 - RNA, 21 nt, synthetic construct
  source 1..21: mol_type = other RNA
caaggttgtcagagaagtatt

SEQ ID NO: 243 - RNA, 21 nt, synthetic construct
  source 1..21: mol_type = other RNA
aggttgtcagagaagtattaa

SEQ ID NO: 244 - RNA, 21 nt, synthetic construct
  source 1..21: mol_type = other RNA
ggttgtcagagaagtattaaa

SEQ ID NO: 245 - RNA, 21 nt, synthetic construct
  source 1..21: mol_type = other RNA
ttgtcagagaagtattaaaga

SEQ ID NO: 246 - RNA, 21 nt, synthetic construct
  source 1..21: mol_type = other RNA
tcagagaagtattaaagacta

SEQ ID NO: 247 - RNA, 21 nt, synthetic construct
  source 1..21: mol_type = other RNA
agagaagtattaaagactaca

SEQ ID NO: 248 - RNA, 21 nt, synthetic construct
  source 1..21: mol_type = other RNA
gagaagtattaaagactacca

SEQ ID NO: 249 - RNA, 21 nt, synthetic construct
  source 1..21: mol_type = other RNA
agaagtattaaagactaccaa

SEQ ID NO: 250 - RNA, 21 nt, synthetic construct
  source 1..21: mol_type = other RNA
gaggctatgattgaggtcaaa

SEQ ID NO: 251 - RNA, 21 nt, synthetic construct
  source 1..21: mol_type = other RNA
aggctatgattgaggtcaaca

SEQ ID NO: 252 - RNA, 21 nt, synthetic construct
  source 1..21: mol_type = other RNA
ggctatgattgaggtcaacat

SEQ ID NO: 253 - RNA, 21 nt, synthetic construct
  source 1..21: mol_type = other RNA
gctatgattgaggtcaacatt

SEQ ID NO: 254 - RNA, 21 nt, synthetic construct
  source 1..21: mol_type = other RNA
tatgattgaggtcaacattaa

SEQ ID NO: 255 - RNA, 21 nt, synthetic construct
  source 1..21: mol_type = other RNA
atgattgaggtcaacattaaa

SEQ ID NO: 256 - RNA, 21 nt, synthetic construct
  source 1..21: mol_type = other RNA
ttgaggtcaacattaacaaga

SEQ ID NO: 257 - RNA, 21 nt, synthetic construct
  source 1..21: mol_type = other RNA
tgaggtcaacattaacaagaa

SEQ ID NO: 258 - RNA, 21 nt, synthetic construct
  source 1..21: mol_type = other RNA
caacattaacaagaatttagt

SEQ ID NO: 259 - RNA, 21 nt, synthetic construct
  source 1..21: mol_type = other RNA
cattaacaagaatttagtgga

SEQ ID NO: 260 - RNA, 21 nt, synthetic construct
  source 1..21: mol_type = other RNA
taacaagaatttagtgggcta

SEQ ID NO: 261 - RNA, 21 nt, synthetic construct
  source 1..21: mol_type = other RNA
agaatttagtgggctctgcca

SEQ ID NO: 262 - RNA, 21 nt, synthetic construct
  source 1..21: mol_type = other RNA
tgccatggctgggagcataga

SEQ ID NO: 263 - RNA, 21 nt, synthetic construct
  source 1..21: mol_type = other RNA
gccatggctgggagcatagga

SEQ ID NO: 264 - RNA, 21 nt, synthetic construct
  source 1..21: mol_type = other RNA
tgggagcataggaggctacaa

SEQ ID NO: 265 - RNA, 21 nt, synthetic construct
  source 1..21: mol_type = other RNA
agcataggaggctacaacgca

SEQ ID NO: 266 - RNA, 21 nt, synthetic construct
  source 1..21: mol_type = other RNA
gcataggaggctacaacgcca

SEQ ID NO: 267 - RNA, 21 nt, synthetic construct
  source 1..21: mol_type = other RNA
aggaggctacaacgcccatga

SEQ ID NO: 268 - RNA, 21 nt, synthetic construct
  source 1..21: mol_type = other RNA
ctacaacgcccatgcagcaaa

SEQ ID NO: 269 - RNA, 21 nt, synthetic construct
  source 1..21: mol_type = other RNA
acaacgcccatgcagcaaaca

SEQ ID NO: 270 - RNA, 21 nt, synthetic construct
  source 1..21: mol_type = other RNA
cccatgcagcaaacattgtca

SEQ ID NO: 271 - RNA, 21 nt, synthetic construct
  source 1..21: mol_type = other RNA
ccatgcagcaaacattgtcaa

SEQ ID NO: 272 - RNA, 21 nt, synthetic construct
  source 1..21: mol_type = other RNA
gccatctacattgcctgtgga

SEQ ID NO: 273 - RNA, 21 nt, synthetic construct
  source 1..21: mol_type = other RNA
acaggatgcagcacagaatgt

SEQ ID NO: 274 - RNA, 21 nt, synthetic construct
  source 1..21: mol_type = other RNA
caggatgcagcacagaatgtt

SEQ ID NO: 275 - RNA, 21 nt, synthetic construct
  source 1..21: mol_type = other RNA
atgcagcacagaatgttggta

SEQ ID NO: 276 - RNA, 21 nt, synthetic construct
  source 1..21: mol_type = other RNA
gcagcacagaatgttggtagt

SEQ ID NO: 277 - RNA, 21 nt, synthetic construct
  source 1..21: mol_type = other RNA
gcacagaatgttggtagttca

SEQ ID NO: 278 - RNA, 21 nt, synthetic construct
  source 1..21: mol_type = other RNA
tcccacaaatgaagatttata

SEQ ID NO: 279 - RNA, 21 nt, synthetic construct
  source 1..21: mol_type = other RNA
cacaaatgaagatttatatat

SEQ ID NO: 280 - RNA, 21 nt, synthetic construct
  source 1..21: mol_type = other RNA
caaatgaagatttatatatca

SEQ ID NO: 281 - RNA, 21 nt, synthetic construct
  source 1..21: mol_type = other RNA
tcagctgcaccatgccatcta

SEQ ID NO: 282 - RNA, 21 nt, synthetic construct
  source 1..21: mol_type = other RNA
tgccatctatagagataggaa

SEQ ID NO: 283 - RNA, 21 nt, synthetic construct
  source 1..21: mol_type = other RNA
tttgcagatgctaggtgttca

SEQ ID NO: 284 - RNA, 21 nt, synthetic construct
  source 1..21: mol_type = other RNA
ttgcagatgctaggtgttcaa

SEQ ID NO: 285 - RNA, 21 nt, synthetic construct
  source 1..21: mol_type = other RNA
cagatgctaggtgttcaagga

SEQ ID NO: 286 - RNA, 21 nt, synthetic construct
  source 1..21: mol_type = other RNA
aggtgttcaaggagcatgcaa

SEQ ID NO: 287 - RNA, 21 nt, synthetic construct
  source 1..21: mol_type = other RNA
ggtgttcaaggagcatgcaaa

SEQ ID NO: 288 - RNA, 21 nt, synthetic construct
  source 1..21: mol_type = other RNA
ttcaaggagcatgcaaagata

SEQ ID NO: 289 - RNA, 21 nt, synthetic construct
  source 1..21: mol_type = other RNA
tcaaggagcatgcaaagataa

SEQ ID NO: 290 - RNA, 21 nt, synthetic construct
  source 1..21: mol_type = other RNA
caaggagcatgcaaagataat

SEQ ID NO: 291 - RNA, 21 nt, synthetic construct
  source 1..21: mol_type = other RNA
aaagataatcctggggaaaat

SEQ ID NO: 292 - RNA, 21 nt, synthetic construct
  source 1..21: mol_type = other RNA
ggaaaatgcccggcagcttga

SEQ ID NO: 293 - RNA, 21 nt, synthetic construct
  source 1..21: mol_type = other RNA
gcccggcagcttgcccgaatt

SEQ ID NO: 294 - RNA, 21 nt, synthetic construct
  source 1..21: mol_type = other RNA
cagcttgcccgaattgtgtgt

SEQ ID NO: 295 - RNA, 21 nt, synthetic construct
  source 1..21: mol_type = other RNA
ccgtaatggctggggaattgt

SEQ ID NO: 296 - RNA, 21 nt, synthetic construct
  source 1..21: mol_type = other RNA
attgtcacttatggcagcatt

SEQ ID NO: 297 - RNA, 21 nt, synthetic construct
  source 1..21: mol_type = other RNA
gtcacttatggcagcattgga

SEQ ID NO: 298 - RNA, 21 nt, synthetic construct
  source 1..21: mol_type = other RNA
acatgattcacaacaggtcga

SEQ ID NO: 299 - RNA, 21 nt, synthetic construct
  source 1..21: mol_type = other RNA
catgattcacaacaggtcgaa

SEQ ID NO: 300 - RNA, 21 nt, synthetic construct
  source 1..21: mol_type = other RNA
atgattcacaacaggtcgaaa

SEQ ID NO: 301 - RNA, 21 nt, synthetic construct
  source 1..21: mol_type = other RNA
tgattcacaacaggtcgaaga

SEQ ID NO: 302 - RNA, 21 nt, synthetic construct
  source 1..21: mol_type = other RNA
gattcacaacaggtcgaagat

SEQ ID NO: 303 - RNA, 21 nt, synthetic construct
  source 1..21: mol_type = other RNA
ttcacaacaggtcgaagatca

SEQ ID NO: 304 - RNA, 21 nt, synthetic construct
  source 1..21: mol_type = other RNA
tcacaacaggtcgaagatcaa

SEQ ID NO: 305 - RNA, 21 nt, synthetic construct
  source 1..21: mol_type = other RNA
cacaacaggtcgaagatcaat

SEQ ID NO: 306 - RNA, 21 nt, synthetic construct
  source 1..21: mol_type = other RNA
caacaggtcgaagatcaattt

SEQ ID NO: 307 - RNA, 21 nt, synthetic construct
  source 1..21: mol_type = other RNA
aacaggtcgaagatcaattta

SEQ ID NO: 308 - RNA, 21 nt, synthetic construct
  source 1..21: mol_type = other RNA
caggtcgaagatcaatttaca

SEQ ID NO: 309 - RNA, 21 nt, synthetic construct
  source 1..21: mol_type = other RNA
aggtcgaagatcaatttacaa

SEQ ID NO: 310 - RNA, 21 nt, synthetic construct
  source 1..21: mol_type = other RNA
ggtcgaagatcaatttacaaa

SEQ ID NO: 311 - RNA, 21 nt, synthetic construct
  source 1..21: mol_type = other RNA
gtcgaagatcaatttacaaga

SEQ ID NO: 312 - RNA, 21 nt, synthetic construct
  source 1..21: mol_type = other RNA
tcgaagatcaatttacaagaa

SEQ ID NO: 313 - RNA, 21 nt, synthetic construct
  source 1..21: mol_type = other RNA
gaagatcaatttacaagacct

SEQ ID NO: 314 - RNA, 21 nt, synthetic construct
  source 1..21: mol_type = other RNA
aagatcaatttacaagaccta

SEQ ID NO: 315 - RNA, 21 nt, synthetic construct
  source 1..21: mol_type = other RNA
agatcaatttacaagacctca

SEQ ID NO: 316 - RNA, 21 nt, synthetic construct
  source 1..21: mol_type = other RNA
gatcaatttacaagacctcca

SEQ ID NO: 317 - RNA, 21 nt, synthetic construct
  source 1..21: mol_type = other RNA
atcaatttacaagacctccaa

SEQ ID NO: 318 - RNA, 21 nt, synthetic construct
  source 1..21: mol_type = other RNA
taaaggactaacataaaatct

SEQ ID NO: 319 - RNA, 21 nt, synthetic construct
  source 1..21: mol_type = other RNA
aaaggactaacataaaatcta

SEQ ID NO: 320 - RNA, 21 nt, synthetic construct
  source 1..21: mol_type = other RNA
tcagagaggtctcaggttctt

SEQ ID NO: 321 - RNA, 21 nt, synthetic construct
  source 1..21: mol_type = other RNA
agaggtctcaggttctttcca

SEQ ID NO: 322 - RNA, 21 nt, synthetic construct
  source 1..21: mol_type = other RNA
gtctcaggttctttccatgca

SEQ ID NO: 323 - RNA, 21 nt, synthetic construct
  source 1..21: mol_type = other RNA
ctcaggttctttccatgcaga

SEQ ID NO: 324 - RNA, 21 nt, synthetic construct
  source 1..21: mol_type = other RNA
aacacagtttagtgctttaca

SEQ ID NO: 325 - RNA, 21 nt, synthetic construct
  source 1..21: mol_type = other RNA
gctttacatgctgtgctcttt

SEQ ID NO: 326 - RNA, 21 nt, synthetic construct
  source 1..21: mol_type = other RNA
tggtaatctacagctcaccta

SEQ ID NO: 327 - RNA, 21 nt, synthetic construct
  source 1..21: mol_type = other RNA
cagctcacctctgaaggcaaa

SEQ ID NO: 328 - RNA, 21 nt, synthetic construct
  source 1..21: mol_type = other RNA
ctcacctctgaaggcaaatat

SEQ ID NO: 329 - RNA, 21 nt, synthetic construct
  source 1..21: mol_type = other RNA
aaaagttttgatgaaattctt

SEQ ID NO: 330 - RNA, 21 nt, synthetic construct
  source 1..21: mol_type = other RNA
agttttgatgaaattcttgaa

SEQ ID NO: 331 - RNA, 21 nt, synthetic construct
  source 1..21: mol_type = other RNA
tttgatgaaattcttgaagtt

SEQ ID NO: 332 - RNA, 21 nt, synthetic construct
  source 1..21: mol_type = other RNA
tgatgaaattcttgaagttca

SEQ ID NO: 333 - RNA, 21 nt, synthetic construct
  source 1..21: mol_type = other RNA
gatgaaattcttgaagttcat

SEQ ID NO: 334 - RNA, 21 nt, synthetic construct
  source 1..21: mol_type = other RNA
attcttgaagttcatggtgat

SEQ ID NO: 335 - RNA, 21 nt, synthetic construct
  source 1..21: mol_type = other RNA
gttcatggtgatcagtgcaat

SEQ ID NO: 336 - RNA, 21 nt, synthetic construct
  source 1..21: mol_type = other RNA
catggtgatcagtgcaattga

SEQ ID NO: 337 - RNA, 21 nt, synthetic construct
  source 1..21: mol_type = other RNA
atggtgatcagtgcaattgaa

SEQ ID NO: 338 - RNA, 21 nt, synthetic construct
  source 1..21: mol_type = other RNA
gaaactcctgattttgtagtt

SEQ ID NO: 339 - RNA, 21 nt, synthetic construct
  source 1..21: mol_type = other RNA
aaactcctgattttgtagtta

SEQ ID NO: 340 - RNA, 21 nt, synthetic construct
  source 1..21: mol_type = other RNA
aactcctgattttgtagttaa

SEQ ID NO: 341 - RNA, 21 nt, synthetic construct
  source 1..21: mol_type = other RNA
actcctgattttgtagttaat

SEQ ID NO: 342 - RNA, 21 nt, synthetic construct
  source 1..21: mol_type = other RNA
tcctgattttgtagttaattt

SEQ ID NO: 343 - RNA, 21 nt, synthetic construct
  source 1..21: mol_type = other RNA
cctgattttgtagttaattta

SEQ ID NO: 344 - RNA, 21 nt, synthetic construct
  source 1..21: mol_type = other RNA
atttattaagtctgggatgta

SEQ ID NO: 345 - RNA, 21 nt, synthetic construct
  source 1..21: mol_type = other RNA
tttattaagtctgggatgtaa

SEQ ID NO: 346 - RNA, 21 nt, synthetic construct
  source 1..21: mol_type = other RNA
tgggatgtagaacttcaagaa

SEQ ID NO: 347 - RNA, 21 nt, synthetic construct
  source 1..21: mol_type = other RNA
ggatgtagaacttcaagaagt

SEQ ID NO: 348 - RNA, 21 nt, synthetic construct
  source 1..21: mol_type = other RNA
gatgtagaacttcaagaagta

SEQ ID NO: 349 - RNA, 21 nt, synthetic construct
  source 1..21: mol_type = other RNA
acttcaagaagtaagagctaa

SEQ ID NO: 350 - RNA, 21 nt, synthetic construct
  source 1..21: mol_type = other RNA
ttcaagaagtaagagctaagt

SEQ ID NO: 351 - RNA, 21 nt, synthetic construct
  source 1..21: mol_type = other RNA
caagaagtaagagctaagtta

SEQ ID NO: 352 - RNA, 21 nt, synthetic construct
  source 1..21: mol_type = other RNA
gggggtaatcagcattattct

SEQ ID NO: 353 - RNA, 21 nt, synthetic construct
  source 1..21: mol_type = other RNA
ggggtaatcagcattattctt

SEQ ID NO: 354 - RNA, 21 nt, synthetic construct
  source 1..21: mol_type = other RNA
aaactacagaataatgtgtta

SEQ ID NO: 355 - RNA, 21 nt, synthetic construct
  source 1..21: mol_type = other RNA
aactacagaataatgtgttaa

SEQ ID NO: 356 - RNA, 21 nt, synthetic construct
  source 1..21: mol_type = other RNA
actacagaataatgtgttaaa

SEQ ID NO: 357 - RNA, 21 nt, synthetic construct
  source 1..21: mol_type = other RNA
atttatctccgcaggctattt

SEQ ID NO: 358 - RNA, 21 nt, synthetic construct
  source 1..21: mol_type = other RNA
tctccgcaggctatttgttca

SEQ ID NO: 359 - RNA, 21 nt, synthetic construct
  source 1..21: mol_type = other RNA
ctccgcaggctatttgttcaa

SEQ ID NO: 360 - RNA, 21 nt, synthetic construct
  source 1..21: mol_type = other RNA
ttcagagaggccttttgttta

SEQ ID NO: 361 - RNA, 21 nt, synthetic construct
  source 1..21: mol_type = other RNA
tcagagaggccttttgtttaa

SEQ ID NO: 362 - RNA, 21 nt, synthetic construct
  source 1..21: mol_type = other RNA
cagagaggccttttgtttaaa

SEQ ID NO: 363 - RNA, 21 nt, synthetic construct
  source 1..21: mol_type = other RNA
agagaggccttttgtttaaat

SEQ ID NO: 364 - RNA, 21 nt, synthetic construct
  source 1..21: mol_type = other RNA
agaggccttttgtttaaatat

SEQ ID NO: 365 - RNA, 21 nt, synthetic construct
  source 1..21: mol_type = other RNA
ctggattggctataacatgta

SEQ ID NO: 366 - RNA, 21 nt, synthetic construct
  source 1..21: mol_type = other RNA
tggattggctataacatgtct

SEQ ID NO: 367 - RNA, 21 nt, synthetic construct
  source 1..21: mol_type = other RNA
ttggctataacatgtctttca

SEQ ID NO: 368 - RNA, 21 nt, synthetic construct
  source 1..21: mol_type = other RNA
gtctttcagcattaggctttt

SEQ ID NO: 369 - RNA, 21 nt, synthetic construct
  source 1..21: mol_type = other RNA
actaaagatatcagagctctt

SEQ ID NO: 370 - RNA, 21 nt, synthetic construct
  source 1..21: mol_type = other RNA
ctaaagatatcagagctctta

SEQ ID NO: 371 - RNA, 21 nt, synthetic construct
  source 1..21: mol_type = other RNA
aagcaagactgggaccttaga

SEQ ID NO: 372 - RNA, 21 nt, synthetic construct
  source 1..21: mol_type = other RNA
agcaagactgggaccttagaa

SEQ ID NO: 373 - RNA, 21 nt, synthetic construct
  source 1..21: mol_type = other RNA
caagactgggaccttagaaat

SEQ ID NO: 374 - RNA, 21 nt, synthetic construct
  source 1..21: mol_type = other RNA
aagactgggaccttagaaata

SEQ ID NO: 375 - RNA, 21 nt, synthetic construct
  source 1..21: mol_type = other RNA
agactgggaccttagaaatca

SEQ ID NO: 376 - RNA, 21 nt, synthetic construct
  source 1..21: mol_type = other RNA
tctaagccaactttaattgct

SEQ ID NO: 377 - RNA, 21 nt, synthetic construct
  source 1..21: mol_type = other RNA
ttttttgtaaactgtatcaaa

SEQ ID NO: 378 - RNA, 21 nt, synthetic construct
  source 1..21: mol_type = other RNA
tttgtaaactgtatcaaatct

SEQ ID NO: 379 - RNA, 21 nt, synthetic construct
  source 1..21: mol_type = other RNA
tatcaaatctgtatatgttgt

SEQ ID NO: 380 - RNA, 21 nt, synthetic construct
  source 1..21: mol_type = other RNA
tcaaatctgtatatgttgtaa

SEQ ID NO: 381 - RNA, 21 nt, synthetic construct
  source 1..21: mol_type = other RNA
aaatctgtatatgttgtaata

SEQ ID NO: 382 - RNA, 21 nt, synthetic construct
  source 1..21: mol_type = other RNA
aatctgtatatgttgtaataa

SEQ ID NO: 383 - RNA, 21 nt, synthetic construct
  source 1..21: mol_type = other RNA
atctgtatatgttgtaataaa

SEQ ID NO: 384 - RNA, 21 nt, synthetic construct
  source 1..21: mol_type = other RNA
tatgctagtttattggaagta

SEQ ID NO: 385 - RNA, 21 nt, synthetic construct
  source 1..21: mol_type = other RNA
tgctagtttattggaagtgtt

SEQ ID NO: 386 - RNA, 21 nt, synthetic construct
  source 1..21: mol_type = other RNA
attggaagtgttcaagaaata

SEQ ID NO: 387 - RNA, 21 nt, synthetic construct
  source 1..21: mol_type = other RNA
ttggaagtgttcaagaaataa

SEQ ID NO: 388 - RNA, 21 nt, synthetic construct
  source 1..21: mol_type = other RNA
tggaagtgttcaagaaataaa

SEQ ID NO: 389 - RNA, 21 nt, synthetic construct
  source 1..21: mol_type = other RNA
tcaacttgtgtactgataaaa

SEQ ID NO: 390 - RNA, 21 nt, synthetic construct
  source 1..21: mol_type = other RNA
gtcagcagagttattgaatct

SEQ ID NO: 391 - RNA, 21 nt, synthetic construct
  source 1..21: mol_type = other RNA
cagcagagttattgaatctta

SEQ ID NO: 392 - RNA, 21 nt, synthetic construct
  source 1..21: mol_type = other RNA
agcagagttattgaatcttaa

SEQ ID NO: 393 - RNA, 21 nt, synthetic construct
  source 1..21: mol_type = other RNA
cagagttattgaatcttaatt

SEQ ID NO: 394 - RNA, 21 nt, synthetic construct
  source 1..21: mol_type = other RNA
agagttattgaatcttaattt

SEQ ID NO: 395 - RNA, 21 nt, synthetic construct
  source 1..21: mol_type = other RNA
attttttttaatgtacaagtt

SEQ ID NO: 396 - RNA, 21 nt, synthetic construct
  source 1..21: mol_type = other RNA
aaagaactccttattttgtat

SEQ ID NO: 397 - RNA, 21 nt, synthetic construct
  source 1..21: mol_type = other RNA
taatgttttgtacaattacta

SEQ ID NO: 398 - RNA, 21 nt, synthetic construct
  source 1..21: mol_type = other RNA
aattgtatacattttgttata

SEQ ID NO: 399 - RNA, 21 nt, synthetic construct
  source 1..21: mol_type = other RNA
ttgtatacattttgttataga

SEQ ID NO: 400 - RNA, 21 nt, synthetic construct
  source 1..21: mol_type = other RNA
tgtatacattttgttatagaa

SEQ ID NO: 401 - RNA, 21 nt, synthetic construct
  source 1..21: mol_type = other RNA
gtatacattttgttatagaat

SEQ ID NO: 402 - RNA, 21 nt, synthetic construct
  source 1..21: mol_type = other RNA
tatacattttgttatagaata

SEQ ID NO: 403 - RNA, 21 nt, synthetic construct
  source 1..21: mol_type = other RNA
atacattttgttatagaataa

SEQ ID NO: 404 - RNA, 21 nt, synthetic construct
  source 1..21: mol_type = other RNA
acattttgttatagaatactt

SEQ ID NO: 405 - RNA, 21 nt, synthetic construct
  source 1..21: mol_type = other RNA
ttatagaatacttttttctaa

SEQ ID NO: 406 - RNA, 23 nt, synthetic construct
  source 1..23: mol_type = other RNA
aaaaagtcttgacaacattgtag

SEQ ID NO: 407 - RNA, 23 nt, synthetic construct
  source 1..23: mol_type = other RNA
tcgaaaaagtcttgacaacattg

SEQ ID NO: 408 - RNA, 23 nt, synthetic construct
  source 1..23: mol_type = other RNA
ttcgaaaaagtcttgacaacatt

SEQ ID NO: 409 - RNA, 23 nt, synthetic construct
  source 1..23: mol_type = other RNA
attcgaaaaagtcttgacaacat

SEQ ID NO: 410 - RNA, 23 nt, synthetic construct
  source 1..23: mol_type = other RNA
tgcattcgaaaaagtcttgacaa

SEQ ID NO: 411 - RNA, 23 nt, synthetic construct
  source 1..23: mol_type = other RNA
atgcattcgaaaaagtcttgaca

SEQ ID NO: 412 - RNA, 23 nt, synthetic construct
  source 1..23: mol_type = other RNA
tcatgcattcgaaaaagtcttga

SEQ ID NO: 413 - RNA, 23 nt, synthetic construct
  source 1..23: mol_type = other RNA
tacttcccagggatgggaggcca

SEQ ID NO: 414 - RNA, 23 nt, synthetic construct
  source 1..23: mol_type = other RNA
tatgacttcccagggatgggagg

SEQ ID NO: 415 - RNA, 23 nt, synthetic construct
  source 1..23: mol_type = other RNA
atcatgcagatggtcagtgtcac

SEQ ID NO: 416 - RNA, 23 nt, synthetic construct
  source 1..23: mol_type = other RNA
taccagtaaacatgttcatggac

SEQ ID NO: 417 - RNA, 23 nt, synthetic construct
  source 1..23: mol_type = other RNA
tattgttaccagtaaacatgttc

SEQ ID NO: 418 - RNA, 23 nt, synthetic construct
  source 1..23: mol_type = other RNA
ttattgttaccagtaaacatgtt

SEQ ID NO: 419 - RNA, 23 nt, synthetic construct
  source 1..23: mol_type = other RNA
tttattgttaccagtaaacatgt

SEQ ID NO: 420 - RNA, 23 nt, synthetic construct
  source 1..23: mol_type = other RNA
ttccaaccacagatcttattgtt

SEQ ID NO: 421 - RNA, 23 nt, synthetic construct
  source 1..23: mol_type = other RNA
aattccaaccacagatcttattg

SEQ ID NO: 422 - RNA, 23 nt, synthetic construct
  source 1..23: mol_type = other RNA
taattccaaccacagatcttatt

SEQ ID NO: 423 - RNA, 23 nt, synthetic construct
  source 1..23: mol_type = other RNA
aacatcctcttcaaactttggac

SEQ ID NO: 424 - RNA, 23 nt, synthetic construct
  source 1..23: mol_type = other RNA
aaaacatcctcttcaaactttgg

SEQ ID NO: 425 - RNA, 23 nt, synthetic construct
  source 1..23: mol_type = other RNA
attataatgtcactgctcaaaac

SEQ ID NO: 426 - RNA, 23 nt, synthetic construct
  source 1..23: mol_type = other RNA
tgtcagaattataatgtcactgc

SEQ ID NO: 427 - RNA, 23 nt, synthetic construct
  source 1..23: mol_type = other RNA
tattgtcagaattataatgtcac

SEQ ID NO: 428 - RNA, 23 nt, synthetic construct
  source 1..23: mol_type = other RNA
tgttattgtcagaattataatgt

SEQ ID NO: 429 - RNA, 23 nt, synthetic construct
  source 1..23: mol_type = other RNA
tatcgtgttattgtcagaattat

SEQ ID NO: 430 - RNA, 23 nt, synthetic construct
  source 1..23: mol_type = other RNA
tgcatcgtgttattgtcagaatt

SEQ ID NO: 431 - RNA, 23 nt, synthetic construct
  source 1..23: mol_type = other RNA
atgcatcgtgttattgtcagaat

SEQ ID NO: 432 - RNA, 23 nt, synthetic construct
  source 1..23: mol_type = other RNA
tatgcatcgtgttattgtcagaa

SEQ ID NO: 433 - RNA, 23 nt, synthetic construct
  source 1..23: mol_type = other RNA
ttatgcatcgtgttattgtcaga

SEQ ID NO: 434 - RNA, 23 nt, synthetic construct
  source 1..23: mol_type = other RNA
tggaagtaaatatacaggatggc

SEQ ID NO: 435 - RNA, 23 nt, synthetic construct
  source 1..23: mol_type = other RNA
tggaactggaagtaaatatacag

SEQ ID NO: 436 - RNA, 23 nt, synthetic construct
  source 1..23: mol_type = other RNA
tacgtaaattctggaactggaag

SEQ ID NO: 437 - RNA, 23 nt, synthetic construct
  source 1..23: mol_type = other RNA
tttgacgtaaattctggaactgg

SEQ ID NO: 438 - RNA, 23 nt, synthetic construct
  source 1..23: mol_type = other RNA
aagttgacgtaaattctggaact

SEQ ID NO: 439 - RNA, 23 nt, synthetic construct
  source 1..23: mol_type = other RNA
tcaagttgacgtaaattctggaa

SEQ ID NO: 440 - RNA, 23 nt, synthetic construct
  source 1..23: mol_type = other RNA
tccaagttgacgtaaattctgga

SEQ ID NO: 441 - RNA, 23 nt, synthetic construct
  source 1..23: mol_type = other RNA
atccaagttgacgtaaattctgg

SEQ ID NO: 442 - RNA, 23 nt, synthetic construct
  source 1..23: mol_type = other RNA
tttgatccaagttgacgtaaatt

SEQ ID NO: 443 - RNA, 23 nt, synthetic construct
  source 1..23: mol_type = other RNA
ttttgatccaagttgacgtaaat

SEQ ID NO: 444 - RNA, 23 nt, synthetic construct
  source 1..23: mol_type = other RNA
tacaactgtactgaatacaaaac

SEQ ID NO: 445 - RNA, 23 nt, synthetic construct
  source 1..23: mol_type = other RNA
tgaatgacaactgtactgaatac

SEQ ID NO: 446 - RNA, 23 nt, synthetic construct
  source 1..23: mol_type = other RNA
aagaagtgaatgacaactgtact

SEQ ID NO: 447 - RNA, 23 nt, synthetic construct
  source 1..23: mol_type = other RNA
tgtctaagaagtgaatgacaact

SEQ ID NO: 448 - RNA, 23 nt, synthetic construct
  source 1..23: mol_type = other RNA
ttgtctaagaagtgaatgacaac

SEQ ID NO: 449 - RNA, 23 nt, synthetic construct
  source 1..23: mol_type = other RNA
attctttgtctaagaagtgaatg

SEQ ID NO: 450 - RNA, 23 nt, synthetic construct
  source 1..23: mol_type = other RNA
tgtcaattctttgtctaagaagt

SEQ ID NO: 451 - RNA, 23 nt, synthetic construct
  source 1..23: mol_type = other RNA
aagcctgtcaattctttgtctaa

SEQ ID NO: 452 - RNA, 23 nt, synthetic construct
  source 1..23: mol_type = other RNA
ttcaagcctgtcaattctttgtc

SEQ ID NO: 453 - RNA, 23 nt, synthetic construct
  source 1..23: mol_type = other RNA
aactgagggcaaactttgctaat

SEQ ID NO: 454 - RNA, 23 nt, synthetic construct
  source 1..23: mol_type = other RNA
tttcatcctgtgagttggaactg

SEQ ID NO: 455 - RNA, 23 nt, synthetic construct
  source 1..23: mol_type = other RNA
tattccacgagcaatattttccc

SEQ ID NO: 456 - RNA, 23 nt, synthetic construct
  source 1..23: mol_type = other RNA
tcattccacgagcaatattttcc

SEQ ID NO: 457 - RNA, 23 nt, synthetic construct
  source 1..23: mol_type = other RNA
tccattccacgagcaatattttc

SEQ ID NO: 458 - RNA, 23 nt, synthetic construct
  source 1..23: mol_type = other RNA
tgccattccacgagcaatatttt

SEQ ID NO: 459 - RNA, 23 nt, synthetic construct
  source 1..23: mol_type = other RNA
aattgccattccacgagcaatat

SEQ ID NO: 460 - RNA, 23 nt, synthetic construct
  source 1..23: mol_type = other RNA
aaaattgccattccacgagcaat

SEQ ID NO: 461 - RNA, 23 nt, synthetic construct
  source 1..23: mol_type = other RNA
taaaattgccattccacgagcaa

SEQ ID NO: 462 - RNA, 23 nt, synthetic construct
  source 1..23: mol_type = other RNA
tacctaaaattgccattccacga

SEQ ID NO: 463 - RNA, 23 nt, synthetic construct
  source 1..23: mol_type = other RNA
agcatcgagggtaaacgtaggac

SEQ ID NO: 464 - RNA, 23 nt, synthetic construct
  source 1..23: mol_type = other RNA
tagcatcgagggtaaacgtagga

SEQ ID NO: 465 - RNA, 23 nt, synthetic construct
  source 1..23: mol_type = other RNA
tcacaagacattcaacaagagca

SEQ ID NO: 466 - RNA, 23 nt, synthetic construct
  source 1..23: mol_type = other RNA
aatcacaagacattcaacaagag

SEQ ID NO: 467 - RNA, 23 nt, synthetic construct
  source 1..23: mol_type = other RNA
tccaatcacaagacattcaacaa

SEQ ID NO: 468 - RNA, 23 nt, synthetic construct
  source 1..23: mol_type = other RNA
tataatttcaagctgacgtaccc

SEQ ID NO: 469 - RNA, 23 nt, synthetic construct
  source 1..23: mol_type = other RNA
acataatttcaagctgacgtacc

SEQ ID NO: 470 - RNA, 23 nt, synthetic construct
  source 1..23: mol_type = other RNA
tagcacataatttcaagctgacg

SEQ ID NO: 471 - RNA, 23 nt, synthetic construct
  source 1..23: mol_type = other RNA
taaagcagcacataatttcaagc

SEQ ID NO: 472 - RNA, 23 nt, synthetic construct
  source 1..23: mol_type = other RNA
tagccaaagcagcacataatttc

SEQ ID NO: 473 - RNA, 23 nt, synthetic construct
  source 1..23: mol_type = other RNA
aagaactgacatgcagccaaagc

SEQ ID NO: 474 - RNA, 23 nt, synthetic construct
  source 1..23: mol_type = other RNA
tgaacacgaagtagttggcaaga

SEQ ID NO: 475 - RNA, 23 nt, synthetic construct
  source 1..23: mol_type = other RNA
atgaacacgaagtagttggcaag

SEQ ID NO: 476 - RNA, 23 nt, synthetic construct
  source 1..23: mol_type = other RNA
agtcatgaacacgaagtagttgg

SEQ ID NO: 477 - RNA, 23 nt, synthetic construct
  source 1..23: mol_type = other RNA
aaagtcatgaacacgaagtagtt

SEQ ID NO: 478 - RNA, 23 nt, synthetic construct
  source 1..23: mol_type = other RNA
agaaagtcatgaacacgaagtag

SEQ ID NO: 479 - RNA, 23 nt, synthetic construct
  source 1..23: mol_type = other RNA
aagaaagtcatgaacacgaagta

SEQ ID NO: 480 - RNA, 23 nt, synthetic construct
  source 1..23: mol_type = other RNA
tgggaagaaagtcatgaacacga

SEQ ID NO: 481 - RNA, 23 nt, synthetic construct
  source 1..23: mol_type = other RNA
taccaaggacacacaagctggga

SEQ ID NO: 482 - RNA, 23 nt, synthetic construct
  source 1..23: mol_type = other RNA
tctaataccaaggacacacaagc

SEQ ID NO: 483 - RNA, 23 nt, synthetic construct
  source 1..23: mol_type = other RNA
ttcccgagaaagctctaatacca

SEQ ID NO: 484 - RNA, 23 nt, synthetic construct
  source 1..23: mol_type = other RNA
aattggacgaccctcgcggcttt

SEQ ID NO: 485 - RNA, 23 nt, synthetic construct
  source 1..23: mol_type = other RNA
aaattggacgaccctcgcggctt

SEQ ID NO: 486 - RNA, 23 nt, synthetic construct
  source 1..23: mol_type = other RNA
ttcttctaaaactcgggcaaaat

SEQ ID NO: 487 - RNA, 23 nt, synthetic construct
  source 1..23: mol_type = other RNA
ttcttcttctaaaactcgggcaa

SEQ ID NO: 488 - RNA, 23 nt, synthetic construct
  source 1..23: mol_type = other RNA
tcttgaccctctgagttacagga

SEQ ID NO: 489 - RNA, 23 nt, synthetic construct
  source 1..23: mol_type = other RNA
tcatcttgaccctctgagttaca

SEQ ID NO: 490 - RNA, 23 nt, synthetic construct
  source 1..23: mol_type = other RNA
atcatcttgaccctctgagttac

SEQ ID NO: 491 - RNA, 23 nt, synthetic construct
  source 1..23: mol_type = other RNA
taatcatcttgaccctctgagtt

SEQ ID NO: 492 - RNA, 23 nt, synthetic construct
  source 1..23: mol_type = other RNA
ataatcatcttgaccctctgagt

SEQ ID NO: 493 - RNA, 23 nt, synthetic construct
  source 1..23: mol_type = other RNA
tagagacataatcatcttgaccc

SEQ ID NO: 494 - RNA, 23 nt, synthetic construct
  source 1..23: mol_type = other RNA
aagaaccaagcctagagacataa

SEQ ID NO: 495 - RNA, 23 nt, synthetic construct
  source 1..23: mol_type = other RNA
acaagaaccaagcctagagacat

SEQ ID NO: 496 - RNA, 23 nt, synthetic construct
  source 1..23: mol_type = other RNA
tatgaacaagaaccaagcctaga

SEQ ID NO: 497 - RNA, 23 nt, synthetic construct
  source 1..23: mol_type = other RNA
tgactgtgagcatgaacaagaac

SEQ ID NO: 498 - RNA, 23 nt, synthetic construct
  source 1..23: mol_type = other RNA
ttatccagcgactgtgagcatga

SEQ ID NO: 499 - RNA, 23 nt, synthetic construct
  source 1..23: mol_type = other RNA
tctatccagcgactgtgagcatg

SEQ ID NO: 500 - RNA, 23 nt, synthetic construct
  source 1..23: mol_type = other RNA
atcagctatccagcgactgtgag

SEQ ID NO: 501 - RNA, 23 nt, synthetic construct
  source 1..23: mol_type = other RNA
aggatcagctatccagcgactgt

SEQ ID NO: 502 - RNA, 23 nt, synthetic construct
  source 1..23: mol_type = other RNA
agaaggatcagctatccagcgac

SEQ ID NO: 503 - RNA, 23 nt, synthetic construct
  source 1..23: mol_type = other RNA
ttgtactgttttgaggagaagga

SEQ ID NO: 504 - RNA, 23 nt, synthetic construct
  source 1..23: mol_type = other RNA
ttgctgtactgttttgaggagaa

SEQ ID NO: 505 - RNA, 23 nt, synthetic construct
  source 1..23: mol_type = other RNA
tagaagtatctgctgtactgttt

SEQ ID NO: 506 - RNA, 23 nt, synthetic construct
  source 1..23: mol_type = other RNA
ttagaagtatctgctgtactgtt

SEQ ID NO: 507 - RNA, 23 nt, synthetic construct
  source 1..23: mol_type = other RNA
tttagaagtatctgctgtactgt

SEQ ID NO: 508 - RNA, 23 nt, synthetic construct
  source 1..23: mol_type = other RNA
aaccttagaagtatctgctgtac

SEQ ID NO: 509 - RNA, 23 nt, synthetic construct
  source 1..23: mol_type = other RNA
aaaccttagaagtatctgctgta

SEQ ID NO: 510 - RNA, 23 nt, synthetic construct
  source 1..23: mol_type = other RNA
atatccatgctgatcattttaga

SEQ ID NO: 511 - RNA, 23 nt, synthetic construct
  source 1..23: mol_type = other RNA
tcaatatccatgctgatcatttt

SEQ ID NO: 512 - RNA, 23 nt, synthetic construct
  source 1..23: mol_type = other RNA
ttgttcaatatccatgctgatca

SEQ ID NO: 513 - RNA, 23 nt, synthetic construct
  source 1..23: mol_type = other RNA
aataacttgttcaatatccatgc

SEQ ID NO: 514 - RNA, 23 nt, synthetic construct
  source 1..23: mol_type = other RNA
taataacttgttcaatatccatg

SEQ ID NO: 515 - RNA, 23 nt, synthetic construct
  source 1..23: mol_type = other RNA
tagggtaataacttgttcaatat

SEQ ID NO: 516 - RNA, 23 nt, synthetic construct
  source 1..23: mol_type = other RNA
ttagggtaataacttgttcaata

SEQ ID NO: 517 - RNA, 23 nt, synthetic construct
  source 1..23: mol_type = other RNA
acttagggtaataacttgttcaa

SEQ ID NO: 518 - RNA, 23 nt, synthetic construct
  source 1..23: mol_type = other RNA
aacttagggtaataacttgttca

SEQ ID NO: 519 - RNA, 23 nt, synthetic construct
  source 1..23: mol_type = other RNA
aaacttagggtaataacttgttc

SEQ ID NO: 520 - RNA, 23 nt, synthetic construct
  source 1..23: mol_type = other RNA
taaacttagggtaataacttgtt

SEQ ID NO: 521 - RNA, 23 nt, synthetic construct
  source 1..23: mol_type = other RNA
tctaaacttagggtaataacttg

SEQ ID NO: 522 - RNA, 23 nt, synthetic construct
  source 1..23: mol_type = other RNA
ttacttgacagccagaaggagag

SEQ ID NO: 523 - RNA, 23 nt, synthetic construct
  source 1..23: mol_type = other RNA
aagatgtacttgacagccagaag

SEQ ID NO: 524 - RNA, 23 nt, synthetic construct
  source 1..23: mol_type = other RNA
ttcaaagaagatgtacttgacag

SEQ ID NO: 525 - RNA, 23 nt, synthetic construct
  source 1..23: mol_type = other RNA
tgttcaaagaagatgtacttgac

SEQ ID NO: 526 - RNA, 23 nt, synthetic construct
  source 1..23: mol_type = other RNA
ttgttcaaagaagatgtacttga

SEQ ID NO: 527 - RNA, 23 nt, synthetic construct
  source 1..23: mol_type = other RNA
agagtgtagattctgtctctgtt

SEQ ID NO: 528 - RNA, 23 nt, synthetic construct
  source 1..23: mol_type = other RNA
agatgtgatagggttttttaatg

SEQ ID NO: 529 - RNA, 23 nt, synthetic construct
  source 1..23: mol_type = other RNA
tactacaggagatgtgatagggt

SEQ ID NO: 530 - RNA, 23 nt, synthetic construct
  source 1..23: mol_type = other RNA
ttcactacaggagatgtgatagg

SEQ ID NO: 531 - RNA, 23 nt, synthetic construct
  source 1..23: mol_type = other RNA
taggttcacgtctacaacaattg

SEQ ID NO: 532 - RNA, 23 nt, synthetic construct
  source 1..23: mol_type = other RNA
tcggtttatccctgtctcttcct

SEQ ID NO: 533 - RNA, 23 nt, synthetic construct
  source 1..23: mol_type = other RNA
ttcggtttatccctgtctcttcc

SEQ ID NO: 534 - RNA, 23 nt, synthetic construct
  source 1..23: mol_type = other RNA
tctcggtttatccctgtctcttc

SEQ ID NO: 535 - RNA, 23 nt, synthetic construct
  source 1..23: mol_type = other RNA
ttctcggtttatccctgtctctt

SEQ ID NO: 536 - RNA, 23 nt, synthetic construct
  source 1..23: mol_type = other RNA
tttctcggtttatccctgtctct

SEQ ID NO: 537 - RNA, 23 nt, synthetic construct
  source 1..23: mol_type = other RNA
ttttctcggtttatccctgtctc

SEQ ID NO: 538 - RNA, 23 nt, synthetic construct
  source 1..23: mol_type = other RNA
tctttctcggtttatccctgtct

SEQ ID NO: 539 - RNA, 23 nt, synthetic construct
  source 1..23: mol_type = other RNA
ttctttctcggtttatccctgtc

SEQ ID NO: 540 - RNA, 23 nt, synthetic construct
  source 1..23: mol_type = other RNA
tttctttctcggtttatccctgt

SEQ ID NO: 541 - RNA, 23 nt, synthetic construct
  source 1..23: mol_type = other RNA
tcaacttttctttctcggtttat

SEQ ID NO: 542 - RNA, 23 nt, synthetic construct
  source 1..23: mol_type = other RNA
taagggttttataacctcaactt

SEQ ID NO: 543 - RNA, 23 nt, synthetic construct
  source 1..23: mol_type = other RNA
tccactaagggttttataacctc

SEQ ID NO: 544 - RNA, 23 nt, synthetic construct
  source 1..23: mol_type = other RNA
ttgtttcagccactaagggtttt

SEQ ID NO: 545 - RNA, 23 nt, synthetic construct
  source 1..23: mol_type = other RNA
tctgtttcagccactaagggttt

SEQ ID NO: 546 - RNA, 23 nt, synthetic construct
  source 1..23: mol_type = other RNA
atctgtttcagccactaagggtt

SEQ ID NO: 547 - RNA, 23 nt, synthetic construct
  source 1..23: mol_type = other RNA
tatctgtttcagccactaagggt

SEQ ID NO: 548 - RNA, 23 nt, synthetic construct
  source 1..23: mol_type = other RNA
tcaaccacaaatgtagctctgtt

SEQ ID NO: 549 - RNA, 23 nt, synthetic construct
  source 1..23: mol_type = other RNA
ttaccaaccacaaatgtagctct

SEQ ID NO: 550 - RNA, 23 nt, synthetic construct
  source 1..23: mol_type = other RNA
aagtatcgagtaaggaggagtta

SEQ ID NO: 551 - RNA, 23 nt, synthetic construct
  source 1..23: mol_type = other RNA
taagtatcgagtaaggaggagtt

SEQ ID NO: 552 - RNA, 23 nt, synthetic construct
  source 1..23: mol_type = other RNA
tttcaggttcctgtgtcaccagt

SEQ ID NO: 553 - RNA, 23 nt, synthetic construct
  source 1..23: mol_type = other RNA
tactaaggaattttgcacctttc

SEQ ID NO: 554 - RNA, 23 nt, synthetic construct
  source 1..23: mol_type = other RNA
tatctcagcatcactaaggaatt

SEQ ID NO: 555 - RNA, 23 nt, synthetic construct
  source 1..23: mol_type = other RNA
tggatgatctcagcatcactaag

SEQ ID NO: 556 - RNA, 23 nt, synthetic construct
  source 1..23: mol_type = other RNA
taactggatgatctcagcatcac

SEQ ID NO: 557 - RNA, 23 nt, synthetic construct
  source 1..23: mol_type = other RNA
actaactggatgatctcagcatc

SEQ ID NO: 558 - RNA, 23 nt, synthetic construct
  source 1..23: mol_type = other RNA
ttgactaactggatgatctcagc

SEQ ID NO: 559 - RNA, 23 nt, synthetic construct
  source 1..23: mol_type = other RNA
attgactaactggatgatctcag

SEQ ID NO: 560 - RNA, 23 nt, synthetic construct
  source 1..23: mol_type = other RNA
tattgactaactggatgatctca

SEQ ID NO: 561 - RNA, 23 nt, synthetic construct
  source 1..23: mol_type = other RNA
agcattgactaactggatgatct

SEQ ID NO: 562 - RNA, 23 nt, synthetic construct
  source 1..23: mol_type = other RNA
ttagcattgactaactggatgat

SEQ ID NO: 563 - RNA, 23 nt, synthetic construct
  source 1..23: mol_type = other RNA
tcttagcattgactaactggatg

SEQ ID NO: 564 - RNA, 23 nt, synthetic construct
  source 1..23: mol_type = other RNA
tgcttagcattgactaactggat

SEQ ID NO: 565 - RNA, 23 nt, synthetic construct
  source 1..23: mol_type = other RNA
atgcttagcattgactaactgga

SEQ ID NO: 566 - RNA, 23 nt, synthetic construct
  source 1..23: mol_type = other RNA
tatgcttagcattgactaactgg

SEQ ID NO: 567 - RNA, 23 nt, synthetic construct
  source 1..23: mol_type = other RNA
atatgcttagcattgactaactg

SEQ ID NO: 568 - RNA, 23 nt, synthetic construct
  source 1..23: mol_type = other RNA
tatatgcttagcattgactaact

SEQ ID NO: 569 - RNA, 23 nt, synthetic construct
  source 1..23: mol_type = other RNA
tgggatatgcttagcattgacta

SEQ ID NO: 570 - RNA, 23 nt, synthetic construct
  source 1..23: mol_type = other RNA
taggctgggatatgcttagcatt

SEQ ID NO: 571 - RNA, 23 nt, synthetic construct
  source 1..23: mol_type = other RNA
ttgtaggctgggatatgcttagc

SEQ ID NO: 572 - RNA, 23 nt, synthetic construct
  source 1..23: mol_type = other RNA
aacttgtaggctgggatatgctt

SEQ ID NO: 573 - RNA, 23 nt, synthetic construct
  source 1..23: mol_type = other RNA
taacttgtaggctgggatatgct

SEQ ID NO: 574 - RNA, 23 nt, synthetic construct
  source 1..23: mol_type = other RNA
tcaacttgtaggctgggatatgc

SEQ ID NO: 575 - RNA, 23 nt, synthetic construct
  source 1..23: mol_type = other RNA
tttccaacttgtaggctgggata

SEQ ID NO: 576 - RNA, 23 nt, synthetic construct
  source 1..23: mol_type = other RNA
agagtttccaacttgtaggctgg

SEQ ID NO: 577 - RNA, 23 nt, synthetic construct
  source 1..23: mol_type = other RNA
atcagagtttccaacttgtaggc

SEQ ID NO: 578 - RNA, 23 nt, synthetic construct
  source 1..23: mol_type = other RNA
tccatcagagtttccaacttgta

SEQ ID NO: 579 - RNA, 23 nt, synthetic construct
  source 1..23: mol_type = other RNA
ttccatcagagtttccaacttgt

SEQ ID NO: 580 - RNA, 23 nt, synthetic construct
  source 1..23: mol_type = other RNA
tgagtttccatcagagtttccaa

SEQ ID NO: 581 - RNA, 23 nt, synthetic construct
  source 1..23: mol_type = other RNA
tacaccacgctcatgagtttcca

SEQ ID NO: 582 - RNA, 23 nt, synthetic construct
  source 1..23: mol_type = other RNA
tatacaccacgctcatgagtttc

SEQ ID NO: 583 - RNA, 23 nt, synthetic construct
  source 1..23: mol_type = other RNA
agatacaccacgctcatgagttt

SEQ ID NO: 584 - RNA, 23 nt, synthetic construct
  source 1..23: mol_type = other RNA
tagatacaccacgctcatgagtt

SEQ ID NO: 585 - RNA, 23 nt, synthetic construct
  source 1..23: mol_type = other RNA
atagatacaccacgctcatgagt

SEQ ID NO: 586 - RNA, 23 nt, synthetic construct
  source 1..23: mol_type = other RNA
aatagatacaccacgctcatgag

SEQ ID NO: 587 - RNA, 23 nt, synthetic construct
  source 1..23: mol_type = other RNA
taatagatacaccacgctcatga

SEQ ID NO: 588 - RNA, 23 nt, synthetic construct
  source 1..23: mol_type = other RNA
tgaatagatacaccacgctcatg

SEQ ID NO: 589 - RNA, 23 nt, synthetic construct
  source 1..23: mol_type = other RNA
tcgaatagatacaccacgctcat

SEQ ID NO: 590 - RNA, 23 nt, synthetic construct
  source 1..23: mol_type = other RNA
tataatccctgtaaggtaggtac

SEQ ID NO: 591 - RNA, 23 nt, synthetic construct
  source 1..23: mol_type = other RNA
ttataatccctgtaaggtaggta

SEQ ID NO: 592 - RNA, 23 nt, synthetic construct
  source 1..23: mol_type = other RNA
attataatccctgtaaggtaggt

SEQ ID NO: 593 - RNA, 23 nt, synthetic construct
  source 1..23: mol_type = other RNA
tgagtaattataatccctgtaag

SEQ ID NO: 594 - RNA, 23 nt, synthetic construct
  source 1..23: mol_type = other RNA
tatccaataacattctcacaaca

SEQ ID NO: 595 - RNA, 23 nt, synthetic construct
  source 1..23: mol_type = other RNA
tatccaataacattctcacaaca

SEQ ID NO: 596 - RNA, 23 nt, synthetic construct
  source 1..23: mol_type = other RNA
tatccaataacattctcacaaca

SEQ ID NO: 597 - RNA, 23 nt, synthetic construct
  source 1..23: mol_type = other RNA
atctgcaaggactcggctgctgg

SEQ ID NO: 598 - RNA, 23 nt, synthetic construct
  source 1..23: mol_type = other RNA
tacgagtcatcccatctgcaagg

SEQ ID NO: 599 - RNA, 23 nt, synthetic construct
  source 1..23: mol_type = other RNA
tcacgagtcatcccatctgcaag

SEQ ID NO: 600 - RNA, 23 nt, synthetic construct
  source 1..23: mol_type = other RNA
tgccacgagtcatcccatctgca

SEQ ID NO: 601 - RNA, 23 nt, synthetic construct
  source 1..23: mol_type = other RNA
tggccacgagtcatcccatctgc

SEQ ID NO: 602 - RNA, 23 nt, synthetic construct
  source 1..23: mol_type = other RNA
acgcacaactgggccacgagtca

SEQ ID NO: 603 - RNA, 23 nt, synthetic construct
  source 1..23: mol_type = other RNA
acgtggaagacgcacaactgggc

SEQ ID NO: 604 - RNA, 23 nt, synthetic construct
  source 1..23: mol_type = other RNA
agcacgtggaagacgcacaactg

SEQ ID NO: 605 - RNA, 23 nt, synthetic construct
  source 1..23: mol_type = other RNA
tttcgagccaggctttcacttct

SEQ ID NO: 606 - RNA, 23 nt, synthetic construct
  source 1..23: mol_type = other RNA
ttttcgagccaggctttcacttc

SEQ ID NO: 607 - RNA, 23 nt, synthetic construct
  source 1..23: mol_type = other RNA
ttcagatgtttcgagccaggctt

SEQ ID NO: 608 - RNA, 23 nt, synthetic construct
  source 1..23: mol_type = other RNA
tcttcagatgtttcgagccaggc

SEQ ID NO: 609 - RNA, 23 nt, synthetic construct
  source 1..23: mol_type = other RNA
tgcgaacccttcagatgtttcga

SEQ ID NO: 610 - RNA, 23 nt, synthetic construct
  source 1..23: mol_type = other RNA
ttgcgaacccttcagatgtttcg

SEQ ID NO: 611 - RNA, 23 nt, synthetic construct
  source 1..23: mol_type = other RNA
tatcactgcgaacccttcagatg

SEQ ID NO: 612 - RNA, 23 nt, synthetic construct
  source 1..23: mol_type = other RNA
ttatcactgcgaacccttcagat

SEQ ID NO: 613 - RNA, 23 nt, synthetic construct
  source 1..23: mol_type = other RNA
tttatcactgcgaacccttcaga

SEQ ID NO: 614 - RNA, 23 nt, synthetic construct
  source 1..23: mol_type = other RNA
ttttatcactgcgaacccttcag

SEQ ID NO: 615 - RNA, 23 nt, synthetic construct
  source 1..23: mol_type = other RNA
tcctttatcactgcgaacccttc

SEQ ID NO: 616 - RNA, 23 nt, synthetic construct
  source 1..23: mol_type = other RNA
tgctagtgctgtcaaatgcctcc

SEQ ID NO: 617 - RNA, 23 nt, synthetic construct
  source 1..23: mol_type = other RNA
tctgctagtgctgtcaaatgcct

SEQ ID NO: 618 - RNA, 23 nt, synthetic construct
  source 1..23: mol_type = other RNA
aaatctgctagtgctgtcaaatg

SEQ ID NO: 619 - RNA, 23 nt, synthetic construct
  source 1..23: mol_type = other RNA
taaatctgctagtgctgtcaaat

SEQ ID NO: 620 - RNA, 23 nt, synthetic construct
  source 1..23: mol_type = other RNA
tgcaaatctgctagtgctgtcaa

SEQ ID NO: 621 - RNA, 23 nt, synthetic construct
  source 1..23: mol_type = other RNA
tacgtgcaaatctgctagtgctg

SEQ ID NO: 622 - RNA, 23 nt, synthetic construct
  source 1..23: mol_type = other RNA
agacgtgcaaatctgctagtgct

SEQ ID NO: 623 - RNA, 23 nt, synthetic construct
  source 1..23: mol_type = other RNA
ttagacgtgcaaatctgctagtg

SEQ ID NO: 624 - RNA, 23 nt, synthetic construct
  source 1..23: mol_type = other RNA
tgtagacgtgcaaatctgctagt

SEQ ID NO: 625 - RNA, 23 nt, synthetic construct
  source 1..23: mol_type = other RNA
ttgtagacgtgcaaatctgctag

SEQ ID NO: 626 - RNA, 23 nt, synthetic construct
  source 1..23: mol_type = other RNA
ttttctgtagacgtgcaaatctg

SEQ ID NO: 627 - RNA, 23 nt, synthetic construct
  source 1..23: mol_type = other RNA
aagtttctgtagacgtgcaaatc

SEQ ID NO: 628 - RNA, 23 nt, synthetic construct
  source 1..23: mol_type = other RNA
taagtttctgtagacgtgcaaat

SEQ ID NO: 629 - RNA, 23 nt, synthetic construct
  source 1..23: mol_type = other RNA
tataaaggttgcgtccagctata

SEQ ID NO: 630 - RNA, 23 nt, synthetic construct
  source 1..23: mol_type = other RNA
tgatataaaggttgcgtccagct

SEQ ID NO: 631 - RNA, 23 nt, synthetic construct
  source 1..23: mol_type = other RNA
acggatataaaggttgcgtccag

SEQ ID NO: 632 - RNA, 23 nt, synthetic construct
  source 1..23: mol_type = other RNA
aacggatataaaggttgcgtcca

SEQ ID NO: 633 - RNA, 23 nt, synthetic construct
  source 1..23: mol_type = other RNA
aaacggatataaaggttgcgtcc

SEQ ID NO: 634 - RNA, 23 nt, synthetic construct
  source 1..23: mol_type = other RNA
taaacggatataaaggttgcgtc

SEQ ID NO: 635 - RNA, 23 nt, synthetic construct
  source 1..23: mol_type = other RNA
tggaaacggatataaaggttgcg

SEQ ID NO: 636 - RNA, 23 nt, synthetic construct
  source 1..23: mol_type = other RNA
tctctgtaccctttgaaatcatg

SEQ ID NO: 637 - RNA, 23 nt, synthetic construct
  source 1..23: mol_type = other RNA
tacaatagttaccactaacggct

SEQ ID NO: 638 - RNA, 23 nt, synthetic construct
  source 1..23: mol_type = other RNA
ttacaatagttaccactaacggc

SEQ ID NO: 639 - RNA, 23 nt, synthetic construct
  source 1..23: mol_type = other RNA
tagtacaatagttaccactaacg

SEQ ID NO: 640 - RNA, 23 nt, synthetic construct
  source 1..23: mol_type = other RNA
tgtcagtacaatagttaccacta

SEQ ID NO: 641 - RNA, 23 nt, synthetic construct
  source 1..23: mol_type = other RNA
ttgtcagtacaatagttaccact

SEQ ID NO: 642 - RNA, 23 nt, synthetic construct
  source 1..23: mol_type = other RNA
ttcttgtcagtacaatagttacc

SEQ ID NO: 643 - RNA, 23 nt, synthetic construct
  source 1..23: mol_type = other RNA
aggtttcttgtcagtacaatagt

SEQ ID NO: 644 - RNA, 23 nt, synthetic construct
  source 1..23: mol_type = other RNA
ttatagcagcaggtttcttgtca

SEQ ID NO: 645 - RNA, 23 nt, synthetic construct
  source 1..23: mol_type = other RNA
aatgacagcttcacaaacaacag

SEQ ID NO: 646 - RNA, 23 nt, synthetic construct
  source 1..23: mol_type = other RNA
tacttctctgacaaccttggctg

SEQ ID NO: 647 - RNA, 23 nt, synthetic construct
  source 1..23: mol_type = other RNA
aatacttctctgacaaccttggc

SEQ ID NO: 648 - RNA, 23 nt, synthetic construct
  source 1..23: mol_type = other RNA
ttaatacttctctgacaaccttg

SEQ ID NO: 649 - RNA, 23 nt, synthetic construct
  source 1..23: mol_type = other RNA
tttaatacttctctgacaacctt

SEQ ID NO: 650 - RNA, 23 nt, synthetic construct
  source 1..23: mol_type = other RNA
tctttaatacttctctgacaacc

SEQ ID NO: 651 - RNA, 23 nt, synthetic construct
  source 1..23: mol_type = other RNA
tagtctttaatacttctctgaca

SEQ ID NO: 652 - RNA, 23 nt, synthetic construct
  source 1..23: mol_type = other RNA
tgtagtctttaatacttctctga

SEQ ID NO: 653 - RNA, 23 nt, synthetic construct
  source 1..23: mol_type = other RNA
tggtagtctttaatacttctctg

SEQ ID NO: 654 - RNA, 23 nt, synthetic construct
  source 1..23: mol_type = other RNA
ttggtagtctttaatacttctct

SEQ ID NO: 655 - RNA, 23 nt, synthetic construct
  source 1..23: mol_type = other RNA
tttgacctcaatcatagcctctg

SEQ ID NO: 656 - RNA, 23 nt, synthetic construct
  source 1..23: mol_type = other RNA
tgttgacctcaatcatagcctct

SEQ ID NO: 657 - RNA, 23 nt, synthetic construct
  source 1..23: mol_type = other RNA
atgttgacctcaatcatagcctc

SEQ ID NO: 658 - RNA, 23 nt, synthetic construct
  source 1..23: mol_type = other RNA
aatgttgacctcaatcatagcct

SEQ ID NO: 659 - RNA, 23 nt, synthetic construct
  source 1..23: mol_type = other RNA
ttaatgttgacctcaatcatagc

SEQ ID NO: 660 - RNA, 23 nt, synthetic construct
  source 1..23: mol_type = other RNA
tttaatgttgacctcaatcatag

SEQ ID NO: 661 - RNA, 23 nt, synthetic construct
  source 1..23: mol_type = other RNA
tcttgttaatgttgacctcaatc

SEQ ID NO: 662 - RNA, 23 nt, synthetic construct
  source 1..23: mol_type = other RNA
ttcttgttaatgttgacctcaat

SEQ ID NO: 663 - RNA, 23 nt, synthetic construct
  source 1..23: mol_type = other RNA
actaaattcttgttaatgttgac

SEQ ID NO: 664 - RNA, 23 nt, synthetic construct
  source 1..23: mol_type = other RNA
tccactaaattcttgttaatgtt

SEQ ID NO: 665 - RNA, 23 nt, synthetic construct
  source 1..23: mol_type = other RNA
tagcccactaaattcttgttaat

SEQ ID NO: 666 - RNA, 23 nt, synthetic construct
  source 1..23: mol_type = other RNA
tggcagagcccactaaattcttg

SEQ ID NO: 667 - RNA, 23 nt, synthetic construct
  source 1..23: mol_type = other RNA
tctatgctcccagccatggcaga

SEQ ID NO: 668 - RNA, 23 nt, synthetic construct
  source 1..23: mol_type = other RNA
tcctatgctcccagccatggcag

SEQ ID NO: 669 - RNA, 23 nt, synthetic construct
  source 1..23: mol_type = other RNA
ttgtagcctcctatgctcccagc

SEQ ID NO: 670 - RNA, 23 nt, synthetic construct
  source 1..23: mol_type = other RNA
tgcgttgtagcctcctatgctcc

SEQ ID NO: 671 - RNA, 23 nt, synthetic construct
  source 1..23: mol_type = other RNA
tggcgttgtagcctcctatgctc

SEQ ID NO: 672 - RNA, 23 nt, synthetic construct
  source 1..23: mol_type = other RNA
tcatgggcgttgtagcctcctat

SEQ ID NO: 673 - RNA, 23 nt, synthetic construct
  source 1..23: mol_type = other RNA
tttgctgcatgggcgttgtagcc

SEQ ID NO: 674 - RNA, 23 nt, synthetic construct
  source 1..23: mol_type = other RNA
tgtttgctgcatgggcgttgtag

SEQ ID NO: 675 - RNA, 23 nt, synthetic construct
  source 1..23: mol_type = other RNA
tgacaatgtttgctgcatgggcg

SEQ ID NO: 676 - RNA, 23 nt, synthetic construct
  source 1..23: mol_type = other RNA
ttgacaatgtttgctgcatgggc

SEQ ID NO: 677 - RNA, 23 nt, synthetic construct
  source 1..23: mol_type = other RNA
tccacaggcaatgtagatggcgg

SEQ ID NO: 678 - RNA, 23 nt, synthetic construct
  source 1..23: mol_type = other RNA
acattctgtgctgcatcctgtcc

SEQ ID NO: 679 - RNA, 23 nt, synthetic construct
  source 1..23: mol_type = other RNA
aacattctgtgctgcatcctgtc

SEQ ID NO: 680 - RNA, 23 nt, synthetic construct
  source 1..23: mol_type = other RNA
taccaacattctgtgctgcatcc

SEQ ID NO: 681 - RNA, 23 nt, synthetic construct
  source 1..23: mol_type = other RNA
actaccaacattctgtgctgcat

SEQ ID NO: 682 - RNA, 23 nt, synthetic construct
  source 1..23: mol_type = other RNA
tgaactaccaacattctgtgctg

SEQ ID NO: 683 - RNA, 23 nt, synthetic construct
  source 1..23: mol_type = other RNA
tataaatcttcatttgtgggacc

SEQ ID NO: 684 - RNA, 23 nt, synthetic construct
  source 1..23: mol_type = other RNA
atatataaatcttcatttgtggg

SEQ ID NO: 685 - RNA, 23 nt, synthetic construct
  source 1..23: mol_type = other RNA
tgatatataaatcttcatttgtg

SEQ ID NO: 686 - RNA, 23 nt, synthetic construct
  source 1..23: mol_type = other RNA
tagatggcatggtgcagctgata

SEQ ID NO: 687 - RNA, 23 nt, synthetic construct
  source 1..23: mol_type = other RNA
ttcctatctctatagatggcatg

SEQ ID NO: 688 - RNA, 23 nt, synthetic construct
  source 1..23: mol_type = other RNA
tgaacacctagcatctgcaaaca

SEQ ID NO: 689 - RNA, 23 nt, synthetic construct
  source 1..23: mol_type = other RNA
ttgaacacctagcatctgcaaac

SEQ ID NO: 690 - RNA, 23 nt, synthetic construct
  source 1..23: mol_type = other RNA
tccttgaacacctagcatctgca

SEQ ID NO: 691 - RNA, 23 nt, synthetic construct
  source 1..23: mol_type = other RNA
ttgcatgctccttgaacacctag

SEQ ID NO: 692 - RNA, 23 nt, synthetic construct
  source 1..23: mol_type = other RNA
tttgcatgctccttgaacaccta

SEQ ID NO: 693 - RNA, 23 nt, synthetic construct
  source 1..23: mol_type = other RNA
tatctttgcatgctccttgaaca

SEQ ID NO: 694 - RNA, 23 nt, synthetic construct
  source 1..23: mol_type = other RNA
ttatctttgcatgctccttgaac

SEQ ID NO: 695 - RNA, 23 nt, synthetic construct
  source 1..23: mol_type = other RNA
attatctttgcatgctccttgaa

SEQ ID NO: 696 - RNA, 23 nt, synthetic construct
  source 1..23: mol_type = other RNA
attttccccaggattatctttgc

SEQ ID NO: 697 - RNA, 23 nt, synthetic construct
  source 1..23: mol_type = other RNA
tcaagctgccgggcattttcccc

SEQ ID NO: 698 - RNA, 23 nt, synthetic construct
  source 1..23: mol_type = other RNA
aattcgggcaagctgccgggcat

SEQ ID NO: 699 - RNA, 23 nt, synthetic construct
  source 1..23: mol_type = other RNA
acacacaattcgggcaagctgcc

SEQ ID NO: 700 - RNA, 23 nt, synthetic construct
  source 1..23: mol_type = other RNA
acaattccccagccattacggtc

SEQ ID NO: 701 - RNA, 23 nt, synthetic construct
  source 1..23: mol_type = other RNA
aatgctgccataagtgacaattc

SEQ ID NO: 702 - RNA, 23 nt, synthetic construct
  source 1..23: mol_type = other RNA
tccaatgctgccataagtgacaa

SEQ ID NO: 703 - RNA, 23 nt, synthetic construct
  source 1..23: mol_type = other RNA
tcgacctgttgtgaatcatgtga

SEQ ID NO: 704 - RNA, 23 nt, synthetic construct
  source 1..23: mol_type = other RNA
ttcgacctgttgtgaatcatgtg

SEQ ID NO: 705 - RNA, 23 nt, synthetic construct
  source 1..23: mol_type = other RNA
tttcgacctgttgtgaatcatgt

SEQ ID NO: 706 - RNA, 23 nt, synthetic construct
  source 1..23: mol_type = other RNA
tcttcgacctgttgtgaatcatg

SEQ ID NO: 707 - RNA, 23 nt, synthetic construct
  source 1..23: mol_type = other RNA
atcttcgacctgttgtgaatcat

SEQ ID NO: 708 - RNA, 23 nt, synthetic construct
  source 1..23: mol_type = other RNA
tgatcttcgacctgttgtgaatc

SEQ ID NO: 709 - RNA, 23 nt, synthetic construct
  source 1..23: mol_type = other RNA
ttgatcttcgacctgttgtgaat

SEQ ID NO: 710 - RNA, 23 nt, synthetic construct
  source 1..23: mol_type = other RNA
attgatcttcgacctgttgtgaa

SEQ ID NO: 711 - RNA, 23 nt, synthetic construct
  source 1..23: mol_type = other RNA
aaattgatcttcgacctgttgtg

SEQ ID NO: 712 - RNA, 23 nt, synthetic construct
  source 1..23: mol_type = other RNA
taaattgatcttcgacctgttgt

SEQ ID NO: 713 - RNA, 23 nt, synthetic construct
  source 1..23: mol_type = other RNA
tgtaaattgatcttcgacctgtt

SEQ ID NO: 714 - RNA, 23 nt, synthetic construct
  source 1..23: mol_type = other RNA
ttgtaaattgatcttcgacctgt

SEQ ID NO: 715 - RNA, 23 nt, synthetic construct
  source 1..23: mol_type = other RNA
tttgtaaattgatcttcgacctg

SEQ ID NO: 716 - RNA, 23 nt, synthetic construct
  source 1..23: mol_type = other RNA
tcttgtaaattgatcttcgacct

SEQ ID NO: 717 - RNA, 23 nt, synthetic construct
  source 1..23: mol_type = other RNA
ttcttgtaaattgatcttcgacc

SEQ ID NO: 718 - RNA, 23 nt, synthetic construct
  source 1..23: mol_type = other RNA
aggtcttgtaaattgatcttcga

SEQ ID NO: 719 - RNA, 23 nt, synthetic construct
  source 1..23: mol_type = other RNA
taggtcttgtaaattgatcttcg

SEQ ID NO: 720 - RNA, 23 nt, synthetic construct
  source 1..23: mol_type = other RNA
tgaggtcttgtaaattgatcttc

SEQ ID NO: 721 - RNA, 23 nt, synthetic construct
  source 1..23: mol_type = other RNA
tggaggtcttgtaaattgatctt

SEQ ID NO: 722 - RNA, 23 nt, synthetic construct
  source 1..23: mol_type = other RNA
ttggaggtcttgtaaattgatct

SEQ ID NO: 723 - RNA, 23 nt, synthetic construct
  source 1..23: mol_type = other RNA
agattttatgttagtcctttaga

SEQ ID NO: 724 - RNA, 23 nt, synthetic construct
  source 1..23: mol_type = other RNA
tagattttatgttagtcctttag

SEQ ID NO: 725 - RNA, 23 nt, synthetic construct
  source 1..23: mol_type = other RNA
aagaacctgagacctctctgaaa

SEQ ID NO: 726 - RNA, 23 nt, synthetic construct
  source 1..23: mol_type = other RNA
tggaaagaacctgagacctctct

SEQ ID NO: 727 - RNA, 23 nt, synthetic construct
  source 1..23: mol_type = other RNA
tgcatggaaagaacctgagacct

SEQ ID NO: 728 - RNA, 23 nt, synthetic construct
  source 1..23: mol_type = other RNA
tctgcatggaaagaacctgagac

SEQ ID NO: 729 - RNA, 23 nt, synthetic construct
  source 1..23: mol_type = other RNA
tgtaaagcactaaactgtgttca

SEQ ID NO: 730 - RNA, 23 nt, synthetic construct
  source 1..23: mol_type = other RNA
aaagagcacagcatgtaaagcac

SEQ ID NO: 731 - RNA, 23 nt, synthetic construct
  source 1..23: mol_type = other RNA
taggtgagctgtagattaccatc

SEQ ID NO: 732 - RNA, 23 nt, synthetic construct
  source 1..23: mol_type = other RNA
tttgccttcagaggtgagctgta

SEQ ID NO: 733 - RNA, 23 nt, synthetic construct
  source 1..23: mol_type = other RNA
atatttgccttcagaggtgagct

SEQ ID NO: 734 - RNA, 23 nt, synthetic construct
  source 1..23: mol_type = other RNA
aagaatttcatcaaaactttttt

SEQ ID NO: 735 - RNA, 23 nt, synthetic construct
  source 1..23: mol_type = other RNA
ttcaagaatttcatcaaaacttt

SEQ ID NO: 736 - RNA, 23 nt, synthetic construct
  source 1..23: mol_type = other RNA
aacttcaagaatttcatcaaaac

SEQ ID NO: 737 - RNA, 23 nt, synthetic construct
  source 1..23: mol_type = other RNA
tgaacttcaagaatttcatcaaa

SEQ ID NO: 738 - RNA, 23 nt, synthetic construct
  source 1..23: mol_type = other RNA
atgaacttcaagaatttcatcaa

SEQ ID NO: 739 - RNA, 23 nt, synthetic construct
  source 1..23: mol_type = other RNA
atcaccatgaacttcaagaattt

SEQ ID NO: 740 - RNA, 23 nt, synthetic construct
  source 1..23: mol_type = other RNA
attgcactgatcaccatgaactt

SEQ ID NO: 741 - RNA, 23 nt, synthetic construct
  source 1..23: mol_type = other RNA
tcaattgcactgatcaccatgaa

SEQ ID NO: 742 - RNA, 23 nt, synthetic construct
  source 1..23: mol_type = other RNA
ttcaattgcactgatcaccatga

SEQ ID NO: 743 - RNA, 23 nt, synthetic construct
  source 1..23: mol_type = other RNA
aactacaaaatcaggagtttcat

SEQ ID NO: 744 - RNA, 23 nt, synthetic construct
  source 1..23: mol_type = other RNA
taactacaaaatcaggagtttca

SEQ ID NO: 745 - RNA, 23 nt, synthetic construct
  source 1..23: mol_type = other RNA
ttaactacaaaatcaggagtttc

SEQ ID NO: 746 - RNA, 23 nt, synthetic construct
  source 1..23: mol_type = other RNA
attaactacaaaatcaggagttt

SEQ ID NO: 747 - RNA, 23 nt, synthetic construct
  source 1..23: mol_type = other RNA
aaattaactacaaaatcaggagt

SEQ ID NO: 748 - RNA, 23 nt, synthetic construct
  source 1..23: mol_type = other RNA
taaattaactacaaaatcaggag

SEQ ID NO: 749 - RNA, 23 nt, synthetic construct
  source 1..23: mol_type = other RNA
tacatcccagacttaataaatta

SEQ ID NO: 750 - RNA, 23 nt, synthetic construct
  source 1..23: mol_type = other RNA
ttacatcccagacttaataaatt

SEQ ID NO: 751 - RNA, 23 nt, synthetic construct
  source 1..23: mol_type = other RNA
ttcttgaagttctacatcccaga

SEQ ID NO: 752 - RNA, 23 nt, synthetic construct
  source 1..23: mol_type = other RNA
acttcttgaagttctacatccca

SEQ ID NO: 753 - RNA, 23 nt, synthetic construct
  source 1..23: mol_type = other RNA
tacttcttgaagttctacatccc

SEQ ID NO: 754 - RNA, 23 nt, synthetic construct
  source 1..23: mol_type = other RNA
ttagctcttacttcttgaagttc

SEQ ID NO: 755 - RNA, 23 nt, synthetic construct
  source 1..23: mol_type = other RNA
acttagctcttacttcttgaagt

SEQ ID NO: 756 - RNA, 23 nt, synthetic construct
  source 1..23: mol_type = other RNA
taacttagctcttacttcttgaa

SEQ ID NO: 757 - RNA, 23 nt, synthetic construct
  source 1..23: mol_type = other RNA
agaataatgctgattacccccca

SEQ ID NO: 758 - RNA, 23 nt, synthetic construct
  source 1..23: mol_type = other RNA
aagaataatgctgattacccccc

SEQ ID NO: 759 - RNA, 23 nt, synthetic construct
  source 1..23: mol_type = other RNA
taacacattattctgtagtttgg

SEQ ID NO: 760 - RNA, 23 nt, synthetic construct
  source 1..23: mol_type = other RNA
ttaacacattattctgtagtttg

SEQ ID NO: 761 - RNA, 23 nt, synthetic construct
  source 1..23: mol_type = other RNA
tttaacacattattctgtagttt

SEQ ID NO: 762 - RNA, 23 nt, synthetic construct
  source 1..23: mol_type = other RNA
aaatagcctgcggagataaatac

SEQ ID NO: 763 - RNA, 23 nt, synthetic construct
  source 1..23: mol_type = other RNA
tgaacaaatagcctgcggagata

SEQ ID NO: 764 - RNA, 23 nt, synthetic construct
  source 1..23: mol_type = other RNA
ttgaacaaatagcctgcggagat

SEQ ID NO: 765 - RNA, 23 nt, synthetic construct
  source 1..23: mol_type = other RNA
taaacaaaaggcctctctgaaca

SEQ ID NO: 766 - RNA, 23 nt, synthetic construct
  source 1..23: mol_type = other RNA
ttaaacaaaaggcctctctgaac

SEQ ID NO: 767 - RNA, 23 nt, synthetic construct
  source 1..23: mol_type = other RNA
tttaaacaaaaggcctctctgaa

SEQ ID NO: 768 - RNA, 23 nt, synthetic construct
  source 1..23: mol_type = other RNA
atttaaacaaaaggcctctctga

SEQ ID NO: 769 - RNA, 23 nt, synthetic construct
  source 1..23: mol_type = other RNA
atatttaaacaaaaggcctctct

SEQ ID NO: 770 - RNA, 23 nt, synthetic construct
  source 1..23: mol_type = other RNA
tacatgttatagccaatccagac

SEQ ID NO: 771 - RNA, 23 nt, synthetic construct
  source 1..23: mol_type = other RNA
agacatgttatagccaatccaga

SEQ ID NO: 772 - RNA, 23 nt, synthetic construct
  source 1..23: mol_type = other RNA
tgaaagacatgttatagccaatc

SEQ ID NO: 773 - RNA, 23 nt, synthetic construct
  source 1..23: mol_type = other RNA
aaaagcctaatgctgaaagacat

SEQ ID NO: 774 - RNA, 23 nt, synthetic construct
  source 1..23: mol_type = other RNA
aagagctctgatatctttagtaa

SEQ ID NO: 775 - RNA, 23 nt, synthetic construct
  source 1..23: mol_type = other RNA
taagagctctgatatctttagta

SEQ ID NO: 776 - RNA, 23 nt, synthetic construct
  source 1..23: mol_type = other RNA
tctaaggtcccagtcttgcttgt

SEQ ID NO: 777 - RNA, 23 nt, synthetic construct
  source 1..23: mol_type = other RNA
ttctaaggtcccagtcttgcttg

SEQ ID NO: 778 - RNA, 23 nt, synthetic construct
  source 1..23: mol_type = other RNA
atttctaaggtcccagtcttgct

SEQ ID NO: 779 - RNA, 23 nt, synthetic construct
  source 1..23: mol_type = other RNA
tatttctaaggtcccagtcttgc

SEQ ID NO: 780 - RNA, 23 nt, synthetic construct
  source 1..23: mol_type = other RNA
tgatttctaaggtcccagtcttg

SEQ ID NO: 781 - RNA, 23 nt, synthetic construct
  source 1..23: mol_type = other RNA
agcaattaaagttggcttagaga

SEQ ID NO: 782 - RNA, 23 nt, synthetic construct
  source 1..23: mol_type = other RNA
tttgatacagtttacaaaaaaaa

SEQ ID NO: 783 - RNA, 23 nt, synthetic construct
  source 1..23: mol_type = other RNA
agatttgatacagtttacaaaaa

SEQ ID NO: 784 - RNA, 23 nt, synthetic construct
  source 1..23: mol_type = other RNA
acaacatatacagatttgataca

SEQ ID NO: 785 - RNA, 23 nt, synthetic construct
  source 1..23: mol_type = other RNA
ttacaacatatacagatttgata

SEQ ID NO: 786 - RNA, 23 nt, synthetic construct
  source 1..23: mol_type = other RNA
tattacaacatatacagatttga

SEQ ID NO: 787 - RNA, 23 nt, synthetic construct
  source 1..23: mol_type = other RNA
ttattacaacatatacagatttg

SEQ ID NO: 788 - RNA, 23 nt, synthetic construct
  source 1..23: mol_type = other RNA
tttattacaacatatacagattt

SEQ ID NO: 789 - RNA, 23 nt, synthetic construct
  source 1..23: mol_type = other RNA
tacttccaataaactagcataag

SEQ ID NO: 790 - RNA, 23 nt, synthetic construct
  source 1..23: mol_type = other RNA
aacacttccaataaactagcata

SEQ ID NO: 791 - RNA, 23 nt, synthetic construct
  source 1..23: mol_type = other RNA
tatttcttgaacacttccaataa

SEQ ID NO: 792 - RNA, 23 nt, synthetic construct
  source 1..23: mol_type = other RNA
ttatttcttgaacacttccaata

SEQ ID NO: 793 - RNA, 23 nt, synthetic construct
  source 1..23: mol_type = other RNA
tttatttcttgaacacttccaat

SEQ ID NO: 794 - RNA, 23 nt, synthetic construct
  source 1..23: mol_type = other RNA
ttttatcagtacacaagttgatt

SEQ ID NO: 795 - RNA, 23 nt, synthetic construct
  source 1..23: mol_type = other RNA
agattcaataactctgctgaccc

SEQ ID NO: 796 - RNA, 23 nt, synthetic construct
  source 1..23: mol_type = other RNA
taagattcaataactctgctgac

SEQ ID NO: 797 - RNA, 23 nt, synthetic construct
  source 1..23: mol_type = other RNA
ttaagattcaataactctgctga

SEQ ID NO: 798 - RNA, 23 nt, synthetic construct
  source 1..23: mol_type = other RNA
aattaagattcaataactctgct

SEQ ID NO: 799 - RNA, 23 nt, synthetic construct
  source 1..23: mol_type = other RNA
aaattaagattcaataactctgc

SEQ ID NO: 800 - RNA, 23 nt, synthetic construct
  source 1..23: mol_type = other RNA
aacttgtacattaaaaaaaatta

SEQ ID NO: 801 - RNA, 23 nt, synthetic construct
  source 1..23: mol_type = other RNA
atacaaaataaggagttctttat

SEQ ID NO: 802 - RNA, 23 nt, synthetic construct
  source 1..23: mol_type = other RNA
tagtaattgtacaaaacattaat

SEQ ID NO: 803 - RNA, 23 nt, synthetic construct
  source 1..23: mol_type = other RNA
tataacaaaatgtatacaattta

SEQ ID NO: 804 - RNA, 23 nt, synthetic construct
  source 1..23: mol_type = other RNA
tctataacaaaatgtatacaatt

SEQ ID NO: 805 - RNA, 23 nt, synthetic construct
  source 1..23: mol_type = other RNA
ttctataacaaaatgtatacaat

SEQ ID NO: 806 - RNA, 23 nt, synthetic construct
  source 1..23: mol_type = other RNA
attctataacaaaatgtatacaa

SEQ ID NO: 807 - RNA, 23 nt, synthetic construct
  source 1..23: mol_type = other RNA
tattctataacaaaatgtataca

SEQ ID NO: 808 - RNA, 23 nt, synthetic construct
  source 1..23: mol_type = other RNA
ttattctataacaaaatgtatac

SEQ ID NO: 809 - RNA, 23 nt, synthetic construct
  source 1..23: mol_type = other RNA
aagtattctataacaaaatgtat

SEQ ID NO: 810 - RNA, 23 nt, synthetic construct
  source 1..23: mol_type = other RNA
ttagaaaaaagtattctataaca

SEQ ID NO: 811 - RNA, 4530 nt, synthetic construct
  source 1..4530: mol_type = other RNA
ccttccgctccgcgactgcgttaactggagccaggctgagcgtcggcgccggggttcggtggcctctagtgagatctggaggatccaaggattctgtagctacaatgttgtcaagactttttcgaatgcatggcctctttgtggcctcccatccctgggaagtcatagtggggacagtgacactgaccatctgcatgatgtccatgaacatgtttactggtaacaataagatctgtggttggaattatgaatgtccaaagtttgaagaggatgttttgagcagtgacattataattctgacaataacacgatgcatagccatcctgtatatttacttccagttccagaatttacgtcaacttggatcaaaatatattttgggtattgctggccttttcacaattttctcaagttttgtattcagtacagttgtcattcacttcttagacaaagaattgacaggcttgaatgaagctttgccctttttcctacttttgattgacctttccagagcaagcacattagcaaagtttgccctcagttccaactcacaggatgaagtaagggaaaatattgctcgtggaatggcaattttaggtcctacgtttaccctcgatgctcttgttgaatgtcttgtgattggagttggtaccatgtcaggggtacgtcagcttgaaattatgtgctgctttggctgcatgtcagttcttgccaactacttcgtgttcatgactttcttcccagcttgtgtgtccttggtattagagctttctcgggaaagccgcgagggtcgtccaatttggcagctcagccattttgcccgagttttagaagaagaagaaaataagccgaatcctgtaactcagagggtcaagatgattatgtctctaggcttggttcttgttcatgctcacagtcgctggatagctgatccttctcctcaaaacagtacagcagatacttctaaggtttcattaggactggatgaaaatgtgtccaagagaattgaaccaagtgtttccctctggcagttttatctctctaaaatgatcagcatggatattgaacaagttattaccctaagtttagctctccttctggctgtcaagtacatcttctttgaacaaacagagacagaatctacactctcattaaaaaaccctatcacatctcctgtagtgacacaaaagaaagtcccagacaattgttgtagacgtgaacctatgctggtcagaaataaccagaaatgtgattcagtagaggaagagacagggataaaccgagaaagaaaagttgaggttataaaacccttagtggctgaaacagataccccaaacagagctacatttgtggttggtaactcctccttactcgatacttcatcagtactggtgacacaggaacctgaaattgaacttcccagggaacctcggcctaatgaagaatgtctacagatacttgggaatgcagagaaaggtgcaaaattccttagtgatgctgagatcatccagttagtcaatgctaagcatatcccagcctacaagttggaaactctgatggaaactcatgagcgtggtgtatctattcgccgacagttactttccaagaagctttcagaaccttcttctctccagtacctaccttacagggattataattactccttggtgatgggagcttgttgtgagaatgttattggatatatgcccatccctgttggagtggcaggacccctttgcttagatgaaaaagaatttcaggttccaatggcaacaacagaaggttgtcttgtggccagcaccaatagaggctgcagagcaataggtcttggtggaggtgccagcagccgagtccttgcagatgggatgactcgtggcccagttgtgcgtcttccacgtgcttgtgactctgcagaagtgaaagcctggctcgaaacatctgaagggttcgcagtgataaaggaggcatttgacagcactagcagatttgcacgtctacagaaacttcatacaagtatagctggacgcaacctttatatccgtttccagtccaggtcaggggatgccatggggatgaacatgatttcaaagggtacagagaaagcactttcaaaacttcacgagtatttccctgaaatgcagattctagccgttagtggtaactattgtactgacaagaaacctgctgctataaattggatagagggaagaggaaaatctgttgtttgtgaagctgtcattccagccaaggttgtcagagaagtattaaagactaccacagaggctatgattgaggtcaacattaacaagaatttagtgggctctgccatggctgggagcataggaggctacaacgcccatgcagcaaacattgtcaccgccatctacattgcctgtggacaggatgcagcacagaatgttggtagttcaaactgtattactttaatggaagcaagtggtcccacaaatgaagatttatatatcagctgcaccatgccatctatagagataggaacggtgggtggtgggaccaacctactacctcagcaagcctgtttgcagatgctaggtgttcaaggagcatgcaaagataatcctggggaaaatgcccggcagcttgcccgaattgtgtgtgggaccgtaatggctggggaattgtcacttatggcagcattggcagcaggacatcttgtcaaaagtcacatgattcacaacaggtcgaagatcaatttacaagacctccaaggagcttgcaccaagaagacagcctgaatagcccgacagttctgaactggaacatgggcattgggttctaaaggactaacataaaatctgtgaattaaaaaagctcaatgcattgtcttgtggaggatgaatagatgtgatcactgagacagccacttggtttttggctctttcagagaggtctcaggttctttccatgcagactcctcagatctgaacacagtttagtgctttacatgctgtgctctttgaagagatttcaacaagaatattgtatgttaaagcatcagagatggtaatctacagctcacctctgaaggcaaatataagctgggaaaaaagttttgatgaaattcttgaagttcatggtgatcagtgcaattgaccttctccctcactcctgccagttgaaaatggatttttaaattatactgtagctgatgaaactcctgattttgtagttaatttattaagtctgggatgtagaacttcaagaagtaagagctaagttctaagttcatgtttgtaaattaatacttcatttggtgctggtctattttgattttggggggtaatcagcattattcttcagaaggggacctgttttcttcaagggaagaaacactcttattcccaaactacagaataatgtgttaaacatgctaaatagttctatcaggaaaacaaatcactgtatttatctccgcaggctatttgttcagagaggccttttgtttaaatataaatgtttaaatataaatgtttgtctggattggctataacatgtctttcagcattaggcttttaagaaacacagggttttgtattctttactaaagatatcagagctcttaatgttgcttagatgagggtgactgtcaagtacaagcaagactgggaccttagaaatcattgtagaaacacagttttgaaagaaaaataccatgtctctaagccaactttaattgcttaaaagacatttttatttagttgaaaaatctagttttttttgtaaactgtatcaaatctgtatatgttgtaataaaacttatgctagtttattggaagtgttcaagaaataaaaatcaacttgtgtactgataaaatactctagcctgggccagagaagataatgttctttaatgttgtccaggaaaccctggcttgcttgccgagcctaatgaaagggaaagtcagctttcagagccagtgaaggagccacgtgaatggccctagaactgtgcctagttcctgtggccaggaggttggtgactgaaacattcacacagggctctttgatggacccacgaacgctcttagctttctcagggggtcagcagagttattgaatcttaattttttttaatgtacaagttttgtataaataataaagaactccttattttgtattacatctaatgcttcaagtgttgctcttggaaagctgatgatgtctcttgtagaagatggactctgaaaaacattccaggaaaccatggcagcatggagagcctcttagtgattgtgtctgcattgttattgtggaagatttaccttttctgttgtacgtaaagcttaaattgcttttgttgtgactttttagccagtgactttttctgagcttttcatggaagtggcagtgaaaaatatgttgagtgttcattttagtgactgtaattaatatcttgctggattaatgttttgtacaattactaaattgtatacattttgttatagaatacttttttctagtttcagtaaataatgaaaaggaagttaataccaa

SEQ ID NO: 812 - RNA, 21 nt, synthetic construct
  source 1..21: mol_type = other RNA
  modified_base 1: mod_base = OTHER; note = 2'-O-methyladenosine-3'-phosphorothioate
  modified_base 2: mod_base = OTHER; note = 2'-O-methyluridine-3'-phosphorothioate
  modified_base 3: mod_base = OTHER; note = 2'-O-methylguanosine-3'-phosphate
  modified_base 4: mod_base = OTHER; note = 2'-O-methyluridine-3'-phosphate
  modified_base 5: mod_base = OTHER; note = 2'-O-methyluridine-3'-phosphate
  modified_base 6: mod_base = OTHER; note = 2'-O-methylguanosine-3'-phosphate
  modified_base 7: mod_base = OTHER; note = 2'-fluorouridine-3'-phosphate
  modified_base 8: mod_base = OTHER; note = 2'-O-methylcytidine-3'-phosphate
  modified_base 9: mod_base = OTHER; note = 2'-fluoroadenosine-3'-phosphate
  modified_base 10: mod_base = OTHER; note = 2'-fluoroadenosine-3'-phosphate
  modified_base 11: mod_base = OTHER; note = 2'-fluoroguanosine-3'-phosphate
  modified_base 12: mod_base = OTHER; note = 2'-O-methyladenosine-3'-phosphate
  modified_base 13: mod_base = OTHER; note = 2'-O-methylcytidine-3'-phosphate
  modified_base 14: mod_base = OTHER; note = 2'-O-methyluridine-3'-phosphate
  modified_base 15: mod_base = OTHER; note = 2'-O-methyluridine-3'-phosphate
  modified_base 16: mod_base = OTHER; note = 2'-O-methyluridine-3'-phosphate
  modified_base 17: mod_base = OTHER; note = 2'-O-methyluridine-3'-phosphate
  modified_base 18: mod_base = OTHER; note = 2'-O-methyluridine-3'-phosphate
  modified_base 19: mod_base = OTHER; note = 2'-O-methylcytidine-3'-phosphate
  modified_base 20: mod_base = OTHER; note = 2'-O-methylguanosine-3'-phosphate
  modified_base 21: mod_base = OTHER; note = 2'-O-methyladenosine
atgttgtcaagactttttcga

SEQ ID NO: 813 - RNA, 21 nt, synthetic construct
  source 1..21: mol_type = other RNA
  modified_base 1: mod_base = OTHER; note = 2'-O-methyluridine-3'-phosphorothioate
  modified_base 2: mod_base = OTHER; note = 2'-O-methylguanosine-3'-phosphorothioate
  modified_base 3: mod_base = OTHER; note = 2'-O-methyluridine-3'-phosphate
  modified_base 4: mod_base = OTHER; note = 2'-O-methyluridine-3'-phosphate
  modified_base 5: mod_base = OTHER; note = 2'-O-methylguanosine-3'-phosphate
  modified_base 6: mod_base = OTHER; note = 2'-O-methyluridine-3'-phosphate
  modified_base 7: mod_base = OTHER; note = 2'-fluorocytidine-3'-phosphate
  modified_base 8: mod_base = OTHER; note = 2'-O-methyladenosine-3'-phosphate
  modified_base 9: mod_base = OTHER; note = 2'-fluoroadenosine-3'-phosphate
  modified_base 10: mod_base = OTHER; note = 2'-fluoroguanosine-3'-phosphate
  modified_base 11: mod_base = OTHER; note = 2'-fluoroadenosine-3'-phosphate
  modified_base 12: mod_base = OTHER; note = 2'-O-methylcytidine-3'-phosphate
  modified_base 13: mod_base = OTHER; note = 2'-O-methyluridine-3'-phosphate
  modified_base 14: mod_base = OTHER; note = 2'-O-methyluridine-3'-phosphate
  modified_base 15: mod_base = OTHER; note = 2'-O-methyluridine-3'-phosphate
  modified_base 16: mod_base = OTHER; note = 2'-O-methyluridine-3'-phosphate
  modified_base 17: mod_base = OTHER; note = 2'-O-methyluridine-3'-phosphate
  modified_base 18: mod_base = OTHER; note = 2'-O-methylcytidine-3'-phosphate
  modified_base 19: mod_base = OTHER; note = 2'-O-methylguanosine-3'-phosphate
  modified_base 20: mod_base = OTHER; note = 2'-O-methyladenosine-3'-phosphate
  modified_base 21: mod_base = OTHER; note = 2'-O-methyladenosine
tgttgtcaagactttttcgaa

SEQ ID NO: 814 - RNA, 21 nt, synthetic construct
  source 1..21: mol_type = other RNA
  modified_base 1: mod_base = OTHER; note = 2'-O-methylguanosine-3'-phosphorothioate
  modified_base 2: mod_base = OTHER; note = 2'-O-methyluridine-3'-phosphorothioate
  modified_base 3: mod_base = OTHER; note = 2'-O-methyluridine-3'-phosphate
  modified_base 4: mod_base = OTHER; note = 2'-O-methylguanosine-3'-phosphate
  modified_base 5: mod_base = OTHER; note = 2'-O-methyluridine-3'-phosphate
  modified_base 6: mod_base = OTHER; note = 2'-O-methylcytidine-3'-phosphate
  modified_base 7: mod_base = OTHER; note = 2'-fluoroadenosine-3'-phosphate
  modified_base 8: mod_base = OTHER; note = 2'-O-methyladenosine-3'-phosphate
  modified_base 9: mod_base = OTHER; note = 2'-fluoroguanosine-3'-phosphate
  modified_base 10: mod_base = OTHER; note = 2'-fluoroadenosine-3'-phosphate
  modified_base 11: mod_base = OTHER; note = 2'-fluorocytidine-3'-phosphate
  modified_base 12: mod_base = OTHER; note = 2'-O-methyluridine-3'-phosphate
  modified_base 13: mod_base = OTHER; note = 2'-O-methyluridine-3'-phosphate
  modified_base 14: mod_base = OTHER; note = 2'-O-methyluridine-3'-phosphate
  modified_base 15: mod_base = OTHER; note = 2'-O-methyluridine-3'-phosphate
  modified_base 16: mod_base = OTHER; note = 2'-O-methyluridine-3'-phosphate
  modified_base 17: mod_base = OTHER; note = 2'-O-methylcytidine-3'-phosphate
  modified_base 18: mod_base = OTHER; note = 2'-O-methylguanosine-3'-phosphate
  modified_base 19: mod_base = OTHER; note = 2'-O-methyladenosine-3'-phosphate
  modified_base 20: mod_base = OTHER; note = 2'-O-methyladenosine-3'-phosphate
  modified_base 21: mod_base = OTHER; note = 2'-O-methyluridine
gttgtcaagactttttcgaat

SEQ ID NO: 815 - RNA, 21 nt, synthetic construct
  source 1..21: mol_type = other RNA
  modified_base 1: mod_base = OTHER; note = 2'-O-methylguanosine-3'-phosphorothioate
  modified_base 2: mod_base = OTHER; note = 2'-O-methyluridine-3'-phosphorothioate
  modified_base 3: mod_base = OTHER; note = 2'-O-methylcytidine-3'-phosphate
  modified_base 4: mod_base = OTHER; note = 2'-O-methyladenosine-3'-phosphate
  modified_base 5: mod_base = OTHER; note = 2'-O-methyladenosine-3'-phosphate
  modified_base 6: mod_base = OTHER; note = 2'-O-methylguanosine-3'-phosphate
  modified_base 7: mod_base = OTHER; note = 2'-fluoroadenosine-3'-phosphate
  modified_base 8: mod_base = OTHER; note = 2'-O-methylcytidine-3'-phosphate
  modified_base 9: mod_base = OTHER; note = 2'-fluorouridine-3'-phosphate
  modified_base 10: mod_base = OTHER; note = 2'-fluorouridine-3'-phosphate
  modified_base 11: mod_base = OTHER; note = 2'-fluorouridine-3'-phosphate
  modified_base 12: mod_base = OTHER; note = 2'-O-methyluridine-3'-phosphate
  modified_base 13: mod_base = OTHER; note = 2'-O-methyluridine-3'-phosphate
  modified_base 14: mod_base = OTHER; note = 2'-O-methylcytidine-3'-phosphate
  modified_base 15: mod_base = OTHER; note = 2'-O-methylguanosine-3'-phosphate
  modified_base 16: mod_base = OTHER; note = 2'-O-methyladenosine-3'-phosphate
  modified_base 17: mod_base = OTHER; note = 2'-O-methyladenosine-3'-phosphate
  modified_base 18: mod_base = OTHER; note = 2'-O-methyluridine-3'-phosphate
  modified_base 19: mod_base = OTHER; note = 2'-O-methylguanosine-3'-phosphate
  modified_base 20: mod_base = OTHER; note = 2'-O-methylcytidine-3'-phosphate
  modified_base 21: mod_base = OTHER; note = 2'-O-methyladenosine
gtcaagactttttcgaatgca

SEQ ID NO: 816 - RNA, 21 nt, synthetic construct
  source 1..21: mol_type = other RNA
  modified_base 1: mod_base = OTHER; note = 2'-O-methyluridine-3'-phosphorothioate
  modified_base 2: mod_base = OTHER; note = 2'-O-methylcytidine-3'-phosphorothioate
  modified_base 3: mod_base = OTHER; note = 2'-O-methyladenosine-3'-phosphate
  modified_base 4: mod_base = OTHER; note = 2'-O-methyladenosine-3'-phosphate
  modified_base 5: mod_base = OTHER; note = 2'-O-methylguanosine-3'-phosphate
  modified_base 6: mod_base = OTHER; note = 2'-O-methyladenosine-3'-phosphate
  modified_base 7: mod_base = OTHER; note = 2'-fluorocytidine-3'-phosphate
  modified_base 8: mod_base = OTHER; note = 2'-O-methyluridine-3'-phosphate
  modified_base 9: mod_base = OTHER; note = 2'-fluorouridine-3'-phosphate
  modified_base 10: mod_base = OTHER; note = 2'-fluorouridine-3'-phosphate
  modified_base 11: mod_base = OTHER; note = 2'-fluorouridine-3'-phosphate
  modified_base 12: mod_base = OTHER; note = 2'-O-methyluridine-3'-phosphate
  modified_base 13: mod_base = OTHER; note = 2'-O-methylcytidine-3'-phosphate
  modified_base 14: mod_base = OTHER; note = 2'-O-methylguanosine-3'-phosphate
  modified_base 15: mod_base = OTHER; note = 2'-O-methyladenosine-3'-phosphate
  modified_base 16: mod_base = OTHER; note = 2'-O-methyladenosine-3'-phosphate
  modified_base 17: mod_base = OTHER; note = 2'-O-methyluridine-3'-phosphate
  modified_base 18: mod_base = OTHER; note = 2'-O-methylguanosine-3'-phosphate
  modified_base 19: mod_base = OTHER; note = 2'-O-methylcytidine-3'-phosphate
  modified_base 20: mod_base = OTHER; note = 2'-O-methyladenosine-3'-phosphate
  modified_base 21: mod_base = OTHER; note = 2'-O-methyluridine
tcaagactttttcgaatgcat

SEQ ID NO: 817 - RNA, 21 nt, synthetic construct
  source 1..21: mol_type = other RNA
  modified_base 1: mod_base = OTHER; note = 2'-O-methyladenosine-3'-phosphorothioate
  modified_base 2: mod_base = OTHER; note = 2'-O-methyladenosine-3'-phosphorothioate
  modified_base 3: mod_base = OTHER; note = 2'-O-methylguanosine-3'-phosphate
  modified_base 4: mod_base = OTHER; note = 2'-O-methyladenosine-3'-phosphate
  modified_base 5: mod_base = OTHER; note = 2'-O-methylcytidine-3'-phosphate
  modified_base 6: mod_base = OTHER; note = 2'-O-methyluridine-3'-phosphate
  modified_base 7: mod_base = OTHER; note = 2'-fluorouridine-3'-phosphate
  modified_base 8: mod_base = OTHER; note = 2'-O-methyluridine-3'-phosphate
  modified_base 9: mod_base = OTHER; note = 2'-fluorouridine-3'-phosphate
  modified_base 10: mod_base = OTHER; note = 2'-fluorouridine-3'-phosphate
  modified_base 11: mod_base = OTHER; note = 2'-fluorocytidine-3'-phosphate
  modified_base 12: mod_base = OTHER; note = 2'-O-methylguanosine-3'-phosphate
  modified_base 13: mod_base = OTHER; note = 2'-O-methyladenosine-3'-phosphate
  modified_base 14: mod_base = OTHER; note = 2'-O-methyladenosine-3'-phosphate
  modified_base 15: mod_base = OTHER; note = 2'-O-methyluridine-3'-phosphate
  modified_base 16: mod_base = OTHER; note = 2'-O-methylguanosine-3'-phosphate
  modified_base 17: mod_base = OTHER; note = 2'-O-methylcytidine-3'-phosphate
  modified_base 18: mod_base = OTHER; note = 2'-O-methyladenosine-3'-phosphate
  modified_base 19: mod_base = OTHER; note = 2'-O-methyluridine-3'-phosphate
  modified_base 20: mod_base = OTHER; note = 2'-O-methylguanosine-3'-phosphate
  modified_base 21: mod_base = OTHER; note = 2'-O-methyladenosine
aagactttttcgaatgcatga

SEQ ID NO: 818 - RNA, 21 nt, synthetic construct
  source 1..21: mol_type = other RNA
  modified_base 1: mod_base = OTHER; note = 2'-O-methylguanosine-3'-phosphorothioate
  modified_base 2: mod_base = OTHER; note = 2'-O-methylcytidine-3'-phosphorothioate
  modified_base 3: mod_base = OTHER; note = 2'-O-methylcytidine-3'-phosphate
  modified_base 4: mod_base = OTHER; note = 2'-O-methyluridine-3'-phosphate
  modified_base 5: mod_base = OTHER; note = 2'-O-methylcytidine-3'-phosphate
  modified_base 6: mod_base = OTHER; note = 2'-O-methylcytidine-3'-phosphate
  modified_base 7: mod_base = OTHER; note = 2'-fluorocytidine-3'-phosphate
  modified_base 8: mod_base = OTHER; note = 2'-O-methyladenosine-3'-phosphate
  modified_base 9: mod_base = OTHER; note = 2'-fluorouridine-3'-phosphate
  modified_base 10: mod_base = OTHER; note = 2'-fluorocytidine-3'-phosphate
  modified_base 11: mod_base = OTHER; note = 2'-fluorocytidine-3'-phosphate
  modified_base 12: mod_base = OTHER; note = 2'-O-methylcytidine-3'-phosphate
  modified_base 13: mod_base = OTHER; note = 2'-O-methyluridine-3'-phosphate
  modified_base 14: mod_base = OTHER; note = 2'-O-methylguanosine-3'-phosphate
  modified_base 15: mod_base = OTHER; note = 2'-O-methylguanosine-3'-phosphate
  modified_base 16: mod_base = OTHER; note = 2'-O-methylguanosine-3'-phosphate
  modified_base 17: mod_base = OTHER; note = 2'-O-methyladenosine-3'-phosphate
  modified_base 18: mod_base = OTHER; note = 2'-O-methyladenosine-3'-phosphate
  modified_base 19: mod_base = OTHER; note = 2'-O-methylguanosine-3'-phosphate
  modified_base 20: mod_base = OTHER; note = 2'-O-methyluridine-3'-phosphate
  modified_base 21: mod_base = OTHER; note = 2'-O-methyladenosine
gcctcccatccctgggaagta

SEQ ID NO: 819 - RNA, 21 nt, synthetic construct
  source 1..21: mol_type = other RNA
  modified_base 1: mod_base = OTHER; note = 2'-O-methylcytidine-3'-phosphorothioate
  modified_base 2: mod_base = OTHER; note = 2'-O-methyladenosine-3'-phosphorothioate
  modified_base 3: mod_base = OTHER; note = 2'-O-methyladenosine-3'-phosphate
  modified_base 4: mod_base = OTHER; note = 2'-O-methyluridine-3'-phosphate
  modified_base 5: mod_base = OTHER; note = 2'-O-methyladenosine-3'-phosphate
  modified_base 6: mod_base = OTHER; note = 2'-O-methyladenosine-3'-phosphate
  modified_base 7: mod_base = OTHER; note = 2'-fluoroguanosine-3'-phosphate
  modified_base 8: mod_base = OTHER; note = 2'-O-methyladenosine-3'-phosphate
  modified_base 9: mod_base = OTHER; note = 2'-fluorouridine-3'-phosphate
  modified_base 10: mod_base = OTHER; note = 2'-fluorocytidine-3'-phosphate
  modified_base 11: mod_base = OTHER; note = 2'-fluorouridine-3'-phosphate
  modified_base 12: mod_base = OTHER; note = 2'-O-methylguanosine-3'-phosphate
  modified_base 13: mod_base = OTHER; note = 2'-O-methyluridine-3'-phosphate
  modified_base 14: mod_base = OTHER; note = 2'-O-methylguanosine-3'-phosphate
  modified_base 15: mod_base = OTHER; note = 2'-O-methylguanosine-3'-phosphate
  modified_base 16: mod_base = OTHER; note = 2'-O-methyluridine-3'-phosphate
  modified_base 17: mod_base = OTHER; note = 2'-O-methyluridine-3'-phosphate
  modified_base 18: mod_base = OTHER; note = 2'-O-methylguanosine-3'-phosphate
  modified_base 19: mod_base = OTHER; note = 2'-O-methylguanosine-3'-phosphate
  modified_base 20: mod_base = OTHER; note = 2'-O-methyladenosine-3'-phosphate
  modified_base 21: mod_base = OTHER; note = 2'-O-methyladenosine
caataagatctgtggttggaa

SEQ ID NO: 820 - RNA, 21 nt, synthetic construct
  source 1..21: mol_type = other RNA
  modified_base 1: mod_base = OTHER; note = 2'-O-methyladenosine-3'-phosphorothioate
  modified_base 2: mod_base = OTHER; note = 2'-O-methyladenosine-3'-phosphorothioate
  modified_base 3: mod_base = OTHER; note = 2'-O-methyladenosine-3'-phosphate
  modified_base 4: mod_base = OTHER; note = 2'-O-methylguanosine-3'-phosphate
  modified_base 5: mod_base = OTHER; note = 2'-O-methyluridine-3'-phosphate
  modified_base 6: mod_base = OTHER; note = 2'-O-methyluridine-3'-phosphate
  modified_base 7: mod_base = OTHER; note = 2'-fluorouridine-3'-phosphate
  modified_base 8: mod_base = OTHER; note = 2'-O-methylguanosine-3'-phosphate
  modified_base 9: mod_base = OTHER; note = 2'-fluoroadenosine-3'-phosphate
  modified_base 10: mod_base = OTHER; note = 2'-fluoroadenosine-3'-phosphate
  modified_base 11: mod_base = OTHER; note = 2'-fluoroguanosine-3'-phosphate
  modified_base 12: mod_base = OTHER; note = 2'-O-methyladenosine-3'-phosphate
  modified_base 13: mod_base = OTHER; note = 2'-O-methylguanosine-3'-phosphate
  modified_base 14: mod_base = OTHER; note = 2'-O-methylguanosine-3'-phosphate
  modified_base 15: mod_base = OTHER; note = 2'-O-methyladenosine-3'-phosphate
  modified_base 16: mod_base = OTHER; note = 2'-O-methyluridine-3'-phosphate
  modified_base 17: mod_base = OTHER; note = 2'-O-methylguanosine-3'-phosphate
  modified_base 18: mod_base = OTHER; note = 2'-O-methyluridine-3'-phosphate
  modified_base 19: mod_base = OTHER; note = 2'-O-methyluridine-3'-phosphate
  modified_base 20: mod_base = OTHER; note = 2'-O-methyluridine-3'-phosphate
  modified_base 21: mod_base = OTHER; note = 2'-O-methyluridine
aaagtttgaagaggatgtttt

SEQ ID NO: 821 - RNA, 21 nt, synthetic construct
  source 1..21: mol_type = other RNA
  modified_base 1: mod_base = OTHER; note = 2'-O-methyluridine-3'-phosphorothioate
  modified_base 2: mod_base = OTHER; note = 2'-O-methyluridine-3'-phosphorothioate
  modified_base 3: mod_base = OTHER; note = 2'-O-methyluridine-3'-phosphate
  modified_base 4: mod_base = OTHER; note = 2'-O-methylguanosine-3'-phosphate
  modified_base 5: mod_base = OTHER; note = 2'-O-methyladenosine-3'-phosphate
  modified_base 6: mod_base = OTHER; note = 2'-O-methylguanosine-3'-phosphate
  modified_base 7: mod_base = OTHER; note = 2'-fluorocytidine-3'-phosphate
  modified_base 8: mod_base = OTHER; note = 2'-O-methyladenosine-3'-phosphate
  modified_base 9: mod_base = OTHER; note = 2'-fluoroguanosine-3'-phosphate
  modified_base 10: mod_base = OTHER; note = 2'-fluorouridine-3'-phosphate
  modified_base 11: mod_base = OTHER; note = 2'-fluoroguanosine-3'-phosphate
  modified_base 12: mod_base = OTHER; note = 2'-O-methyladenosine-3'-phosphate
  modified_base 13: mod_base = OTHER; note = 2'-O-methylcytidine-3'-phosphate
  modified_base 14: mod_base = OTHER; note = 2'-O-methyladenosine-3'-phosphate
  modified_base 15: mod_base = OTHER; note = 2'-O-methyluridine-3'-phosphate
  modified_base 16: mod_base = OTHER; note = 2'-O-methyluridine-3'-phosphate
  modified_base 17: mod_base = OTHER; note = 2'-O-methyladenosine-3'-phosphate
  modified_base 18: mod_base = OTHER; note = 2'-O-methyluridine-3'-phosphate
  modified_base 19: mod_base = OTHER; note = 2'-O-methyladenosine-3'-phosphate
  modified_base 20: mod_base = OTHER; note = 2'-O-methyladenosine-3'-phosphate
  modified_base 21: mod_base = OTHER; note = 2'-O-methyluridine
tttgagcagtgacattataat

SEQ ID NO: 822 - RNA, 21 nt, synthetic construct
  source 1..21: mol_type = other RNA
  modified_base 1: mod_base = OTHER; note = 2'-O-methyladenosine-3'-phosphorothioate
  modified_base 2: mod_base = OTHER; note = 2'-O-methyladenosine-3'-phosphorothioate
  modified_base 3: mod_base = OTHER; note = 2'-O-methyluridine-3'-phosphate
  modified_base 4: mod_base = OTHER; note = 2'-O-methyluridine-3'-phosphate
  modified_base 5: mod_base = OTHER; note = 2'-O-methylcytidine-3'-phosphate
  modified_base 6: mod_base = OTHER; note = 2'-O-methyluridine-3'-phosphate
  modified_base 7: mod_base = OTHER; note = 2'-fluoroguanosine-3'-phosphate
  modified_base 8: mod_base = OTHER; note = 2'-O-methyladenosine-3'-phosphate
  modified_base 9: mod_base = OTHER; note = 2'-fluorocytidine-3'-phosphate
  modified_base 10: mod_base = OTHER; note = 2'-fluoroadenosine-3'-phosphate
  modified_base 11: mod_base = OTHER; note = 2'-fluoroadenosine-3'-phosphate
  modified_base 12: mod_base = OTHER; note = 2'-O-methyluridine-3'-phosphate
  modified_base 13: mod_base = OTHER; note = 2'-O-methyladenosine-3'-phosphate
  modified_base 14: mod_base = OTHER; note = 2'-O-methyladenosine-3'-phosphate
  modified_base 15: mod_base = OTHER; note = 2'-O-methylcytidine-3'-phosphate
  modified_base 16: mod_base = OTHER; note = 2'-O-methyladenosine-3'-phosphate
  modified_base 17: mod_base = OTHER; note = 2'-O-methylcytidine-3'-phosphate
  modified_base 18: mod_base = OTHER; note = 2'-O-methylguanosine-3'-phosphate
  modified_base 19: mod_base = OTHER; note = 2'-O-methyladenosine-3'-phosphate
  modified_base 20: mod_base = OTHER; note = 2'-O-methyluridine-3'-phosphate
  modified_base 21: mod_base = OTHER; note = 2'-O-methyladenosine
aattctgacaataacacgata

SEQ ID NO: 823 - RNA, 21 nt, synthetic construct
  source 1..21: mol_type = other RNA
  modified_base 1: mod_base = OTHER; note = 2'-O-methyluridine-3'-phosphorothioate
  modified_base 2: mod_base = OTHER; note = 2'-O-methyluridine-3'-phosphorothioate
  modified_base 3: mod_base = OTHER; note = 2'-O-methylcytidine-3'-phosphate
  modified_base 4: mod_base = OTHER; note = 2'-O-methyluridine-3'-phosphate
  modified_base 5: mod_base = OTHER; note = 2'-O-methylguanosine-3'-phosphate
  modified_base 6: mod_base = OTHER; note = 2'-O-methyladenosine-3'-phosphate
  modified_base 7: mod_base = OTHER; note = 2'-fluorocytidine-3'-phosphate
  modified_base 8: mod_base = OTHER; note = 2'-O-methyladenosine-3'-phosphate
  modified_base 9: mod_base = OTHER; note = 2'-fluoroadenosine-3'-phosphate
  modified_base 10: mod_base = OTHER; note = 2'-fluorouridine-3'-phosphate
  modified_base 11: mod_base = OTHER; note = 2'-fluoroadenosine-3'-phosphate
  modified_base 12: mod_base = OTHER; note = 2'-O-methyladenosine-3'-phosphate
  modified_base 13: mod_base = OTHER; note = 2'-O-methylcytidine-3'-phosphate
  modified_base 14: mod_base = OTHER; note = 2'-O-methyladenosine-3'-phosphate
  modified_base 15: mod_base = OTHER; note = 2'-O-methylcytidine-3'-phosphate
  modified_base 16: mod_base = OTHER; note = 2'-O-methylguanosine-3'-phosphate
  modified_base 17: mod_base = OTHER; note = 2'-O-methyladenosine-3'-phosphate
  modified_base 18: mod_base = OTHER; note = 2'-O-methyluridine-3'-phosphate
  modified_base 19: mod_base = OTHER; note = 2'-O-methylguanosine-3'-phosphate
  modified_base 20: mod_base = OTHER; note = 2'-O-methylcytidine-3'-phosphate
  modified_base 21: mod_base = OTHER; note = 2'-O-methyladenosine
ttctgacaataacacgatgca

SEQ ID NO: 824 - RNA, 21 nt, synthetic construct
  source 1..21: mol_type = other RNA
  modified_base 1: mod_base = OTHER; note = 2'-O-methyluridine-3'-phosphorothioate
  modified_base 2: mod_base = OTHER; note = 2'-O-methylcytidine-3'-phosphorothioate
  modified_base 3: mod_base = OTHER; note = 2'-O-methyluridine-3'-phosphate
  modified_base 4: mod_base = OTHER; note = 2'-O-methylguanosine-3'-phosphate
  modified_base 5: mod_base = OTHER; note = 2'-O-methyladenosine-3'-phosphate
  modified_base 6: mod_base = OTHER; note = 2'-O-methylcytidine-3'-phosphate
  modified_base 7: mod_base = OTHER; note = 2'-fluoroadenosine-3'-phosphate
  modified_base 8: mod_base = OTHER; note = 2'-O-methyladenosine-3'-phosphate
  modified_base 9: mod_base = OTHER; note = 2'-fluorouridine-3'-phosphate
  modified_base 10: mod_base = OTHER; note = 2'-fluoroadenosine-3'-phosphate
  modified_base 11: mod_base = OTHER; note = 2'-fluoroadenosine-3'-phosphate
  modified_base 12: mod_base = OTHER; note = 2'-O-methylcytidine-3'-phosphate
  modified_base 13: mod_base = OTHER; note = 2'-O-methyladenosine-3'-phosphate
  modified_base 14: mod_base = OTHER; note = 2'-O-methylcytidine-3'-phosphate
  modified_base 15: mod_base = OTHER; note = 2'-O-methylguanosine-3'-phosphate
  modified_base 16: mod_base = OTHER; note = 2'-O-methyladenosine-3'-phosphate
  modified_base 17: mod_base = OTHER; note = 2'-O-methyluridine-3'-phosphate
  modified_base 18: mod_base = OTHER; note = 2'-O-methylguanosine-3'-phosphate
  modified_base 19: mod_base = OTHER; note = 2'-O-methylcytidine-3'-phosphate
  modified_base 20: mod_base = OTHER; note = 2'-O-methyladenosine-3'-phosphate
  modified_base 21: mod_base = OTHER; note = 2'-O-methyluridine
tctgacaataacacgatgcat

SEQ ID NO: 825 - RNA, 21 nt, synthetic construct
  source 1..21: mol_type = other RNA
  modified_base 1: mod_base = OTHER; note = 2'-O-methyluridine-3'-phosphorothioate
  modified_base 2: mod_base = OTHER; note = 2'-O-methylguanosine-3'-phosphorothioate
  modified_base 3: mod_base = OTHER; note = 2'-O-methyladenosine-3'-phosphate
  modified_base 4: mod_base = OTHER; note = 2'-O-methylcytidine-3'-phosphate
  modified_base 5: mod_base = OTHER; note = 2'-O-methyladenosine-3'-phosphate
  modified_base 6: mod_base = OTHER; note = 2'-O-methyladenosine-3'-phosphate
  modified_base 7: mod_base = OTHER; note = 2'-fluorouridine-3'-phosphate
  modified_base 8: mod_base = OTHER; note = 2'-O-methyladenosine-3'-phosphate
  modified_base 9: mod_base = OTHER; note = 2'-fluoroadenosine-3'-phosphate
  modified_base 10: mod_base = OTHER; note = 2'-fluorocytidine-3'-phosphate
  modified_base 11: mod_base = OTHER; note = 2'-fluoroadenosine-3'-phosphate
  modified_base 12: mod_base = OTHER; note = 2'-O-methylcytidine-3'-phosphate
  modified_base 13: mod_base = OTHER; note = 2'-O-methylguanosine-3'-phosphate
  modified_base 14: mod_base = OTHER; note = 2'-O-methyladenosine-3'-phosphate
  modified_base 15: mod_base = OTHER; note = 2'-O-methyluridine-3'-phosphate
  modified_base 16: mod_base = OTHER; note = 2'-O-methylguanosine-3'-phosphate
  modified_base 17: mod_base = OTHER; note = 2'-O-methylcytidine-3'-phosphate
  modified_base 18: mod_base = OTHER; note = 2'-O-methyladenosine-3'-phosphate
  modified_base 19: mod_base = OTHER; note = 2'-O-methyluridine-3'-phosphate
  modified_base 20: mod_base = OTHER; note = 2'-O-methyladenosine-3'-phosphate
  modified_base 21: mod_base = OTHER; note = 2'-O-methyladenosine
tgacaataacacgatgcataa

SEQ ID NO: 826 - RNA, 21 nt, synthetic construct
  source 1..21: mol_type = other RNA
  modified_base 1: mod_base = OTHER; note = 2'-O-methyluridine-3'-phosphorothioate
  modified_base 2: mod_base = OTHER; note = 2'-O-methylcytidine-3'-phosphorothioate
  modified_base 3: mod_base = OTHER; note = 2'-O-methylcytidine-3'-phosphate
  modified_base 4: mod_base = OTHER; note = 2'-O-methyladenosine-3'-phosphate
  modified_base 5: mod_base = OTHER; note = 2'-O-methylguanosine-3'-phosphate
  modified_base 6: mod_base = OTHER; note = 2'-O-methyluridine-3'-phosphate
  modified_base 7: mod_base = OTHER; note = 2'-fluorouridine-3'-phosphate
  modified_base 8: mod_base = OTHER; note = 2'-O-methylcytidine-3'-phosphate
  modified_base 9: mod_base = OTHER; note = 2'-fluorocytidine-3'-phosphate
  modified_base 10: mod_base = OTHER; note = 2'-fluoroadenosine-3'-phosphate
  modified_base 11: mod_base = OTHER; note = 2'-fluoroguanosine-3'-phosphate
  modified_base 12: mod_base = OTHER; note = 2'-O-methyladenosine-3'-phosphate
  modified_base 13: mod_base = OTHER; note = 2'-O-methyladenosine-3'-phosphate
  modified_base 14: mod_base = OTHER; note = 2'-O-methyluridine-3'-phosphate
  modified_base 15: mod_base = OTHER; note = 2'-O-methyluridine-3'-phosphate
  modified_base 16: mod_base = OTHER; note = 2'-O-methyluridine-3'-phosphate
  modified_base 17: mod_base = OTHER; note = 2'-O-methyladenosine-3'-phosphate
  modified_base 18: mod_base = OTHER; note = 2'-O-methylcytidine-3'-phosphate
  modified_base 19: mod_base = OTHER; note = 2'-O-methylguanosine-3'-phosphate
  modified_base 20: mod_base = OTHER; note = 2'-O-methyluridine-3'-phosphate
  modified_base 21: mod_base = OTHER; note = 2'-O-methyladenosine
tccagttccagaatttacgta

SEQ ID NO: 827 - RNA, 21 nt, synthetic construct
  source 1..21: mol_type = other RNA
  modified_base 1: mod_base = OTHER; note = 2'-O-methyladenosine-3'-phosphorothioate
  modified_base 2: mod_base = OTHER; note = 2'-O-methylguanosine-3'-phosphorothioate
  modified_base 3: mod_base = OTHER; note = 2'-O-methyluridine-3'-phosphate
  modified_base 4: mod_base = OTHER; note = 2'-O-methyluridine-3'-phosphate
  modified_base 5: mod_base = OTHER; note = 2'-O-methylcytidine-3'-phosphate
  modified_base 6: mod_base = OTHER; note = 2'-O-methylcytidine-3'-phosphate
  modified_base 7: mod_base = OTHER; note = 2'-fluoroadenosine-3'-phosphate
  modified_base 8: mod_base = OTHER; note = 2'-O-methylguanosine-3'-phosphate
  modified_base 9: mod_base = OTHER; note = 2'-fluoroadenosine-3'-phosphate
  modified_base 10: mod_base = OTHER; note = 2'-fluoroadenosine-3'-phosphate
  modified_base 11: mod_base = OTHER; note = 2'-fluorouridine-3'-phosphate
  modified_base 12: mod_base = OTHER; note = 2'-O-methyluridine-3'-phosphate
  modified_base 13: mod_base = OTHER; note = 2'-O-methyluridine-3'-phosphate
  modified_base 14: mod_base = OTHER; note = 2'-O-methyladenosine-3'-phosphate
  modified_base 15: mod_base = OTHER; note = 2'-O-methylcytidine-3'-phosphate
  modified_base 16: mod_base = OTHER; note = 2'-O-methylguanosine-3'-phosphate
  modified_base 17: mod_base = OTHER; note = 2'-O-methyluridine-3'-phosphate
  modified_base 18: mod_base = OTHER; note = 2'-O-methylcytidine-3'-phosphate
  modified_base 19: mod_base = OTHER; note = 2'-O-methyladenosine-3'-phosphate
  modified_base 20: mod_base = OTHER; note = 2'-O-methyladenosine-3'-phosphate
  modified_base 21: mod_base = OTHER; note = 2'-O-methyladenosine
agttccagaatttacgtcaaa

SEQ ID NO: 828 - RNA, 21 nt, synthetic construct
  source 1..21: mol_type = other RNA
  modified_base 1: mod_base = OTHER; note = 2'-O-methyluridine-3'-phosphorothioate
  modified_base 2: mod_base = OTHER; note = 2'-O-methyluridine-3'-phosphorothioate
  modified_base 3: mod_base = OTHER; note = 2'-O-methylcytidine-3'-phosphate
  modified_base 4: mod_base = OTHER; note = 2'-O-methylcytidine-3'-phosphate
  modified_base 5: mod_base = OTHER; note = 2'-O-methyladenosine-3'-phosphate
  modified_base 6: mod_base = OTHER; note = 2'-O-methylguanosine-3'-phosphate
  modified_base 7: mod_base = OTHER; note = 2'-fluoroadenosine-3'-phosphate
  modified_base 8: mod_base = OTHER; note = 2'-O-methyladenosine-3'-phosphate
  modified_base 9: mod_base = OTHER; note = 2'-fluorouridine-3'-phosphate
  modified_base 10: mod_base = OTHER; note = 2'-fluorouridine-3'-phosphate
  modified_base 11: mod_base = OTHER; note = 2'-fluorouridine-3'-phosphate
  modified_base 12: mod_base = OTHER; note = 2'-O-methyladenosine-3'-phosphate
  modified_base 13: mod_base = OTHER; note = 2'-O-methylcytidine-3'-phosphate
  modified_base 14: mod_base = OTHER; note = 2'-O-methylguanosine-3'-phosphate
  modified_base 15: mod_base = OTHER; note = 2'-O-methyluridine-3'-phosphate
  modified_base 16: mod_base = OTHER; note = 2'-O-methylcytidine-3'-phosphate
  modified_base 17: mod_base = OTHER; note = 2'-O-methyladenosine-3'-phosphate
  modified_base 18: mod_base = OTHER; note = 2'-O-methyladenosine-3'-phosphate
  modified_base 19: mod_base = OTHER; note = 2'-O-methylcytidine-3'-phosphate
  modified_base 20: mod_base = OTHER; note = 2'-O-methyluridine-3'-phosphate
  modified_base 21: mod_base = OTHER; note = 2'-O-methyluridine
ttccagaatttacgtcaactt

SEQ ID NO: 829 - RNA, 21 nt, synthetic construct
  source 1..21: mol_type = other RNA
  modified_base 1: mod_base = OTHER; note = 2'-O-methylcytidine-3'-phosphorothioate
  modified_base 2: mod_base = OTHER; note = 2'-O-methylcytidine-3'-phosphorothioate
  modified_base 3: mod_base = OTHER; note = 2'-O-methyladenosine-3'-phosphate
  modified_base 4: mod_base = OTHER; note = 2'-O-methylguanosine-3'-phosphate
  modified_base 5: mod_base = OTHER; note = 2'-O-methyladenosine-3'-phosphate
  modified_base 6: mod_base = OTHER; note = 2'-O-methyladenosine-3'-phosphate
  modified_base 7: mod_base = OTHER; note = 2'-fluorouridine-3'-phosphate
  modified_base 8: mod_base = OTHER; note = 2'-O-methyluridine-3'-phosphate
  modified_base 9: mod_base = OTHER; note = 2'-fluorouridine-3'-phosphate
  modified_base 10: mod_base = OTHER; note = 2'-fluoroadenosine-3'-phosphate
  modified_base 11: mod_base = OTHER; note = 2'-fluorocytidine-3'-phosphate
  modified_base 12: mod_base = OTHER; note = 2'-O-methylguanosine-3'-phosphate
  modified_base 13: mod_base = OTHER; note = 2'-O-methyluridine-3'-phosphate
  modified_base 14: mod_base = OTHER; note = 2'-O-methylcytidine-3'-phosphate
  modified_base 15: mod_base = OTHER; note = 2'-O-methyladenosine-3'-phosphate
  modified_base 16: mod_base = OTHER; note = 2'-O-methyladenosine-3'-phosphate
  modified_base 17: mod_base = OTHER; note = 2'-O-methylcytidine-3'-phosphate
  modified_base 18: mod_base = OTHER; note = 2'-O-methyluridine-3'-phosphate
  modified_base 19: mod_base = OTHER; note = 2'-O-methyluridine-3'-phosphate
  modified_base 20: mod_base = OTHER; note = 2'-O-methylguanosine-3'-phosphate
  modified_base 21: mod_base = OTHER; note = 2'-O-methyladenosine
ccagaatttacgtcaacttga

SEQ ID NO: 830 - RNA, 21 nt, synthetic construct
  source 1..21: mol_type = other RNA
  modified_base 1: mod_base = OTHER; note = 2'-O-methyladenosine-3'-phosphorothioate
  modified_base 2: mod_base = OTHER; note = 2'-O-methylguanosine-3'-phosphorothioate
  modified_base 3: mod_base = OTHER; note = 2'-O-methyladenosine-3'-phosphate
  modified_base 4: mod_base = OTHER; note = 2'-O-methyladenosine-3'-phosphate
  modified_base 5: mod_base = OTHER; note = 2'-O-methyluridine-3'-phosphate
  modified_base 6: mod_base = OTHER; note = 2'-O-methyluridine-3'-phosphate
  modified_base 7: mod_base = OTHER; note = 2'-fluorouridine-3'-phosphate
  modified_base 8: mod_base = OTHER; note = 2'-O-methyladenosine-3'-phosphate
  modified_base 9: mod_base = OTHER; note = 2'-fluorocytidine-3'-phosphate
  modified_base 10: mod_base = OTHER; note = 2'-fluoroguanosine-3'-phosphate
  modified_base 11: mod_base = OTHER; note = 2'-fluorouridine-3'-phosphate
  modified_base 12: mod_base = OTHER; note = 2'-O-methylcytidine-3'-phosphate
  modified_base 13: mod_base = OTHER; note = 2'-O-methyladenosine-3'-phosphate
  modified_base 14: mod_base = OTHER; note = 2'-O-methyladenosine-3'-phosphate
  modified_base 15: mod_base = OTHER; note = 2'-O-methylcytidine-3'-phosphate
  modified_base 16: mod_base = OTHER; note = 2'-O-methyluridine-3'-phosphate
  modified_base 17: mod_base = OTHER; note = 2'-O-methyluridine-3'-phosphate
  modified_base 18: mod_base = OTHER; note = 2'-O-methylguanosine-3'-phosphate
  modified_base 19: mod_base = OTHER; note = 2'-O-methylguanosine-3'-phosphate
  modified_base 20: mod_base = OTHER; note = 2'-O-methyladenosine-3'-phosphate
  modified_base 21: mod_base = OTHER; note = 2'-O-methyluridine
agaatttacgtcaacttggat

SEQ ID NO: 831 - RNA, 21 nt, synthetic construct
  source 1..21: mol_type = other RNA
  modified_base 1: mod_base = OTHER; note = 2'-O-methyluridine-3'-phosphorothioate
  modified_base 2: mod_base = OTHER; note = 2'-O-methyluridine-3'-phosphorothioate
  modified_base 3: mod_base = OTHER; note = 2'-O-methyluridine-3'-phosphate
  modified_base 4: mod_base = OTHER; note = 2'-O-methyladenosine-3'-phosphate
  modified_base 5: mod_base = OTHER; note = 2'-O-methylcytidine-3'-phosphate
  modified_base 6: mod_base = OTHER; note = 2'-O-methylguanosine-3'-phosphate
  modified_base 7: mod_base = OTHER; note = 2'-fluorouridine-3'-phosphate
  modified_base 8: mod_base = OTHER; note = 2'-O-methylcytidine-3'-phosphate
  modified_base 9: mod_base = OTHER; note = 2'-fluoroadenosine-3'-phosphate
  modified_base 10: mod_base = OTHER; note = 2'-fluoroadenosine-3'-phosphate
  modified_base 11: mod_base = OTHER; note = 2'-fluorocytidine-3'-phosphate
  modified_base 12: mod_base = OTHER; note = 2'-O-methyluridine-3'-phosphate
  modified_base 13: mod_base = OTHER; note = 2'-O-methyluridine-3'-phosphate
  modified_base 14: mod_base = OTHER; note = 2'-O-methylguanosine-3'-phosphate
  modified_base 15: mod_base = OTHER; note = 2'-O-methylguanosine-3'-phosphate
  modified_base 16: mod_base = OTHER; note = 2'-O-methyladenosine-3'-phosphate
  modified_base 17: mod_base = OTHER; note = 2'-O-methyluridine-3'-phosphate
  modified_base 18: mod_base = OTHER; note = 2'-O-methylcytidine-3'-phosphate
  modified_base 19: mod_base = OTHER; note = 2'-O-methyladenosine-3'-phosphate
  modified_base 20: mod_base = OTHER; note = 2'-O-methyladenosine-3'-phosphate
  modified_base 21: mod_base = OTHER; note = 2'-O-methyladenosine
tttacgtcaacttggatcaaa

SEQ ID NO: 832 - RNA, 21 nt, synthetic construct
  source 1..21: mol_type = other RNA
  modified_base 1: mod_base = OTHER; note = 2'-O-methyluridine-3'-phosphorothioate
  modified_base 2: mod_base = OTHER; note = 2'-O-methyluridine-3'-phosphorothioate
  modified_base 3: mod_base = OTHER; note = 2'-O-methyladenosine-3'-phosphate
  modified_base 4: mod_base = OTHER; note = 2'-O-methylcytidine-3'-phosphate
  modified_base 5: mod_base = OTHER; note = 2'-O-methylguanosine-3'-phosphate
  modified_base 6: mod_base = OTHER; note = 2'-O-methyluridine-3'-phosphate
  modified_base 7: mod_base = OTHER; note = 2'-fluorocytidine-3'-phosphate
  modified_base 8: mod_base = OTHER; note = 2'-O-methyladenosine-3'-phosphate
  modified_base 9: mod_base = OTHER; note = 2'-fluoroadenosine-3'-phosphate
  modified_base 10: mod_base = OTHER; note = 2'-fluorocytidine-3'-phosphate
  modified_base 11: mod_base = OTHER; note = 2'-fluorouridine-3'-phosphate
  modified_base 12: mod_base = OTHER; note = 2'-O-methyluridine-3'-phosphate
  modified_base 13: mod_base = OTHER; note = 2'-O-methylguanosine-3'-phosphate
  modified_base 14: mod_base = OTHER; note = 2'-O-methylguanosine-3'-phosphate
  modified_base 15: mod_base = OTHER; note = 2'-O-methyladenosine-3'-phosphate
  modified_base 16: mod_base = OTHER; note = 2'-O-methyluridine-3'-phosphate
  modified_base 17: mod_base = OTHER; note = 2'-O-methylcytidine-3'-phosphate
  modified_base 18: mod_base = OTHER; note = 2'-O-methyladenosine-3'-phosphate
  modified_base 19: mod_base = OTHER; note = 2'-O-methyladenosine-3'-phosphate
  modified_base 20: mod_base = OTHER; note = 2'-O-methyladenosine-3'-phosphate
  modified_base 21: mod_base = OTHER; note = 2'-O-methyladenosine
ttacgtcaacttggatcaaaa

SEQ ID NO: 833 - RNA, 21 nt, synthetic construct
  source 1..21: mol_type = other RNA
  modified_base 1: mod_base = OTHER; note = 2'-O-methyluridine-3'-phosphorothioate
  modified_base 2: mod_base = OTHER; note = 2'-O-methyluridine-3'-phosphorothioate
  modified_base 3: mod_base = OTHER; note = 2'-O-methyluridine-3'-phosphate
  modified_base 4: mod_base = OTHER; note = 2'-O-methylguanosine-3'-phosphate
  modified_base 5: mod_base = OTHER; note = 2'-O-methyluridine-3'-phosphate
  modified_base 6: mod_base = OTHER; note = 2'-O-methyladenosine-3'-phosphate
  modified_base 7: mod_base = OTHER; note = 2'-fluorouridine-3'-phosphate
  modified_base 8: mod_base = OTHER; note = 2'-O-methyluridine-3'-phosphate
  modified_base 9: mod_base = OTHER; note = 2'-fluorocytidine-3'-phosphate
  modified_base 10: mod_base = OTHER; note = 2'-fluoroadenosine-3'-phosphate
  modified_base 11: mod_base = OTHER; note = 2'-fluoroguanosine-3'-phosphate
  modified_base 12: mod_base = OTHER; note = 2'-O-methyluridine-3'-phosphate
  modified_base 13: mod_base = OTHER; note = 2'-O-methyladenosine-3'-phosphate
  modified_base 14: mod_base = OTHER; note = 2'-O-methylcytidine-3'-phosphate
  modified_base 15: mod_base = OTHER; note = 2'-O-methyladenosine-3'-phosphate
  modified_base 16: mod_base = OTHER; note = 2'-O-methylguanosine-3'-phosphate
  modified_base 17: mod_base = OTHER; note = 2'-O-methyluridine-3'-phosphate
  modified_base 18: mod_base = OTHER; note = 2'-O-methyluridine-3'-phosphate
  modified_base 19: mod_base = OTHER; note = 2'-O-methylguanosine-3'-phosphate
  modified_base 20: mod_base = OTHER; note = 2'-O-methyluridine-3'-phosphate
  modified_base 21: mod_base = OTHER; note = 2'-O-methyladenosine
tttgtattcagtacagttgta

SEQ ID NO: 834 - RNA, 21 nt, synthetic construct
  source 1..21: mol_type = other RNA
  modified_base 1: mod_base = OTHER; note = 2'-O-methyladenosine-3'-phosphorothioate
  modified_base 2: mod_base = OTHER; note = 2'-O-methyluridine-3'-phosphorothioate
  modified_base 3: mod_base = OTHER; note = 2'-O-methyluridine-3'-phosphate
  modified_base 4: mod_base = OTHER; note = 2'-O-methylcytidine-3'-phosphate
  modified_base 5: mod_base = OTHER; note = 2'-O-methyladenosine-3'-phosphate
  modified_base 6: mod_base = OTHER; note = 2'-O-methylguanosine-3'-phosphate
  modified_base 7: mod_base = OTHER; note = 2'-fluorouridine-3'-phosphate
  modified_base 8: mod_base = OTHER; note = 2'-O-methyladenosine-3'-phosphate
  modified_base 9: mod_base = OTHER; note = 2'-fluorocytidine-3'-phosphate
  modified_base 10: mod_base = OTHER; note = 2'-fluoroadenosine-3'-phosphate
  modified_base 11: mod_base = OTHER; note = 2'-fluoroguanosine-3'-phosphate
  modified_base 12: mod_base = OTHER; note = 2'-O-methyluridine-3'-phosphate
  modified_base 13: mod_base = OTHER; note = 2'-O-methyluridine-3'-phosphate
  modified_base 14: mod_base = OTHER; note = 2'-O-methylguanosine-3'-phosphate
  modified_base 15: mod_base = OTHER; note = 2'-O-methyluridine-3'-phosphate
  modified_base 16: mod_base = OTHER; note = 2'-O-methylcytidine-3'-phosphate
  modified_base 17: mod_base = OTHER; note = 2'-O-methyladenosine-3'-phosphate
  modified_base 18: mod_base = OTHER; note = 2'-O-methyluridine-3'-phosphate
  modified_base 19: mod_base = OTHER; note = 2'-O-methyluridine-3'-phosphate
  modified_base 20: mod_base = OTHER; note = 2'-O-methylcytidine-3'-phosphate
  modified_base 21: mod_base = OTHER; note = 2'-O-methyladenosine
attcagtacagttgtcattca

SEQ ID NO: 835 - RNA, 21 nt, synthetic construct
  source 1..21: mol_type = other RNA
  modified_base 1: mod_base = OTHER; note = 2'-O-methyluridine-3'-phosphorothioate
  modified_base 2: mod_base = OTHER; note = 2'-O-methylguanosine-3'-phosphorothioate
  modified_base 3: mod_base = OTHER; note = 2'-O-methyluridine-3'-phosphate
  modified_base 4: mod_base = OTHER; note = 2'-O-methylcytidine-3'-phosphate
  modified_base 5: mod_base = OTHER; note = 2'-O-methyladenosine-3'-phosphate
  modified_base 6: mod_base = OTHER; note = 2'-O-methyluridine-3'-phosphate
  modified_base 7: mod_base = OTHER; note = 2'-fluorouridine-3'-phosphate
  modified_base 8: mod_base = OTHER; note = 2'-O-methylcytidine-3'-phosphate
  modified_base 9: mod_base = OTHER; note = 2'-fluoroadenosine-3'-phosphate
  modified_base 10: mod_base = OTHER; note = 2'-fluorocytidine-3'-phosphate
  modified_base 11: mod_base = OTHER; note = 2'-fluorouridine-3'-phosphate
  modified_base 12: mod_base = OTHER; note = 2'-O-methyluridine-3'-phosphate
  modified_base 13: mod_base = OTHER; note = 2'-O-methylcytidine-3'-phosphate
  modified_base 14: mod_base = OTHER; note = 2'-O-methyluridine-3'-phosphate
  modified_base 15: mod_base = OTHER; note = 2'-O-methyluridine-3'-phosphate
  modified_base 16: mod_base = OTHER; note = 2'-O-methyladenosine-3'-phosphate
  modified_base 17: mod_base = OTHER; note = 2'-O-methylguanosine-3'-phosphate
  modified_base 18: mod_base = OTHER; note = 2'-O-methyladenosine-3'-phosphate
  modified_base 19: mod_base = OTHER; note = 2'-O-methylcytidine-3'-phosphate
  modified_base 20: mod_base = OTHER; note = 2'-O-methyladenosine-3'-phosphate
  modified_base 21: mod_base = OTHER; note = 2'-O-methyladenosine
tgtcattcacttcttagacaa

SEQ ID NO: 836 - RNA, 21 nt, synthetic construct
  source 1..21: mol_type = other RNA
  modified_base 1: mod_base = OTHER; note = 2'-O-methyluridine-3'-phosphorothioate
  modified_base 2: mod_base = OTHER; note = 2'-O-methyluridine-3'-phosphorothioate
  modified_base 3: mod_base = OTHER; note = 2'-O-methylcytidine-3'-phosphate
  modified_base 4: mod_base = OTHER; note = 2'-O-methyluridine-3'-phosphate
  modified_base 5: mod_base = OTHER; note = 2'-O-methyluridine-3'-phosphate
  modified_base 6: mod_base = OTHER; note = 2'-O-methyladenosine-3'-phosphate
  modified_base 7: mod_base = OTHER; note = 2'-fluoroguanosine-3'-phosphate
  modified_base 8: mod_base = OTHER; note = 2'-O-methyladenosine-3'-phosphate
  modified_base 9: mod_base = OTHER; note = 2'-fluorocytidine-3'-phosphate
  modified_base 10: mod_base = OTHER; note = 2'-fluoroadenosine-3'-phosphate
  modified_base 11: mod_base = OTHER; note = 2'-fluoroadenosine-3'-phosphate
  modified_base 12: mod_base = OTHER; note = 2'-O-methyladenosine-3'-phosphate
  modified_base 13: mod_base = OTHER; note = 2'-O-methylguanosine-3'-phosphate
  modified_base 14: mod_base = OTHER; note = 2'-O-methyladenosine-3'-phosphate
  modified_base 15: mod_base = OTHER; note = 2'-O-methyladenosine-3'-phosphate
  modified_base 16: mod_base = OTHER; note = 2'-O-methyluridine-3'-phosphate
  modified_base 17: mod_base = OTHER; note = 2'-O-methyluridine-3'-phosphate
  modified_base 18: mod_base = OTHER; note = 2'-O-methylguanosine-3'-phosphate
  modified_base 19: mod_base = OTHER; note = 2'-O-methyladenosine-3'-phosphate
  modified_base 20: mod_base = OTHER; note = 2'-O-methylcytidine-3'-phosphate
  modified_base 21: mod_base = OTHER; note = 2'-O-methyladenosine
ttcttagacaaagaattgaca

SEQ ID NO: 837 - RNA, 21 nt, synthetic construct
  source 1..21: mol_type = other RNA
  modified_base 1: mod_base = OTHER; note = 2'-O-methyluridine-3'-phosphorothioate
  modified_base 2: mod_base = OTHER; note = 2'-O-methyladenosine-3'-phosphorothioate
  modified_base 3: mod_base = OTHER; note = 2'-O-methylguanosine-3'-phosphate
  modified_base 4: mod_base = OTHER; note = 2'-O-methylcytidine-3'-phosphate
  modified_base 5: mod_base = OTHER; note = 2'-O-methyladenosine-3'-phosphate
  modified_base 6: mod_base = OTHER; note = 2'-O-methyladenosine-3'-phosphate
  modified_base 7: mod_base = OTHER; note = 2'-fluoroadenosine-3'-phosphate
  modified_base 8: mod_base = OTHER; note = 2'-O-methylguanosine-3'-phosphate
  modified_base 9: mod_base = OTHER; note = 2'-fluorouridine-3'-phosphate
  modified_base 10: mod_base = OTHER; note = 2'-fluorouridine-3'-phosphate
  modified_base 11: mod_base = OTHER; note = 2'-fluorouridine-3'-phosphate
  modified_base 12: mod_base = OTHER; note = 2'-O-methylguanosine-3'-phosphate
  modified_base 13: mod_base = OTHER; note = 2'-O-methylcytidine-3'-phosphate
  modified_base 14: mod_base = OTHER; note = 2'-O-methylcytidine-3'-phosphate
  modified_base 15: mod_base = OTHER; note = 2'-O-methylcytidine-3'-phosphate
  modified_base 16: mod_base = OTHER; note = 2'-O-methyluridine-3'-phosphate
  modified_base 17: mod_base = OTHER; note = 2'-O-methylcytidine-3'-phosphate
  modified_base 18: mod_base = OTHER; note = 2'-O-methyladenosine-3'-phosphate
  modified_base 19: mod_base = OTHER; note = 2'-O-methylguanosine-3'-phosphate
  modified_base 20: mod_base = OTHER; note = 2'-O-methyluridine-3'-phosphate
  modified_base 21: mod_base = OTHER; note = 2'-O-methyluridine
tagcaaagtttgccctcagtt

SEQ ID NO: 838 - RNA, 21 nt, synthetic construct
  source 1..21: mol_type = other RNA
  modified_base 1: mod_base = OTHER; note = 2'-O-methylguanosine-3'-phosphorothioate
  modified_base 2: mod_base = OTHER; note = 2'-O-methyluridine-3'-phosphorothioate
  modified_base 3: mod_base = OTHER; note = 2'-O-methyluridine-3'-phosphate
  modified_base 4: mod_base = OTHER; note = 2'-O-methylcytidine-3'-phosphate
  modified_base 5: mod_base = OTHER; note = 2'-O-methylcytidine-3'-phosphate
  modified_base 6: mod_base = OTHER; note = 2'-O-methyladenosine-3'-phosphate
  modified_base 7: mod_base = OTHER; note = 2'-fluoroadenosine-3'-phosphate
  modified_base 8: mod_base = OTHER; note = 2'-O-methylcytidine-3'-phosphate
  modified_base 9: mod_base = OTHER; note = 2'-fluorouridine-3'-phosphate
  modified_base 10: mod_base = OTHER; note = 2'-fluorocytidine-3'-phosphate
  modified_base 11: mod_base = OTHER; note = 2'-fluoroadenosine-3'-phosphate
  modified_base 12: mod_base = OTHER; note = 2'-O-methylcytidine-3'-phosphate
  modified_base 13: mod_base = OTHER; note = 2'-O-methyladenosine-3'-phosphate
  modified_base 14: mod_base = OTHER; note = 2'-O-methylguanosine-3'-phosphate
  modified_base 15: mod_base = OTHER; note = 2'-O-methylguanosine-3'-phosphate
  modified_base 16: mod_base = OTHER; note = 2'-O-methyladenosine-3'-phosphate
  modified_base 17: mod_base = OTHER; note = 2'-O-methyluridine-3'-phosphate
  modified_base 18: mod_base = OTHER; note = 2'-O-methylguanosine-3'-phosphate
  modified_base 19: mod_base = OTHER; note = 2'-O-methyladenosine-3'-phosphate
  modified_base 20: mod_base = OTHER; note = 2'-O-methyladenosine-3'-phosphate
  modified_base 21: mod_base = OTHER; note = 2'-O-methyladenosine
gttccaactcacaggatgaaa

SEQ ID NO: 839 - RNA, 21 nt, synthetic construct
  source 1..21: mol_type = other RNA
  modified_base 1: mod_base = OTHER; note = 2'-O-methylguanosine-3'-phosphorothioate
  modified_base 2: mod_base = OTHER; note = 2'-O-methyladenosine-3'-phosphorothioate
  modified_base 3: mod_base = OTHER; note = 2'-O-methyladenosine-3'-phosphate
  modified_base 4: mod_base = OTHER; note = 2'-O-methyladenosine-3'-phosphate
  modified_base 5: mod_base = OTHER; note = 2'-O-methyladenosine-3'-phosphate
  modified_base 6: mod_base = OTHER; note = 2'-O-methyluridine-3'-phosphate
  modified_base 7: mod_base = OTHER; note = 2'-fluoroadenosine-3'-phosphate
  modified_base 8: mod_base = OTHER; note = 2'-O-methyluridine-3'-phosphate
  modified_base 9: mod_base = OTHER; note = 2'-fluorouridine-3'-phosphate
  modified_base 10: mod_base = OTHER; note = 2'-fluoroguanosine-3'-phosphate
  modified_base 11: mod_base = OTHER; note = 2'-fluorocytidine-3'-phosphate
  modified_base 12: mod_base = OTHER; note = 2'-O-methyluridine-3'-phosphate
  modified_base 13: mod_base = OTHER; note = 2'-O-methylcytidine-3'-phosphate
  modified_base 14: mod_base = OTHER; note = 2'-O-methylguanosine-3'-phosphate
  modified_base 15: mod_base = OTHER; note = 2'-O-methyluridine-3'-phosphate
  modified_base 16: mod_base = OTHER; note = 2'-O-methylguanosine-3'-phosphate
  modified_base 17: mod_base = OTHER; note = 2'-O-methylguanosine-3'-phosphate
  modified_base 18: mod_base = OTHER; note = 2'-O-methyladenosine-3'-phosphate
  modified_base 19: mod_base = OTHER; note = 2'-O-methyladenosine-3'-phosphate
  modified_base 20: mod_base = OTHER; note = 2'-O-methyluridine-3'-phosphate
  modified_base 21: mod_base = OTHER; note = 2'-O-methyladenosine
gaaaatattgctcgtggaata

SEQ ID NO: 840 - RNA, 21 nt, synthetic construct
  source 1..21: mol_type = other RNA
  modified_base 1: mod_base = OTHER; note = 2'-O-methyladenosine-3'-phosphorothioate
  modified_base 2: mod_base = OTHER; note = 2'-O-methyladenosine-3'-phosphorothioate
  modified_base 3: mod_base = OTHER; note = 2'-O-methyladenosine-3'-phosphate
  modified_base 4: mod_base = OTHER; note = 2'-O-methyladenosine-3'-phosphate
  modified_base 5: mod_base = OTHER; note = 2'-O-methyluridine-3'-phosphate
  modified_base 6: mod_base = OTHER; note = 2'-O-methyladenosine-3'-phosphate
  modified_base 7: mod_base = OTHER; note = 2'-fluorouridine-3'-phosphate
  modified_base 8: mod_base = OTHER; note = 2'-O-methyluridine-3'-phosphate
  modified_base 9: mod_base = OTHER; note = 2'-fluoroguanosine-3'-phosphate
  modified_base 10: mod_base = OTHER; note = 2'-fluorocytidine-3'-phosphate
  modified_base 11: mod_base = OTHER; note = 2'-fluorouridine-3'-phosphate
  modified_base 12: mod_base = OTHER; note = 2'-O-methylcytidine-3'-phosphate
  modified_base 13: mod_base = OTHER; note = 2'-O-methylguanosine-3'-phosphate
  modified_base 14: mod_base = OTHER; note = 2'-O-methyluridine-3'-phosphate
  modified_base 15: mod_base = OTHER; note = 2'-O-methylguanosine-3'-phosphate
  modified_base 16: mod_base = OTHER; note = 2'-O-methylguanosine-3'-phosphate
  modified_base 17: mod_base = OTHER; note = 2'-O-methyladenosine-3'-phosphate
  modified_base 18: mod_base = OTHER; note = 2'-O-methyladenosine-3'-phosphate
  modified_base 19: mod_base = OTHER; note = 2'-O-methyluridine-3'-phosphate
  modified_base 20: mod_base = OTHER; note = 2'-O-methylguanosine-3'-phosphate
  modified_base 21: mod_base = OTHER; note = 2'-O-methyladenosine
aaaatattgctcgtggaatga

SEQ ID NO: 841 - RNA, 21 nt, synthetic construct
  source 1..21: mol_type = other RNA
  modified_base 1: mod_base = OTHER; note = 2'-O-methyladenosine-3'-phosphorothioate
  modified_base 2: mod_base = OTHER; note = 2'-O-methyladenosine-3'-phosphorothioate
  modified_base 3: mod_base = OTHER; note = 2'-O-methyladenosine-3'-phosphate
  modified_base 4: mod_base = OTHER; note = 2'-O-methyluridine-3'-phosphate
  modified_base 5: mod_base = OTHER; note = 2'-O-methyladenosine-3'-phosphate
  modified_base 6: mod_base = OTHER; note = 2'-O-methyluridine-3'-phosphate
  modified_base 7: mod_base = OTHER; note = 2'-fluorouridine-3'-phosphate
  modified_base 8: mod_base = OTHER; note = 2'-O-methylguanosine-3'-phosphate
  modified_base 9: mod_base = OTHER; note = 2'-fluorocytidine-3'-phosphate
  modified_base 10: mod_base = OTHER; note = 2'-fluorouridine-3'-phosphate
  modified_base 11: mod_base = OTHER; note = 2'-fluorocytidine-3'-phosphate
  modified_base 12: mod_base = OTHER; note = 2'-O-methylguanosine-3'-phosphate
  modified_base 13: mod_base = OTHER; note = 2'-O-methyluridine-3'-phosphate
  modified_base 14: mod_base = OTHER; note = 2'-O-methylguanosine-3'-phosphate
  modified_base 15: mod_base = OTHER; note = 2'-O-methylguanosine-3'-phosphate
  modified_base 16: mod_base = OTHER; note = 2'-O-methyladenosine-3'-phosphate
  modified_base 17: mod_base = OTHER; note = 2'-O-methyladenosine-3'-phosphate
  modified_base 18: mod_base = OTHER; note = 2'-O-methyluridine-3'-phosphate
  modified_base 19: mod_base = OTHER; note = 2'-O-methylguanosine-3'-phosphate
  modified_base 20: mod_base = OTHER; note = 2'-O-methylguanosine-3'-phosphate
  modified_base 21: mod_base = OTHER; note = 2'-O-methyladenosine
aaatattgctcgtggaatgga

SEQ ID NO: 842 - RNA, 21 nt, synthetic construct
  source 1..21: mol_type = other RNA
  modified_base 1: mod_base = OTHER; note = 2'-O-methyladenosine-3'-phosphorothioate
  modified_base 2: mod_base = OTHER; note = 2'-O-methyladenosine-3'-phosphorothioate
  modified_base 3: mod_base = OTHER; note = 2'-O-methyluridine-3'-phosphate
  modified_base 4: mod_base = OTHER; note = 2'-O-methyladenosine-3'-phosphate
  modified_base 5: mod_base = OTHER; note = 2'-O-methyluridine-3'-phosphate
  modified_base 6: mod_base = OTHER; note = 2'-O-methyluridine-3'-phosphate
  modified_base 7: mod_base = OTHER; note = 2'-fluoroguanosine-3'-phosphate
  modified_base 8: mod_base = OTHER; note = 2'-O-methylcytidine-3'-phosphate
  modified_base 9: mod_base = OTHER; note = 2'-fluorouridine-3'-phosphate
  modified_base 10: mod_base = OTHER; note = 2'-fluorocytidine-3'-phosphate
  modified_base 11: mod_base = OTHER; note = 2'-fluoroguanosine-3'-phosphate
  modified_base 12: mod_base = OTHER; note = 2'-O-methyluridine-3'-phosphate
  modified_base 13: mod_base = OTHER; note = 2'-O-methylguanosine-3'-phosphate
  modified_base 14: mod_base = OTHER; note = 2'-O-methylguanosine-3'-phosphate
  modified_base 15: mod_base = OTHER; note = 2'-O-methyladenosine-3'-phosphate
  modified_base 16: mod_base = OTHER; note = 2'-O-methyladenosine-3'-phosphate
  modified_base 17: mod_base = OTHER; note = 2'-O-methyluridine-3'-phosphate
  modified_base 18: mod_base = OTHER; note = 2'-O-methylguanosine-3'-phosphate
  modified_base 19: mod_base = OTHER; note = 2'-O-methylguanosine-3'-phosphate
  modified_base 20: mod_base = OTHER; note = 2'-O-methylcytidine-3'-phosphate
  modified_base 21: mod_base = OTHER; note = 2'-O-methyladenosine
aatattgctcgtggaatggca

SEQ ID NO: 843 - RNA, 21 nt, synthetic construct
  source 1..21: mol_type = other RNA
  modified_base 1: mod_base = OTHER; note = 2'-O-methyladenosine-3'-phosphorothioate
  modified_base 2: mod_base = OTHER; note = 2'-O-methyluridine-3'-phosphorothioate
  modified_base 3: mod_base = OTHER; note = 2'-O-methyluridine-3'-phosphate
  modified_base 4: mod_base = OTHER; note = 2'-O-methylguanosine-3'-phosphate
  modified_base 5: mod_base = OTHER; note = 2'-O-methylcytidine-3'-phosphate
  modified_base 6: mod_base = OTHER; note = 2'-O-methyluridine-3'-phosphate
  modified_base 7: mod_base = OTHER; note = 2'-fluorocytidine-3'-phosphate
  modified_base 8: mod_base = OTHER; note = 2'-O-methylguanosine-3'-phosphate
  modified_base 9: mod_base = OTHER; note = 2'-fluorouridine-3'-phosphate
  modified_base 10: mod_base = OTHER; note = 2'-fluoroguanosine-3'-phosphate
  modified_base 11: mod_base = OTHER; note = 2'-fluoroguanosine-3'-phosphate
  modified_base 12: mod_base = OTHER; note = 2'-O-methyladenosine-3'-phosphate
  modified_base 13: mod_base = OTHER; note = 2'-O-methyladenosine-3'-phosphate
  modified_base 14: mod_base = OTHER; note = 2'-O-methyluridine-3'-phosphate
  modified_base 15: mod_base = OTHER; note = 2'-O-methylguanosine-3'-phosphate
  modified_base 16: mod_base = OTHER; note = 2'-O-methylguanosine-3'-phosphate
  modified_base 17: mod_base = OTHER; note = 2'-O-methylcytidine-3'-phosphate
  modified_base 18: mod_base = OTHER; note = 2'-O-methyladenosine-3'-phosphate
  modified_base 19: mod_base = OTHER; note = 2'-O-methyladenosine-3'-phosphate
  modified_base 20: mod_base = OTHER; note = 2'-O-methyluridine-3'-phosphate
  modified_base 21: mod_base = OTHER; note = 2'-O-methyluridine
attgctcgtggaatggcaatt

SEQ ID NO: 844 - RNA, 21 nt, synthetic construct
  source 1..21: mol_type = other RNA
  modified_base 1: mod_base = OTHER; note = 2'-O-methyluridine-3'-phosphorothioate
  modified_base 2: mod_base = OTHER; note = 2'-O-methylguanosine-3'-phosphorothioate
  modified_base 3: mod_base = OTHER; note = 2'-O-methylcytidine-3'-phosphate
  modified_base 4: mod_base = OTHER; note = 2'-O-methyluridine-3'-phosphate
  modified_base 5: mod_base = OTHER; note = 2'-O-methylcytidine-3'-phosphate
  modified_base 6: mod_base = OTHER; note = 2'-O-methylguanosine-3'-phosphate
  modified_base 7: mod_base = OTHER; note = 2'-fluorouridine-3'-phosphate
  modified_base 8: mod_base = OTHER; note = 2'-O-methylguanosine-3'-phosphate
  modified_base 9: mod_base = OTHER; note = 2'-fluoroguanosine-3'-phosphate
  modified_base 10: mod_base = OTHER; note = 2'-fluoroadenosine-3'-phosphate
  modified_base 11: mod_base = OTHER; note = 2'-fluoroadenosine-3'-phosphate
  modified_base 12: mod_base = OTHER; note = 2'-O-methyluridine-3'-phosphate
  modified_base 13: mod_base = OTHER; note = 2'-O-methylguanosine-3'-phosphate
  modified_base 14: mod_base = OTHER; note = 2'-O-methylguanosine-3'-phosphate
  modified_base 15: mod_base = OTHER; note = 2'-O-methylcytidine-3'-phosphate
  modified_base 16: mod_base = OTHER; note = 2'-O-methyladenosine-3'-phosphate
  modified_base 17: mod_base = OTHER; note = 2'-O-methyladenosine-3'-phosphate
  modified_base 18: mod_base = OTHER; note = 2'-O-methyluridine-3'-phosphate
  modified_base 19: mod_base = OTHER; note = 2'-O-methyluridine-3'-phosphate
  modified_base 20: mod_base = OTHER; note = 2'-O-methyluridine-3'-phosphate
  modified_base 21: mod_base = OTHER; note = 2'-O-methyluridine
tgctcgtggaatggcaatttt

SEQ ID NO: 845 - RNA, 21 nt, synthetic construct
  source 1..21: mol_type = other RNA
  modified_base 1: mod_base = OTHER; note = 2'-O-methylguanosine-3'-phosphorothioate
  modified_base 2: mod_base = OTHER; note = 2'-O-methyluridine-3'-phosphorothioate
  modified_base 3: mod_base = OTHER; note = 2'-O-methylguanosine-3'-phosphate
  modified_base 4: mod_base = OTHER; note = 2'-O-methylguanosine-3'-phosphate
  modified_base 5: mod_base = OTHER; note = 2'-O-methyladenosine-3'-phosphate
  modified_base 6: mod_base = OTHER; note = 2'-O-methyladenosine-3'-phosphate
  modified_base 7: mod_base = OTHER; note = 2'-fluorouridine-3'-phosphate
  modified_base 8: mod_base = OTHER; note = 2'-O-methylguanosine-3'-phosphate
  modified_base 9: mod_base = OTHER; note = 2'-fluoroguanosine-3'-phosphate
  modified_base 10: mod_base = OTHER; note = 2'-fluorocytidine-3'-phosphate
  modified_base 11: mod_base = OTHER; note = 2'-fluoroadenosine-3'-phosphate
  modified_base 12: mod_base = OTHER; note = 2'-O-methyladenosine-3'-phosphate
  modified_base 13: mod_base = OTHER; note = 2'-O-methyluridine-3'-phosphate
  modified_base 14: mod_base = OTHER; note = 2'-O-methyluridine-3'-phosphate
  modified_base 15: mod_base = OTHER; note = 2'-O-methyluridine-3'-phosphate
  modified_base 16: mod_base = OTHER; note = 2'-O-methyluridine-3'-phosphate
  modified_base 17: mod_base = OTHER; note = 2'-O-methyladenosine-3'-phosphate
  modified_base 18: mod_base = OTHER; note = 2'-O-methylguanosine-3'-phosphate
  modified_base 19: mod_base = OTHER; note = 2'-O-methylguanosine-3'-phosphate
  modified_base 20: mod_base = OTHER; note = 2'-O-methyluridine-3'-phosphate
  modified_base 21: mod_base = OTHER; note = 2'-O-methyladenosine
gtggaatggcaattttaggta

SEQ ID NO: 846 - RNA, 21 nt, synthetic construct
  source 1..21: mol_type = other RNA
  modified_base 1: mod_base = OTHER; note = 2'-O-methylcytidine-3'-phosphorothioate
  modified_base 2: mod_base = OTHER; note = 2'-O-methylcytidine-3'-phosphorothioate
  modified_base 3: mod_base = OTHER; note = 2'-O-methyluridine-3'-phosphate
  modified_base 4: mod_base = OTHER; note = 2'-O-methyladenosine-3'-phosphate
  modified_base 5: mod_base = OTHER; note = 2'-O-methylcytidine-3'-phosphate
  modified_base 6: mod_base = OTHER; note = 2'-O-methylguanosine-3'-phosphate
  modified_base 7: mod_base = OTHER; note = 2'-fluorouridine-3'-phosphate
  modified_base 8: mod_base = OTHER; note = 2'-O-methyluridine-3'-phosphate
  modified_base 9: mod_base = OTHER; note = 2'-fluorouridine-3'-phosphate
  modified_base 10: mod_base = OTHER; note = 2'-fluoroadenosine-3'-phosphate
  modified_base 11: mod_base = OTHER; note = 2'-fluorocytidine-3'-phosphate
  modified_base 12: mod_base = OTHER; note = 2'-O-methylcytidine-3'-phosphate
  modified_base 13: mod_base = OTHER; note = 2'-O-methylcytidine-3'-phosphate
  modified_base 14: mod_base = OTHER; note = 2'-O-methyluridine-3'-phosphate
  modified_base 15: mod_base = OTHER; note = 2'-O-methylcytidine-3'-phosphate
  modified_base 16: mod_base = OTHER; note = 2'-O-methylguanosine-3'-phosphate
  modified_base 17: mod_base = OTHER; note = 2'-O-methyladenosine-3'-phosphate
  modified_base 18: mod_base = OTHER; note = 2'-O-methyluridine-3'-phosphate
  modified_base 19: mod_base = OTHER; note = 2'-O-methylguanosine-3'-phosphate
  modified_base 20: mod_base = OTHER; note = 2'-O-methylcytidine-3'-phosphate
  modified_base 21: mod_base = OTHER; note = 2'-O-methyluridine
cctacgtttaccctcgatgct

SEQ ID NO: 847 - RNA, 21 nt, synthetic construct
  source 1..21: mol_type = other RNA
  modified_base 1: mod_base = OTHER; note = 2'-O-methylcytidine-3'-phosphorothioate
  modified_base 2: mod_base = OTHER; note = 2'-O-methyluridine-3'-phosphorothioate
  modified_base 3: mod_base = OTHER; note = 2'-O-methyladenosine-3'-phosphate
  modified_base 4: mod_base = OTHER; note = 2'-O-methylcytidine-3'-phosphate
  modified_base 5: mod_base = OTHER; note = 2'-O-methylguanosine-3'-phosphate
  modified_base 6: mod_base = OTHER; note = 2'-O-methyluridine-3'-phosphate
  modified_base 7: mod_base = OTHER; note = 2'-fluorouridine-3'-phosphate
  modified_base 8: mod_base = OTHER; note = 2'-O-methyluridine-3'-phosphate
  modified_base 9: mod_base = OTHER; note = 2'-fluoroadenosine-3'-phosphate
  modified_base 10: mod_base = OTHER; note = 2'-fluorocytidine-3'-phosphate
  modified_base 11: mod_base = OTHER; note = 2'-fluorocytidine-3'-phosphate
  modified_base 12: mod_base = OTHER; note = 2'-O-methylcytidine-3'-phosphate
  modified_base 13: mod_base = OTHER; note = 2'-O-methyluridine-3'-phosphate
  modified_base 14: mod_base = OTHER; note = 2'-O-methylcytidine-3'-phosphate
  modified_base 15: mod_base = OTHER; note = 2'-O-methylguanosine-3'-phosphate
  modified_base 16: mod_base = OTHER; note = 2'-O-methyladenosine-3'-phosphate
  modified_base 17: mod_base = OTHER; note = 2'-O-methyluridine-3'-phosphate
  modified_base 18: mod_base = OTHER; note = 2'-O-methylguanosine-3'-phosphate
  modified_base 19: mod_base = OTHER; note = 2'-O-methylcytidine-3'-phosphate
  modified_base 20: mod_base = OTHER; note = 2'-O-methyluridine-3'-phosphate
  modified_base 21: mod_base = OTHER; note = 2'-O-methyladenosine
ctacgtttaccctcgatgcta

SEQ ID NO: 848 - RNA, 21 nt, synthetic construct
  source 1..21: mol_type = other RNA
  modified_base 1: mod_base = OTHER; note = 2'-O-methylcytidine-3'-phosphorothioate
  modified_base 2: mod_base = OTHER; note = 2'-O-methyluridine-3'-phosphorothioate
  modified_base 3: mod_base = OTHER; note = 2'-O-methyluridine-3'-phosphate
  modified_base 4: mod_base = OTHER; note = 2'-O-methylguanosine-3'-phosphate
  modified_base 5: mod_base = OTHER; note = 2'-O-methyluridine-3'-phosphate
  modified_base 6: mod_base = OTHER; note = 2'-O-methyluridine-3'-phosphate
  modified_base 7: mod_base = OTHER; note = 2'-fluoroguanosine-3'-phosphate
  modified_base 8: mod_base = OTHER; note = 2'-O-methyladenosine-3'-phosphate
  modified_base 9: mod_base = OTHER; note = 2'-fluoroadenosine-3'-phosphate
  modified_base 10: mod_base = OTHER; note = 2'-fluorouridine-3'-phosphate
  modified_base 11: mod_base = OTHER; note = 2'-fluoroguanosine-3'-phosphate
  modified_base 12: mod_base = OTHER; note = 2'-O-methyluridine-3'-phosphate
  modified_base 13: mod_base = OTHER; note = 2'-O-methylcytidine-3'-phosphate
  modified_base 14: mod_base = OTHER; note = 2'-O-methyluridine-3'-phosphate
  modified_base 15: mod_base = OTHER; note = 2'-O-methyluridine-3'-phosphate
  modified_base 16: mod_base = OTHER; note = 2'-O-methylguanosine-3'-phosphate
  modified_base 17: mod_base = OTHER; note = 2'-O-methyluridine-3'-phosphate
  modified_base 18: mod_base = OTHER; note = 2'-O-methylguanosine-3'-phosphate
  modified_base 19: mod_base = OTHER; note = 2'-O-methyladenosine-3'-phosphate
  modified_base 20: mod_base = OTHER; note = 2'-O-methyluridine-3'-phosphate
  modified_base 21: mod_base = OTHER; note = 2'-O-methyluridine
cttgttgaatgtcttgtgatt

SEQ ID NO: 849 - RNA, 21 nt, synthetic construct
  source 1..21: mol_type = other RNA
  modified_base 1: mod_base = OTHER; note = 2'-O-methylguanosine-3'-phosphorothioate
  modified_base 2: mod_base = OTHER; note = 2'-O-methyluridine-3'-phosphorothioate
  modified_base 3: mod_base = OTHER; note = 2'-O-methyluridine-3'-phosphate
  modified_base 4: mod_base = OTHER; note = 2'-O-methylguanosine-3'-phosphate
  modified_base 5: mod_base = OTHER; note = 2'-O-methyladenosine-3'-phosphate
  modified_base 6: mod_base = OTHER; note = 2'-O-methyladenosine-3'-phosphate
  modified_base 7: mod_base = OTHER; note = 2'-fluorouridine-3'-phosphate
  modified_base 8: mod_base = OTHER; note = 2'-O-methylguanosine-3'-phosphate
  modified_base 9: mod_base = OTHER; note = 2'-fluorouridine-3'-phosphate
  modified_base 10: mod_base = OTHER; note = 2'-fluorocytidine-3'-phosphate
  modified_base 11: mod_base = OTHER; note = 2'-fluorouridine-3'-phosphate
  modified_base 12: mod_base = OTHER; note = 2'-O-methyluridine-3'-phosphate
  modified_base 13: mod_base = OTHER; note = 2'-O-methylguanosine-3'-phosphate
  modified_base 14: mod_base = OTHER; note = 2'-O-methyluridine-3'-phosphate
  modified_base 15: mod_base = OTHER; note = 2'-O-methylguanosine-3'-phosphate
  modified_base 16: mod_base = OTHER; note = 2'-O-methyladenosine-3'-phosphate
  modified_base 17: mod_base = OTHER; note = 2'-O-methyluridine-3'-phosphate
  modified_base 18: mod_base = OTHER; note = 2'-O-methyluridine-3'-phosphate
  modified_base 19: mod_base = OTHER; note = 2'-O-methylguanosine-3'-phosphate
  modified_base 20: mod_base = OTHER; note = 2'-O-methylguanosine-3'-phosphate
  modified_base 21: mod_base = OTHER; note = 2'-O-methyladenosine
gttgaatgtcttgtgattgga

SEQ ID NO: 850 - RNA, 21 nt, synthetic construct
  source 1..21: mol_type = other RNA
  modified_base 1: mod_base = OTHER; note = 2'-O-methylguanosine-3'-phosphorothioate
  modified_base 2: mod_base = OTHER; note = 2'-O-methyluridine-3'-phosphorothioate
  modified_base 3: mod_base = OTHER; note = 2'-O-methyladenosine-3'-phosphate
  modified_base 4: mod_base = OTHER; note = 2'-O-methylcytidine-3'-phosphate
  modified_base 5: mod_base = OTHER; note = 2'-O-methylguanosine-3'-phosphate
  modified_base 6: mod_base = OTHER; note = 2'-O-methyluridine-3'-phosphate
  modified_base 7: mod_base = OTHER; note = 2'-fluorocytidine-3'-phosphate
  modified_base 8: mod_base = OTHER; note = 2'-O-methyladenosine-3'-phosphate
  modified_base 9: mod_base = OTHER; note = 2'-fluoroguanosine-3'-phosphate
  modified_base 10: mod_base = OTHER; note = 2'-fluorocytidine-3'-phosphate
  modified_base 11: mod_base = OTHER; note = 2'-fluorouridine-3'-phosphate
  modified_base 12: mod_base = OTHER; note = 2'-O-methyluridine-3'-phosphate
  modified_base 13: mod_base = OTHER; note = 2'-O-methylguanosine-3'-phosphate
  modified_base 14: mod_base = OTHER; note = 2'-O-methyladenosine-3'-phosphate
  modified_base 15: mod_base = OTHER; note = 2'-O-methyladenosine-3'-phosphate
  modified_base 16: mod_base = OTHER; note = 2'-O-methyladenosine-3'-phosphate
  modified_base 17: mod_base = OTHER; note = 2'-O-methyluridine-3'-phosphate
  modified_base 18: mod_base = OTHER; note = 2'-O-methyluridine-3'-phosphate
  modified_base 19: mod_base = OTHER; note = 2'-O-methyladenosine-3'-phosphate
  modified_base 20: mod_base = OTHER; note = 2'-O-methyluridine-3'-phosphate
  modified_base 21: mod_base = OTHER; note = 2'-O-methyladenosine
gtacgtcagcttgaaattata

SEQ ID NO: 851 - RNA, 21 nt, synthetic construct
  source 1..21: mol_type = other RNA
  modified_base 1: mod_base = OTHER; note = 2'-O-methyluridine-3'-phosphorothioate
  modified_base 2: mod_base = OTHER; note = 2'-O-methylcytidine-3'-phosphorothioate
  modified_base 3: mod_base = OTHER; note = 2'-O-methyladenosine-3'-phosphate
  modified_base 4: mod_base = OTHER; note = 2'-O-methylguanosine-3'-phosphate
  modified_base 5: mod_base = OTHER; note = 2'-O-methylcytidine-3'-phosphate
  modified_base 6: mod_base = OTHER; note = 2'-O-methyluridine-3'-phosphate
  modified_base 7: mod_base = OTHER; note = 2'-fluorouridine-3'-phosphate
  modified_base 8: mod_base = OTHER; note = 2'-O-methylguanosine-3'-phosphate
  modified_base 9: mod_base = OTHER; note = 2'-fluoroadenosine-3'-phosphate
  modified_base 10: mod_base = OTHER; note = 2'-fluoroadenosine-3'-phosphate
  modified_base 11: mod_base = OTHER; note = 2'-fluoroadenosine-3'-phosphate
  modified_base 12: mod_base = OTHER; note = 2'-O-methyluridine-3'-phosphate
  modified_base 13: mod_base = OTHER; note = 2'-O-methyluridine-3'-phosphate
  modified_base 14: mod_base = OTHER; note = 2'-O-methyladenosine-3'-phosphate
  modified_base 15: mod_base = OTHER; note = 2'-O-methyluridine-3'-phosphate
  modified_base 16: mod_base = OTHER; note = 2'-O-methylguanosine-3'-phosphate
  modified_base 17: mod_base = OTHER; note = 2'-O-methyluridine-3'-phosphate
  modified_base 18: mod_base = OTHER; note = 2'-O-methylguanosine-3'-phosphate
  modified_base 19: mod_base = OTHER; note = 2'-O-methylcytidine-3'-phosphate
  modified_base 20: mod_base = OTHER; note = 2'-O-methyluridine-3'-phosphate
  modified_base 21: mod_base = OTHER; note = 2'-O-methyladenosine
tcagcttgaaattatgtgcta

SEQ ID NO: 852 - RNA, 21 nt, synthetic construct
  source 1..21: mol_type = other RNA
  modified_base 1: mod_base = OTHER; note = 2'-O-methyladenosine-3'-phosphorothioate
  modified_base 2: mod_base = OTHER; note = 2'-O-methyladenosine-3'-phosphorothioate
  modified_base 3: mod_base = OTHER; note = 2'-O-methyluridine-3'-phosphate
  modified_base 4: mod_base = OTHER; note = 2'-O-methyluridine-3'-phosphate
  modified_base 5: mod_base = OTHER; note = 2'-O-methyladenosine-3'-phosphate
  modified_base 6: mod_base = OTHER; note = 2'-O-methyluridine-3'-phosphate
  modified_base 7: mod_base = OTHER; note = 2'-fluoroguanosine-3'-phosphate
  modified_base 8: mod_base = OTHER; note = 2'-O-methyluridine-3'-phosphate
  modified_base 9: mod_base = OTHER; note = 2'-fluoroguanosine-3'-phosphate
  modified_base 10: mod_base = OTHER; note = 2'-fluorocytidine-3'-phosphate
  modified_base 11: mod_base = OTHER; note = 2'-fluorouridine-3'-phosphate
  modified_base 12: mod_base = OTHER; note = 2'-O-methylguanosine-3'-phosphate
  modified_base 13: mod_base = OTHER; note = 2'-O-methylcytidine-3'-phosphate
  modified_base 14: mod_base = OTHER; note = 2'-O-methyluridine-3'-phosphate
  modified_base 15: mod_base = OTHER; note = 2'-O-methyluridine-3'-phosphate
  modified_base 16: mod_base = OTHER; note = 2'-O-methyluridine-3'-phosphate
  modified_base 17: mod_base = OTHER; note = 2'-O-methylguanosine-3'-phosphate
  modified_base 18: mod_base = OTHER; note = 2'-O-methylguanosine-3'-phosphate
  modified_base 19: mod_base = OTHER; note = 2'-O-methylcytidine-3'-phosphate
  modified_base 20: mod_base = OTHER; note = 2'-O-methyluridine-3'-phosphate
  modified_base 21: mod_base = OTHER; note = 2'-O-methyladenosine
aattatgtgctgctttggcta

SEQ ID NO: 853 - RNA, 21 nt, synthetic construct
  source 1..21: mol_type = other RNA
  modified_base 1: mod_base = OTHER; note = 2'-O-methyluridine-3'-phosphorothioate
  modified_base 2: mod_base = OTHER; note = 2'-O-methyluridine-3'-phosphorothioate
  modified_base 3: mod_base = OTHER; note = 2'-O-methyluridine-3'-phosphate
  modified_base 4: mod_base = OTHER; note = 2'-O-methylguanosine-3'-phosphate
  modified_base 5: mod_base = OTHER; note = 2'-O-methylguanosine-3'-phosphate
  modified_base 6: mod_base = OTHER; note = 2'-O-methylcytidine-3'-phosphate
  modified_base 7: mod_base = OTHER; note = 2'-fluorouridine-3'-phosphate
  modified_base 8: mod_base = OTHER; note = 2'-O-methylguanosine-3'-phosphate
  modified_base 9: mod_base = OTHER; note = 2'-fluorocytidine-3'-phosphate
  modified_base 10: mod_base = OTHER; note = 2'-fluoroadenosine-3'-phosphate
  modified_base 11: mod_base = OTHER; note = 2'-fluorouridine-3'-phosphate
  modified_base 12: mod_base = OTHER; note = 2'-O-methylguanosine-3'-phosphate
  modified_base 13: mod_base = OTHER; note = 2'-O-methyluridine-3'-phosphate
  modified_base 14: mod_base = OTHER; note = 2'-O-methylcytidine-3'-phosphate
  modified_base 15: mod_base = OTHER; note = 2'-O-methyladenosine-3'-phosphate
  modified_base 16: mod_base = OTHER; note = 2'-O-methylguanosine-3'-phosphate
  modified_base 17: mod_base = OTHER; note = 2'-O-methyluridine-3'-phosphate
  modified_base 18: mod_base = OTHER; note = 2'-O-methyluridine-3'-phosphate
  modified_base 19: mod_base = OTHER; note = 2'-O-methylcytidine-3'-phosphate
  modified_base 20: mod_base = OTHER; note = 2'-O-methyluridine-3'-phosphate
  modified_base 21: mod_base = OTHER; note = 2'-O-methyluridine
tttggctgcatgtcagttctt

SEQ ID NO: 854 - RNA, 21 nt, synthetic construct
  source 1..21: mol_type = other RNA
  modified_base 1: mod_base = OTHER; note = 2'-O-methyluridine-3'-phosphorothioate
  modified_base 2: mod_base = OTHER; note = 2'-O-methyluridine-3'-phosphorothioate
  modified_base 3: mod_base = OTHER; note = 2'-O-methylguanosine-3'-phosphate
  modified_base 4: mod_base = OTHER; note = 2'-O-methylcytidine-3'-phosphate
  modified_base 5: mod_base = OTHER; note = 2'-O-methylcytidine-3'-phosphate
  modified_base 6: mod_base = OTHER; note = 2'-O-methyladenosine-3'-phosphate
  modified_base 7: mod_base = OTHER; note = 2'-fluoroadenosine-3'-phosphate
  modified_base 8: mod_base = OTHER; note = 2'-O-methylcytidine-3'-phosphate
  modified_base 9: mod_base = OTHER; note = 2'-fluorouridine-3'-phosphate
  modified_base 10: mod_base = OTHER; note = 2'-fluoroadenosine-3'-phosphate
  modified_base 11: mod_base = OTHER; note = 2'-fluorocytidine-3'-phosphate
  modified_base 12: mod_base = OTHER; note = 2'-O-methyluridine-3'-phosphate
  modified_base 13: mod_base = OTHER; note = 2'-O-methyluridine-3'-phosphate
  modified_base 14: mod_base = OTHER; note = 2'-O-methylcytidine-3'-phosphate
  modified_base 15: mod_base = OTHER; note = 2'-O-methylguanosine-3'-phosphate
  modified_base 16: mod_base = OTHER; note = 2'-O-methyluridine-3'-phosphate
  modified_base 17: mod_base = OTHER; note = 2'-O-methylguanosine-3'-phosphate
  modified_base 18: mod_base = OTHER; note = 2'-O-methyluridine-3'-phosphate
  modified_base 19: mod_base = OTHER; note = 2'-O-methyluridine-3'-phosphate
  modified_base 20: mod_base = OTHER; note = 2'-O-methylcytidine-3'-phosphate
  modified_base 21: mod_base = OTHER; note = 2'-O-methyladenosine
ttgccaactacttcgtgttca

SEQ ID NO: 855 - RNA, 21 nt, synthetic construct
  source 1..21: mol_type = other RNA
  modified_base 1: mod_base = OTHER; note = 2'-O-methyluridine-3'-phosphorothioate
  modified_base 2: mod_base = OTHER; note = 2'-O-methylguanosine-3'-phosphorothioate
  modified_base 3: mod_base = OTHER; note = 2'-O-methylcytidine-3'-phosphate
  modified_base 4: mod_base = OTHER; note = 2'-O-methylcytidine-3'-phosphate
  modified_base 5: mod_base = OTHER; note = 2'-O-methyladenosine-3'-phosphate
  modified_base 6: mod_base = OTHER; note = 2'-O-methyladenosine-3'-phosphate
  modified_base 7: mod_base = OTHER; note = 2'-fluorocytidine-3'-phosphate
  modified_base 8: mod_base = OTHER; note = 2'-O-methyluridine-3'-phosphate
  modified_base 9: mod_base = OTHER; note = 2'-fluoroadenosine-3'-phosphate
  modified_base 10: mod_base = OTHER; note = 2'-fluorocytidine-3'-phosphate
  modified_base 11: mod_base = OTHER; note = 2'-fluorouridine-3'-phosphate
  modified_base 12: mod_base = OTHER; note = 2'-O-methyluridine-3'-phosphate
  modified_base 13: mod_base = OTHER; note = 2'-O-methylcytidine-3'-phosphate
  modified_base 14: mod_base = OTHER; note = 2'-O-methylguanosine-3'-phosphate
  modified_base 15: mod_base = OTHER; note = 2'-O-methyluridine-3'-phosphate
  modified_base 16: mod_base = OTHER; note = 2'-O-methylguanosine-3'-phosphate
  modified_base 17: mod_base = OTHER; note = 2'-O-methyluridine-3'-phosphate
  modified_base 18: mod_base = OTHER; note = 2'-O-methyluridine-3'-phosphate
  modified_base 19: mod_base = OTHER; note = 2'-O-methylcytidine-3'-phosphate
  modified_base 20: mod_base = OTHER; note = 2'-O-methyladenosine-3'-phosphate
  modified_base 21: mod_base = OTHER; note = 2'-O-methyluridine
tgccaactacttcgtgttcat

SEQ ID NO: 856 - RNA, 21 nt, synthetic construct
  source 1..21: mol_type = other RNA
  modified_base 1: mod_base = OTHER; note = 2'-O-methyladenosine-3'-phosphorothioate
  modified_base 2: mod_base = OTHER; note = 2'-O-methyladenosine-3'-phosphorothioate
  modified_base 3: mod_base = OTHER; note = 2'-O-methylcytidine-3'-phosphate
  modified_base 4: mod_base = OTHER; note = 2'-O-methyluridine-3'-phosphate
  modified_base 5: mod_base = OTHER; note = 2'-O-methyladenosine-3'-phosphate
  modified_base 6: mod_base = OTHER; note = 2'-O-methylcytidine-3'-phosphate
  modified_base 7: mod_base = OTHER; note = 2'-fluorouridine-3'-phosphate
  modified_base 8: mod_base = OTHER; note = 2'-O-methyluridine-3'-phosphate
  modified_base 9: mod_base = OTHER; note = 2'-fluorocytidine-3'-phosphate
  modified_base 10: mod_base = OTHER; note = 2'-fluoroguanosine-3'-phosphate
  modified_base 11: mod_base = OTHER; note = 2'-fluorouridine-3'-phosphate
  modified_base 12: mod_base = OTHER; note = 2'-O-methylguanosine-3'-phosphate
  modified_base 13: mod_base = OTHER; note = 2'-O-methyluridine-3'-phosphate
  modified_base 14: mod_base = OTHER; note = 2'-O-methyluridine-3'-phosphate
  modified_base 15: mod_base = OTHER; note = 2'-O-methylcytidine-3'-phosphate
  modified_base 16: mod_base = OTHER; note = 2'-O-methyladenosine-3'-phosphate
  modified_base 17: mod_base = OTHER; note = 2'-O-methyluridine-3'-phosphate
  modified_base 18: mod_base = OTHER; note = 2'-O-methylguanosine-3'-phosphate
  modified_base 19: mod_base = OTHER; note = 2'-O-methyladenosine-3'-phosphate
  modified_base 20: mod_base = OTHER; note = 2'-O-methylcytidine-3'-phosphate
  modified_base 21: mod_base = OTHER; note = 2'-O-methyluridine
aactacttcgtgttcatgact

SEQ ID NO: 857 - RNA, 21 nt, synthetic construct
  source 1..21: mol_type = other RNA
  modified_base 1: mod_base = OTHER; note = 2'-O-methyladenosine-3'-phosphorothioate
  modified_base 2: mod_base = OTHER; note = 2'-O-methylcytidine-3'-phosphorothioate
  modified_base 3: mod_base = OTHER; note = 2'-O-methyluridine-3'-phosphate
  modified_base 4: mod_base = OTHER; note = 2'-O-methyluridine-3'-phosphate
  modified_base 5: mod_base = OTHER; note = 2'-O-methylcytidine-3'-phosphate
  modified_base 6: mod_base = OTHER; note = 2'-O-methylguanosine-3'-phosphate
  modified_base 7: mod_base = OTHER; note = 2'-fluorouridine-3'-phosphate
  modified_base 8: mod_base = OTHER; note = 2'-O-methylguanosine-3'-phosphate
  modified_base 9: mod_base = OTHER; note = 2'-fluorouridine-3'-phosphate
  modified_base 10: mod_base = OTHER; note = 2'-fluorouridine-3'-phosphate
  modified_base 11: mod_base = OTHER; note = 2'-fluorocytidine-3'-phosphate
  modified_base 12: mod_base = OTHER; note = 2'-O-methyladenosine-3'-phosphate
  modified_base 13: mod_base = OTHER; note = 2'-O-methyluridine-3'-phosphate
  modified_base 14: mod_base = OTHER; note = 2'-O-methylguanosine-3'-phosphate
  modified_base 15: mod_base = OTHER; note = 2'-O-methyladenosine-3'-phosphate
  modified_base 16: mod_base = OTHER; note = 2'-O-methylcytidine-3'-phosphate
  modified_base 17: mod_base = OTHER; note = 2'-O-methyluridine-3'-phosphate
  modified_base 18: mod_base = OTHER; note = 2'-O-methyluridine-3'-phosphate
  modified_base 19: mod_base = OTHER; note = 2'-O-methyluridine-3'-phosphate
  modified_base 20: mod_base = OTHER; note = 2'-O-methylcytidine-3'-phosphate
  modified_base 21: mod_base = OTHER; note = 2'-O-methyluridine
acttcgtgttcatgactttct

SEQ ID NO: 858 - RNA, 21 nt, synthetic construct
  source 1..21: mol_type = other RNA
  modified_base 1: mod_base = OTHER; note = 2'-O-methylcytidine-3'-phosphorothioate
  modified_base 2: mod_base = OTHER; note = 2'-O-methyluridine-3'-phosphorothioate
  modified_base 3: mod_base = OTHER; note = 2'-O-methyluridine-3'-phosphate
  modified_base 4: mod_base = OTHER; note = 2'-O-methylcytidine-3'-phosphate
  modified_base 5: mod_base = OTHER; note = 2'-O-methylguanosine-3'-phosphate
  modified_base 6: mod_base = OTHER; note = 2'-O-methyluridine-3'-phosphate
  modified_base 7: mod_base = OTHER; note = 2'-fluoroguanosine-3'-phosphate
  modified_base 8: mod_base = OTHER; note = 2'-O-methyluridine-3'-phosphate
  modified_base 9: mod_base = OTHER; note = 2'-fluorouridine-3'-phosphate
  modified_base 10: mod_base = OTHER; note = 2'-fluorocytidine-3'-phosphate
  modified_base 11: mod_base = OTHER; note = 2'-fluoroadenosine-3'-phosphate
  modified_base 12: mod_base = OTHER; note = 2'-O-methyluridine-3'-phosphate
  modified_base 13: mod_base = OTHER; note = 2'-O-methylguanosine-3'-phosphate
  modified_base 14: mod_base = OTHER; note = 2'-O-methyladenosine-3'-phosphate
  modified_base 15: mod_base = OTHER; note = 2'-O-methylcytidine-3'-phosphate
  modified_base 16: mod_base = OTHER; note = 2'-O-methyluridine-3'-phosphate
  modified_base 17: mod_base = OTHER; note = 2'-O-methyluridine-3'-phosphate
  modified_base 18: mod_base = OTHER; note = 2'-O-methyluridine-3'-phosphate
  modified_base 19: mod_base = OTHER; note = 2'-O-methylcytidine-3'-phosphate
  modified_base 20: mod_base = OTHER; note = 2'-O-methyluridine-3'-phosphate
  modified_base 21: mod_base = OTHER; note = 2'-O-methyluridine
cttcgtgttcatgactttctt

SEQ ID NO: 859 - RNA, 21 nt, synthetic construct
  source 1..21: mol_type = other RNA
  modified_base 1: mod_base = OTHER; note = 2'-O-methyladenosine-3'-phosphorothioate
  modified_base 2: mod_base = OTHER; note = 2'-O-methyluridine-3'-phosphorothioate
  modified_base 3: mod_base = OTHER; note = 2'-O-methylguanosine-3'-phosphate
  modified_base 4: mod_base = OTHER; note = 2'-O-methyluridine-3'-phosphate
  modified_base 5: mod_base = OTHER; note = 2'-O-methylcytidine-3'-phosphate
  modified_base 6: mod_base = OTHER; note = 2'-O-methyluridine-3'-phosphate
  modified_base 7: mod_base = OTHER; note = 2'-fluorocytidine-3'-phosphate
  modified_base 8: mod_base = OTHER; note = 2'-O-methyluridine-3'-phosphate
  modified_base 9: mod_base = OTHER; note = 2'-fluoroadenosine-3'-phosphate
  modified_base 10: mod_base = OTHER; note = 2'-fluoroguanosine-3'-phosphate
  modified_base 11: mod_base = OTHER; note = 2'-fluoroguanosine-3'-phosphate
  modified_base 12: mod_base = OTHER; note = 2'-O-methylcytidine-3'-phosphate
  modified_base 13: mod_base = OTHER; note = 2'-O-methyluridine-3'-phosphate
  modified_base 14: mod_base = OTHER; note = 2'-O-methyluridine-3'-phosphate
  modified_base 15: mod_base = OTHER; note = 2'-O-methylguanosine-3'-phosphate
  modified_base 16: mod_base = OTHER; note = 2'-O-methylguanosine-3'-phosphate
  modified_base 17: mod_base = OTHER; note = 2'-O-methyluridine-3'-phosphate
  modified_base 18: mod_base = OTHER; note = 2'-O-methyluridine-3'-phosphate
  modified_base 19: mod_base = OTHER; note = 2'-O-methylcytidine-3'-phosphate
  modified_base 20: mod_base = OTHER; note = 2'-O-methyluridine-3'-phosphate
  modified_base 21: mod_base = OTHER; note = 2'-O-methyluridine
atgtctctaggcttggttctt

SEQ ID NO: 860 - RNA, 21 nt, synthetic construct
  source 1..21: mol_type = other RNA
  modified_base 1: mod_base = OTHER; note = 2'-O-methyluridine-3'-phosphorothioate
  modified_base 2: mod_base = OTHER; note = 2'-O-methyladenosine-3'-phosphorothioate
  modified_base 3: mod_base = OTHER; note = 2'-O-methylguanosine-3'-phosphate
  modified_base 4: mod_base = OTHER; note = 2'-O-methylguanosine-3'-phosphate
  modified_base 5: mod_base = OTHER; note = 2'-O-methylcytidine-3'-phosphate
  modified_base 6: mod_base = OTHER; note = 2'-O-methyluridine-3'-phosphate
  modified_base 7: mod_base = OTHER; note = 2'-fluorouridine-3'-phosphate
  modified_base 8: mod_base = OTHER; note = 2'-O-methylguanosine-3'-phosphate
  modified_base 9: mod_base = OTHER; note = 2'-fluoroguanosine-3'-phosphate
  modified_base 10: mod_base = OTHER; note = 2'-fluorouridine-3'-phosphate
  modified_base 11: mod_base = OTHER; note = 2'-fluorouridine-3'-phosphate
  modified_base 12: mod_base = OTHER; note = 2'-O-methylcytidine-3'-phosphate
  modified_base 13: mod_base = OTHER; note = 2'-O-methyluridine-3'-phosphate
  modified_base 14: mod_base = OTHER; note = 2'-O-methyluridine-3'-phosphate
  modified_base 15: mod_base = OTHER; note = 2'-O-methylguanosine-3'-phosphate
  modified_base 16: mod_base = OTHER; note = 2'-O-methyluridine-3'-phosphate
  modified_base 17: mod_base = OTHER; note = 2'-O-methyluridine-3'-phosphate
  modified_base 18: mod_base = OTHER; note = 2'-O-methylcytidine-3'-phosphate
  modified_base 19: mod_base = OTHER; note = 2'-O-methyladenosine-3'-phosphate
  modified_base 20: mod_base = OTHER; note = 2'-O-methyluridine-3'-phosphate
  modified_base 21: mod_base = OTHER; note = 2'-O-methyladenosine
taggcttggttcttgttcata

SEQ ID NO: 861 - RNA, 21 nt, synthetic construct
  source 1..21: mol_type = other RNA
  modified_base 1: mod_base = OTHER; note = 2'-O-methyluridine-3'-phosphorothioate
  modified_base 2: mod_base = OTHER; note = 2'-O-methylcytidine-3'-phosphorothioate
  modified_base 3: mod_base = OTHER; note = 2'-O-methyluridine-3'-phosphate
  modified_base 4: mod_base = OTHER; note = 2'-O-methyluridine-3'-phosphate
  modified_base 5: mod_base = OTHER; note = 2'-O-methylguanosine-3'-phosphate
  modified_base 6: mod_base = OTHER; note = 2'-O-methyluridine-3'-phosphate
  modified_base 7: mod_base = OTHER; note = 2'-fluorouridine-3'-phosphate
  modified_base 8: mod_base = OTHER; note = 2'-O-methylcytidine-3'-phosphate
  modified_base 9: mod_base = OTHER; note = 2'-fluoroadenosine-3'-phosphate
  modified_base 10: mod_base = OTHER; note = 2'-fluorouridine-3'-phosphate
  modified_base 11: mod_base = OTHER; note = 2'-fluoroguanosine-3'-phosphate
  modified_base 12: mod_base = OTHER; note = 2'-O-methylcytidine-3'-phosphate
  modified_base 13: mod_base = OTHER; note = 2'-O-methyluridine-3'-phosphate
  modified_base 14: mod_base = OTHER; note = 2'-O-methylcytidine-3'-phosphate
  modified_base 15: mod_base = OTHER; note = 2'-O-methyladenosine-3'-phosphate
  modified_base 16: mod_base = OTHER; note = 2'-O-methylcytidine-3'-phosphate
  modified_base 17: mod_base = OTHER; note = 2'-O-methyladenosine-3'-phosphate
  modified_base 18: mod_base = OTHER; note = 2'-O-methylguanosine-3'-phosphate
  modified_base 19: mod_base = OTHER; note = 2'-O-methyluridine-3'-phosphate
  modified_base 20: mod_base = OTHER; note = 2'-O-methylcytidine-3'-phosphate
  modified_base 21: mod_base = OTHER; note = 2'-O-methyladenosine
tcttgttcatgctcacagtca

SEQ ID NO: 862 - RNA, 21 nt, synthetic construct
  source 1..21: mol_type = other RNA
  modified_base 1: mod_base = OTHER; note = 2'-O-methyladenosine-3'-phosphorothioate
  modified_base 2: mod_base = OTHER; note = 2'-O-methyluridine-3'-phosphorothioate
  modified_base 3: mod_base = OTHER; note = 2'-O-methylguanosine-3'-phosphate
  modified_base 4: mod_base = OTHER; note = 2'-O-methylcytidine-3'-phosphate
  modified_base 5: mod_base = OTHER; note = 2'-O-methyluridine-3'-phosphate
  modified_base 6: mod_base = OTHER; note = 2'-O-methylcytidine-3'-phosphate
  modified_base 7: mod_base = OTHER; note = 2'-fluoroadenosine-3'-phosphate
  modified_base 8: mod_base = OTHER; note = 2'-O-methylcytidine-3'-phosphate
  modified_base 9: mod_base = OTHER; note = 2'-fluoroadenosine-3'-phosphate
  modified_base 10: mod_base = OTHER; note = 2'-fluoroguanosine-3'-phosphate
  modified_base 11: mod_base = OTHER; note = 2'-fluorouridine-3'-phosphate
  modified_base 12: mod_base = OTHER; note = 2'-O-methylcytidine-3'-phosphate
  modified_base 13: mod_base = OTHER; note = 2'-O-methylguanosine-3'-phosphate
  modified_base 14: mod_base = OTHER; note = 2'-O-methylcytidine-3'-phosphate
  modified_base 15: mod_base = OTHER; note = 2'-O-methyluridine-3'-phosphate
  modified_base 16: mod_base = OTHER; note = 2'-O-methylguanosine-3'-phosphate
  modified_base 17: mod_base = OTHER; note = 2'-O-methylguanosine-3'-phosphate
  modified_base 18: mod_base = OTHER; note = 2'-O-methyladenosine-3'-phosphate
  modified_base 19: mod_base = OTHER; note = 2'-O-methyluridine-3'-phosphate
  modified_base 20: mod_base = OTHER; note = 2'-O-methyladenosine-3'-phosphate
  modified_base 21: mod_base = OTHER; note = 2'-O-methyladenosine
atgctcacagtcgctggataa

SEQ ID NO: 863 - RNA, 21 nt, synthetic construct
  source 1..21: mol_type = other RNA
  modified_base 1: mod_base = OTHER; note = 2'-O-methyluridine-3'-phosphorothioate
  modified_base 2: mod_base = OTHER; note = 2'-O-methylguanosine-3'-phosphorothioate
  modified_base 3: mod_base = OTHER; note = 2'-O-methylcytidine-3'-phosphate
  modified_base 4: mod_base = OTHER; note = 2'-O-methyluridine-3'-phosphate
  modified_base 5: mod_base = OTHER; note = 2'-O-methylcytidine-3'-phosphate
  modified_base 6: mod_base = OTHER; note = 2'-O-methyladenosine-3'-phosphate
  modified_base 7: mod_base = OTHER; note = 2'-fluorocytidine-3'-phosphate
  modified_base 8: mod_base = OTHER; note = 2'-O-methyladenosine-3'-phosphate
  modified_base 9: mod_base = OTHER; note = 2'-fluoroguanosine-3'-phosphate
  modified_base 10: mod_base = OTHER; note = 2'-fluorouridine-3'-phosphate
  modified_base 11: mod_base = OTHER; note = 2'-fluorocytidine-3'-phosphate
  modified_base 12: mod_base = OTHER; note = 2'-O-methylguanosine-3'-phosphate
  modified_base 13: mod_base = OTHER; note = 2'-O-methylcytidine-3'-phosphate
  modified_base 14: mod_base = OTHER; note = 2'-O-methyluridine-3'-phosphate
  modified_base 15: mod_base = OTHER; note = 2'-O-methylguanosine-3'-phosphate
  modified_base 16: mod_base = OTHER; note = 2'-O-methylguanosine-3'-phosphate
  modified_base 17: mod_base = OTHER; note = 2'-O-methyladenosine-3'-phosphate
  modified_base 18: mod_base = OTHER; note = 2'-O-methyluridine-3'-phosphate
  modified_base 19: mod_base = OTHER; note = 2'-O-methyladenosine-3'-phosphate
  modified_base 20: mod_base = OTHER; note = 2'-O-methylguanosine-3'-phosphate
  modified_base 21: mod_base = OTHER; note = 2'-O-methyladenosine
tgctcacagtcgctggataga

SEQ ID NO: 864 - RNA, 21 nt, synthetic construct
  source 1..21: mol_type = other RNA
  modified_base 1: mod_base = OTHER; note = 2'-O-methylcytidine-3'-phosphorothioate
  modified_base 2: mod_base = OTHER; note = 2'-O-methyladenosine-3'-phosphorothioate
  modified_base 3: mod_base = OTHER; note = 2'-O-methylcytidine-3'-phosphate
  modified_base 4: mod_base = OTHER; note = 2'-O-methyladenosine-3'-phosphate
  modified_base 5: mod_base = OTHER; note = 2'-O-methylguanosine-3'-phosphate
  modified_base 6: mod_base = OTHER; note = 2'-O-methyluridine-3'-phosphate
  modified_base 7: mod_base = OTHER; note = 2'-fluorocytidine-3'-phosphate
  modified_base 8: mod_base = OTHER; note = 2'-O-methylguanosine-3'-phosphate
  modified_base 9: mod_base = OTHER; note = 2'-fluorocytidine-3'-phosphate
  modified_base 10: mod_base = OTHER; note = 2'-fluorouridine-3'-phosphate
  modified_base 11: mod_base = OTHER; note = 2'-fluoroguanosine-3'-phosphate
  modified_base 12: mod_base = OTHER; note = 2'-O-methylguanosine-3'-phosphate
  modified_base 13: mod_base = OTHER; note = 2'-O-methyladenosine-3'-phosphate
  modified_base 14: mod_base = OTHER; note = 2'-O-methyluridine-3'-phosphate
  modified_base 15: mod_base = OTHER; note = 2'-O-methyladenosine-3'-phosphate
  modified_base 16: mod_base = OTHER; note = 2'-O-methylguanosine-3'-phosphate
  modified_base 17: mod_base = OTHER; note = 2'-O-methylcytidine-3'-phosphate
  modified_base 18: mod_base = OTHER; note = 2'-O-methyluridine-3'-phosphate
  modified_base 19: mod_base = OTHER; note = 2'-O-methylguanosine-3'-phosphate
  modified_base 20: mod_base = OTHER; note = 2'-O-methyladenosine-3'-phosphate
  modified_base 21: mod_base = OTHER; note = 2'-O-methyluridine
cacagtcgctggatagctgat

SEQ ID NO: 865 - RNA, 21 nt, synthetic construct
  source 1..21: mol_type = other RNA
  modified_base 1: mod_base = OTHER; note = 2'-O-methyladenosine-3'-phosphorothioate
  modified_base 2: mod_base = OTHER; note = 2'-O-methylguanosine-3'-phosphorothioate
  modified_base 3: mod_base = OTHER; note = 2'-O-methyluridine-3'-phosphate
  modified_base 4: mod_base = OTHER; note = 2'-O-methylcytidine-3'-phosphate
  modified_base 5: mod_base = OTHER; note = 2'-O-methylguanosine-3'-phosphate
  modified_base 6: mod_base = OTHER; note = 2'-O-methylcytidine-3'-phosphate
  modified_base 7: mod_base = OTHER; note = 2'-fluorouridine-3'-phosphate
  modified_base 8: mod_base = OTHER; note = 2'-O-methylguanosine-3'-phosphate
  modified_base 9: mod_base = OTHER; note = 2'-fluoroguanosine-3'-phosphate
  modified_base 10: mod_base = OTHER; note = 2'-fluoroadenosine-3'-phosphate
  modified_base 11: mod_base = OTHER; note = 2'-fluorouridine-3'-phosphate
  modified_base 12: mod_base = OTHER; note = 2'-O-methyladenosine-3'-phosphate
  modified_base 13: mod_base = OTHER; note = 2'-O-methylguanosine-3'-phosphate
  modified_base 14: mod_base = OTHER; note = 2'-O-methylcytidine-3'-phosphate
  modified_base 15: mod_base = OTHER; note = 2'-O-methyluridine-3'-phosphate
  modified_base 16: mod_base = OTHER; note = 2'-O-methylguanosine-3'-phosphate
  modified_base 17: mod_base = OTHER; note = 2'-O-methyladenosine-3'-phosphate
  modified_base 18: mod_base = OTHER; note = 2'-O-methyluridine-3'-phosphate
  modified_base 19: mod_base = OTHER; note = 2'-O-methylcytidine-3'-phosphate
  modified_base 20: mod_base = OTHER; note = 2'-O-methylcytidine-3'-phosphate
  modified_base 21: mod_base = OTHER; note = 2'-O-methyluridine
agtcgctggatagctgatcct

SEQ ID NO: 866 - RNA, 21 nt, synthetic construct
  source 1..21: mol_type = other RNA
  modified_base 1: mod_base = OTHER; note = 2'-O-methylcytidine-3'-phosphorothioate
  modified_base 2: mod_base = OTHER; note = 2'-O-methyluridine-3'-phosphorothioate
  modified_base 3: mod_base = OTHER; note = 2'-O-methyluridine-3'-phosphate
  modified_base 4: mod_base = OTHER; note = 2'-O-methylcytidine-3'-phosphate
  modified_base 5: mod_base = OTHER; note = 2'-O-methyluridine-3'-phosphate
  modified_base 6: mod_base = OTHER; note = 2'-O-methylcytidine-3'-phosphate
  modified_base 7: mod_base = OTHER; note = 2'-fluorocytidine-3'-phosphate
  modified_base 8: mod_base = OTHER; note = 2'-O-methyluridine-3'-phosphate
  modified_base 9: mod_base = OTHER; note = 2'-fluorocytidine-3'-phosphate
  modified_base 10: mod_base = OTHER; note = 2'-fluoroadenosine-3'-phosphate
  modified_base 11: mod_base = OTHER; note = 2'-fluoroadenosine-3'-phosphate
  modified_base 12: mod_base = OTHER; note = 2'-O-methyladenosine-3'-phosphate
  modified_base 13: mod_base = OTHER; note = 2'-O-methyladenosine-3'-phosphate
  modified_base 14: mod_base = OTHER; note = 2'-O-methylcytidine-3'-phosphate
  modified_base 15: mod_base = OTHER; note = 2'-O-methyladenosine-3'-phosphate
  modified_base 16: mod_base = OTHER; note = 2'-O-methylguanosine-3'-phosphate
  modified_base 17: mod_base = OTHER; note = 2'-O-methyluridine-3'-phosphate
  modified_base 18: mod_base = OTHER; note = 2'-O-methyladenosine-3'-phosphate
  modified_base 19: mod_base = OTHER; note = 2'-O-methylcytidine-3'-phosphate
  modified_base 20: mod_base = OTHER; note = 2'-O-methyladenosine-3'-phosphate
  modified_base 21: mod_base = OTHER; note = 2'-O-methyladenosine
cttctcctcaaaacagtacaa

SEQ ID NO: 867 - RNA, 21 nt, synthetic construct
  source 1..21: mol_type = other RNA
  modified_base 1: mod_base = OTHER; note = 2'-O-methylcytidine-3'-phosphorothioate
  modified_base 2: mod_base = OTHER; note = 2'-O-methyluridine-3'-phosphorothioate
  modified_base 3: mod_base = OTHER; note = 2'-O-methylcytidine-3'-phosphate
  modified_base 4: mod_base = OTHER; note = 2'-O-methylcytidine-3'-phosphate
  modified_base 5: mod_base = OTHER; note = 2'-O-methyluridine-3'-phosphate
  modified_base 6: mod_base = OTHER; note = 2'-O-methylcytidine-3'-phosphate
  modified_base 7: mod_base = OTHER; note = 2'-fluoroadenosine-3'-phosphate
  modified_base 8: mod_base = OTHER; note = 2'-O-methyladenosine-3'-phosphate
  modified_base 9: mod_base = OTHER; note = 2'-fluoroadenosine-3'-phosphate
  modified_base 10: mod_base = OTHER; note = 2'-fluoroadenosine-3'-phosphate
  modified_base 11: mod_base = OTHER; note = 2'-fluorocytidine-3'-phosphate
  modified_base 12: mod_base = OTHER; note = 2'-O-methyladenosine-3'-phosphate
  modified_base 13: mod_base = OTHER; note = 2'-O-methylguanosine-3'-phosphate
  modified_base 14: mod_base = OTHER; note = 2'-O-methyluridine-3'-phosphate
  modified_base 15: mod_base = OTHER; note = 2'-O-methyladenosine-3'-phosphate
  modified_base 16: mod_base = OTHER; note = 2'-O-methylcytidine-3'-phosphate
  modified_base 17: mod_base = OTHER; note = 2'-O-methyladenosine-3'-phosphate
  modified_base 18: mod_base = OTHER; note = 2'-O-methylguanosine-3'-phosphate
  modified_base 19: mod_base = OTHER; note = 2'-O-methylcytidine-3'-phosphate
  modified_base 20: mod_base = OTHER; note = 2'-O-methyladenosine-3'-phosphate
  modified_base 21: mod_base = OTHER; note = 2'-O-methyladenosine
ctcctcaaaacagtacagcaa

SEQ ID NO: 868 - RNA, 21 nt, synthetic construct
  source 1..21: mol_type = other RNA
  modified_base 1: mod_base = OTHER; note = 2'-O-methyladenosine-3'-phosphorothioate
  modified_base 2: mod_base = OTHER; note = 2'-O-methylcytidine-3'-phosphorothioate
  modified_base 3: mod_base = OTHER; note = 2'-O-methyladenosine-3'-phosphate
  modified_base 4: mod_base = OTHER; note = 2'-O-methylguanosine-3'-phosphate
  modified_base 5: mod_base = OTHER; note = 2'-O-methyluridine-3'-phosphate
  modified_base 6: mod_base = OTHER; note = 2'-O-methyladenosine-3'-phosphate
  modified_base 7: mod_base = OTHER; note = 2'-fluorocytidine-3'-phosphate
  modified_base 8: mod_base = OTHER; note = 2'-O-methyladenosine-3'-phosphate
  modified_base 9: mod_base = OTHER; note = 2'-fluoroguanosine-3'-phosphate
  modified_base 10: mod_base = OTHER; note = 2'-fluorocytidine-3'-phosphate
  modified_base 11: mod_base = OTHER; note = 2'-fluoroadenosine-3'-phosphate
  modified_base 12: mod_base = OTHER; note = 2'-O-methylguanosine-3'-phosphate
  modified_base 13: mod_base = OTHER; note = 2'-O-methyladenosine-3'-phosphate
  modified_base 14: mod_base = OTHER; note = 2'-O-methyluridine-3'-phosphate
  modified_base 15: mod_base = OTHER; note = 2'-O-methyladenosine-3'-phosphate
  modified_base 16: mod_base = OTHER; note = 2'-O-methylcytidine-3'-phosphate
  modified_base 17: mod_base = OTHER; note = 2'-O-methyluridine-3'-phosphate
  modified_base 18: mod_base = OTHER; note = 2'-O-methyluridine-3'-phosphate
  modified_base 19: mod_base = OTHER; note = 2'-O-methylcytidine-3'-phosphate
  modified_base 20: mod_base = OTHER; note = 2'-O-methyluridine-3'-phosphate
  modified_base 21: mod_base = OTHER; note = 2'-O-methyladenosine
acagtacagcagatacttcta

SEQ ID NO: 869 - RNA, 21 nt, synthetic construct
  source 1..21: mol_type = other RNA
  modified_base 1: mod_base = OTHER; note = 2'-O-methylcytidine-3'-phosphorothioate
  modified_base 2: mod_base = OTHER; note = 2'-O-methyladenosine-3'-phosphorothioate
  modified_base 3: mod_base = OTHER; note = 2'-O-methylguanosine-3'-phosphate
  modified_base 4: mod_base = OTHER; note = 2'-O-methyluridine-3'-phosphate
  modified_base 5: mod_base = OTHER; note = 2'-O-methyladenosine-3'-phosphate
  modified_base 6: mod_base = OTHER; note = 2'-O-methylcytidine-3'-phosphate
  modified_base 7: mod_base = OTHER; note = 2'-fluoroadenosine-3'-phosphate
  modified_base 8: mod_base = OTHER; note = 2'-O-methylguanosine-3'-phosphate
  modified_base 9: mod_base = OTHER; note = 2'-fluorocytidine-3'-phosphate
  modified_base 10: mod_base = OTHER; note = 2'-fluoroadenosine-3'-phosphate
  modified_base 11: mod_base = OTHER; note = 2'-fluoroguanosine-3'-phosphate
  modified_base 12: mod_base = OTHER; note = 2'-O-methyladenosine-3'-phosphate
  modified_base 13: mod_base = OTHER; note = 2'-O-methyluridine-3'-phosphate
  modified_base 14: mod_base = OTHER; note = 2'-O-methyladenosine-3'-phosphate
  modified_base 15: mod_base = OTHER; note = 2'-O-methylcytidine-3'-phosphate
  modified_base 16: mod_base = OTHER; note = 2'-O-methyluridine-3'-phosphate
  modified_base 17: mod_base = OTHER; note = 2'-O-methyluridine-3'-phosphate
  modified_base 18: mod_base = OTHER; note = 2'-O-methylcytidine-3'-phosphate
  modified_base 19: mod_base = OTHER; note = 2'-O-methyluridine-3'-phosphate
  modified_base 20: mod_base = OTHER; note = 2'-O-methyladenosine-3'-phosphate
  modified_base 21: mod_base = OTHER; note = 2'-O-methyladenosine
cagtacagcagatacttctaa

SEQ ID NO: 870 - RNA, 21 nt, synthetic construct
  source 1..21: mol_type = other RNA
  modified_base 1: mod_base = OTHER; note = 2'-O-methyladenosine-3'-phosphorothioate
  modified_base 2: mod_base = OTHER; note = 2'-O-methylguanosine-3'-phosphorothioate
  modified_base 3: mod_base = OTHER; note = 2'-O-methyluridine-3'-phosphate
  modified_base 4: mod_base = OTHER; note = 2'-O-methyladenosine-3'-phosphate
  modified_base 5: mod_base = OTHER; note = 2'-O-methylcytidine-3'-phosphate
  modified_base 6: mod_base = OTHER; note = 2'-O-methyladenosine-3'-phosphate
  modified_base 7: mod_base = OTHER; note = 2'-fluoroguanosine-3'-phosphate
  modified_base 8: mod_base = OTHER; note = 2'-O-methylcytidine-3'-phosphate
  modified_base 9: mod_base = OTHER; note = 2'-fluoroadenosine-3'-phosphate
  modified_base 10: mod_base = OTHER; note = 2'-fluoroguanosine-3'-phosphate
  modified_base 11: mod_base = OTHER; note = 2'-fluoroadenosine-3'-phosphate
  modified_base 12: mod_base = OTHER; note = 2'-O-methyluridine-3'-phosphate
  modified_base 13: mod_base = OTHER; note = 2'-O-methyladenosine-3'-phosphate
  modified_base 14: mod_base = OTHER; note = 2'-O-methylcytidine-3'-phosphate
  modified_base 15: mod_base = OTHER; note = 2'-O-methyluridine-3'-phosphate
  modified_base 16: mod_base = OTHER; note = 2'-O-methyluridine-3'-phosphate
  modified_base 17: mod_base = OTHER; note = 2'-O-methylcytidine-3'-phosphate
  modified_base 18: mod_base = OTHER; note = 2'-O-methyluridine-3'-phosphate
  modified_base 19: mod_base = OTHER; note = 2'-O-methyladenosine-3'-phosphate
  modified_base 20: mod_base = OTHER; note = 2'-O-methyladenosine-3'-phosphate
  modified_base 21: mod_base = OTHER; note = 2'-O-methyladenosine
agtacagcagatacttctaaa

SEQ ID NO: 871 - RNA, 21 nt, synthetic construct
  source 1..21: mol_type = other RNA
  modified_base 1: mod_base = OTHER; note = 2'-O-methylcytidine-3'-phosphorothioate
  modified_base 2: mod_base = OTHER; note = 2'-O-methyladenosine-3'-phosphorothioate
  modified_base 3: mod_base = OTHER; note = 2'-O-methylguanosine-3'-phosphate
  modified_base 4: mod_base = OTHER; note = 2'-O-methylcytidine-3'-phosphate
  modified_base 5: mod_base = OTHER; note = 2'-O-methyladenosine-3'-phosphate
  modified_base 6: mod_base = OTHER; note = 2'-O-methylguanosine-3'-phosphate
  modified_base 7: mod_base = OTHER; note = 2'-fluoroadenosine-3'-phosphate
  modified_base 8: mod_base = OTHER; note = 2'-O-methyluridine-3'-phosphate
  modified_base 9: mod_base = OTHER; note = 2'-fluoroadenosine-3'-phosphate
  modified_base 10: mod_base = OTHER; note = 2'-fluorocytidine-3'-phosphate
  modified_base 11: mod_base = OTHER; note = 2'-fluorouridine-3'-phosphate
  modified_base 12: mod_base = OTHER; note = 2'-O-methyluridine-3'-phosphate
  modified_base 13: mod_base = OTHER; note = 2'-O-methylcytidine-3'-phosphate
  modified_base 14: mod_base = OTHER; note = 2'-O-methyluridine-3'-phosphate
  modified_base 15: mod_base = OTHER; note = 2'-O-methyladenosine-3'-phosphate
  modified_base 16: mod_base = OTHER; note = 2'-O-methyladenosine-3'-phosphate
  modified_base 17: mod_base = OTHER; note = 2'-O-methylguanosine-3'-phosphate
  modified_base 18: mod_base = OTHER; note = 2'-O-methylguanosine-3'-phosphate
  modified_base 19: mod_base = OTHER; note = 2'-O-methyluridine-3'-phosphate
  modified_base 20: mod_base = OTHER; note = 2'-O-methyluridine-3'-phosphate
  modified_base 21: mod_base = OTHER; note = 2'-O-methyluridine
cagcagatacttctaaggttt

SEQ ID NO: 872 - RNA, 21 nt, synthetic construct
  source 1..21: mol_type = other RNA
  modified_base 1: mod_base = OTHER; note = 2'-O-methyluridine-3'-phosphorothioate
  modified_base 2: mod_base = OTHER; note = 2'-O-methyluridine-3'-phosphorothioate
  modified_base 3: mod_base = OTHER; note = 2'-O-methylguanosine-3'-phosphate
  modified_base 4: mod_base = OTHER; note = 2'-O-methyladenosine-3'-phosphate
  modified_base 5: mod_base = OTHER; note = 2'-O-methyladenosine-3'-phosphate
  modified_base 6: mod_base = OTHER; note = 2'-O-methylcytidine-3'-phosphate
  modified_base 7: mod_base = OTHER; note = 2'-fluoroadenosine-3'-phosphate
  modified_base 8: mod_base = OTHER; note = 2'-O-methyladenosine-3'-phosphate
  modified_base 9: mod_base = OTHER; note = 2'-fluoroguanosine-3'-phosphate
  modified_base 10: mod_base = OTHER; note = 2'-fluorouridine-3'-phosphate
  modified_base 11: mod_base = OTHER; note = 2'-fluorouridine-3'-phosphate
  modified_base 12: mod_base = OTHER; note = 2'-O-methyladenosine-3'-phosphate
  modified_base 13: mod_base = OTHER; note = 2'-O-methyluridine-3'-phosphate
  modified_base 14: mod_base = OTHER; note = 2'-O-methyluridine-3'-phosphate
  modified_base 15: mod_base = OTHER; note = 2'-O-methyladenosine-3'-phosphate
  modified_base 16: mod_base = OTHER; note = 2'-O-methylcytidine-3'-phosphate
  modified_base 17: mod_base = OTHER; note = 2'-O-methylcytidine-3'-phosphate
  modified_base 18: mod_base = OTHER; note = 2'-O-methylcytidine-3'-phosphate
  modified_base 19: mod_base = OTHER; note = 2'-O-methyluridine-3'-phosphate
  modified_base 20: mod_base = OTHER; note = 2'-O-methyladenosine-3'-phosphate
  modified_base 21: mod_base = OTHER; note = 2'-O-methyladenosine
ttgaacaagttattaccctaa

SEQ ID NO: 873 - RNA, 21 nt, synthetic construct
  source 1..21: mol_type = other RNA
  modified_base 1: mod_base = OTHER; note = 2'-O-methylguanosine-3'-phosphorothioate
  modified_base 2: mod_base = OTHER; note = 2'-O-methyladenosine-3'-phosphorothioate
  modified_base 3: mod_base = OTHER; note = 2'-O-methyladenosine-3'-phosphate
  modified_base 4: mod_base = OTHER; note = 2'-O-methylcytidine-3'-phosphate
  modified_base 5: mod_base = OTHER; note = 2'-O-methyladenosine-3'-phosphate
  modified_base 6: mod_base = OTHER; note = 2'-O-methyladenosine-3'-phosphate
  modified_base 7: mod_base = OTHER; note = 2'-fluoroguanosine-3'-phosphate
  modified_base 8: mod_base = OTHER; note = 2'-O-methyluridine-3'-phosphate
  modified_base 9: mod_base = OTHER; note = 2'-fluorouridine-3'-phosphate
  modified_base 10: mod_base = OTHER; note = 2'-fluoroadenosine-3'-phosphate
  modified_base 11: mod_base = OTHER; note = 2'-fluorouridine-3'-phosphate
  modified_base 12: mod_base = OTHER; note = 2'-O-methyluridine-3'-phosphate
  modified_base 13: mod_base = OTHER; note = 2'-O-methyladenosine-3'-phosphate
  modified_base 14: mod_base = OTHER; note = 2'-O-methylcytidine-3'-phosphate
  modified_base 15: mod_base = OTHER; note = 2'-O-methylcytidine-3'-phosphate
  modified_base 16: mod_base = OTHER; note = 2'-O-methylcytidine-3'-phosphate
  modified_base 17: mod_base = OTHER; note = 2'-O-methyluridine-3'-phosphate
  modified_base 18: mod_base = OTHER; note = 2'-O-methyladenosine-3'-phosphate
  modified_base 19: mod_base = OTHER; note = 2'-O-methyladenosine-3'-phosphate
  modified_base 20: mod_base = OTHER; note = 2'-O-methylguanosine-3'-phosphate
  modified_base 21: mod_base = OTHER; note = 2'-O-methyluridine
gaacaagttattaccctaagt

SEQ ID NO: 874 - RNA, 21 nt, synthetic construct
  source 1..21: mol_type = other RNA
  modified_base 1: mod_base = OTHER; note = 2'-O-methyladenosine-3'-phosphorothioate
  modified_base 2: mod_base = OTHER; note = 2'-O-methylcytidine-3'-phosphorothioate
  modified_base 3: mod_base = OTHER; note = 2'-O-methyladenosine-3'-phosphate
  modified_base 4: mod_base = OTHER; note = 2'-O-methyladenosine-3'-phosphate
  modified_base 5: mod_base = OTHER; note = 2'-O-methylguanosine-3'-phosphate
  modified_base 6: mod_base = OTHER; note = 2'-O-methyluridine-3'-phosphate
  modified_base 7: mod_base = OTHER; note = 2'-fluorouridine-3'-phosphate
  modified_base 8: mod_base = OTHER; note = 2'-O-methyladenosine-3'-phosphate
  modified_base 9: mod_base = OTHER; note = 2'-fluorouridine-3'-phosphate
  modified_base 10: mod_base = OTHER; note = 2'-fluorouridine-3'-phosphate
  modified_base 11: mod_base = OTHER; note = 2'-fluoroadenosine-3'-phosphate
  modified_base 12: mod_base = OTHER; note = 2'-O-methylcytidine-3'-phosphate
  modified_base 13: mod_base = OTHER; note = 2'-O-methylcytidine-3'-phosphate
  modified_base 14: mod_base = OTHER; note = 2'-O-methylcytidine-3'-phosphate
  modified_base 15: mod_base = OTHER; note = 2'-O-methyluridine-3'-phosphate
  modified_base 16: mod_base = OTHER; note = 2'-O-methyladenosine-3'-phosphate
  modified_base 17: mod_base = OTHER; note = 2'-O-methyladenosine-3'-phosphate
  modified_base 18: mod_base = OTHER; note = 2'-O-methylguanosine-3'-phosphate
  modified_base 19: mod_base = OTHER; note = 2'-O-methyluridine-3'-phosphate
  modified_base 20: mod_base = OTHER; note = 2'-O-methyluridine-3'-phosphate
  modified_base 21: mod_base = OTHER; note = 2'-O-methyluridine
acaagttattaccctaagttt

SEQ ID NO: 875 - RNA, 21 nt, synthetic construct
  source 1..21: mol_type = other RNA
  modified_base 1: mod_base = OTHER; note = 2'-O-methylcytidine-3'-phosphorothioate
  modified_base 2: mod_base = OTHER; note = 2'-O-methyladenosine-3'-phosphorothioate
  modified_base 3: mod_base = OTHER; note = 2'-O-methyladenosine-3'-phosphate
  modified_base 4: mod_base = OTHER; note = 2'-O-methylguanosine-3'-phosphate
  modified_base 5: mod_base = OTHER; note = 2'-O-methyluridine-3'-phosphate
  modified_base 6: mod_base = OTHER; note = 2'-O-methyluridine-3'-phosphate
  modified_base 7: mod_base = OTHER; note = 2'-fluoroadenosine-3'-phosphate
  modified_base 8: mod_base = OTHER; note = 2'-O-methyluridine-3'-phosphate
  modified_base 9: mod_base = OTHER; note = 2'-fluorouridine-3'-phosphate
  modified_base 10: mod_base = OTHER; note = 2'-fluoroadenosine-3'-phosphate
  modified_base 11: mod_base = OTHER; note = 2'-fluorocytidine-3'-phosphate
  modified_base 12: mod_base = OTHER; note = 2'-O-methylcytidine-3'-phosphate
  modified_base 13: mod_base = OTHER; note = 2'-O-methylcytidine-3'-phosphate
  modified_base 14: mod_base = OTHER; note = 2'-O-methyluridine-3'-phosphate
  modified_base 15: mod_base = OTHER; note = 2'-O-methyladenosine-3'-phosphate
  modified_base 16: mod_base = OTHER; note = 2'-O-methyladenosine-3'-phosphate
  modified_base 17: mod_base = OTHER; note = 2'-O-methylguanosine-3'-phosphate
  modified_base 18: mod_base = OTHER; note = 2'-O-methyluridine-3'-phosphate
  modified_base 19: mod_base = OTHER; note = 2'-O-methyluridine-3'-phosphate
  modified_base 20: mod_base = OTHER; note = 2'-O-methyluridine-3'-phosphate
  modified_base 21: mod_base = OTHER; note = 2'-O-methyladenosine
caagttattaccctaagttta

SEQ ID NO: 876 - RNA, 21 nt, synthetic construct
  source 1..21: mol_type = other RNA
  modified_base 1: mod_base = OTHER; note = 2'-O-methyladenosine-3'-phosphorothioate
  modified_base 2: mod_base = OTHER; note = 2'-O-methylguanosine-3'-phosphorothioate
  modified_base 3: mod_base = OTHER; note = 2'-O-methyluridine-3'-phosphate
  modified_base 4: mod_base = OTHER; note = 2'-O-methyluridine-3'-phosphate
  modified_base 5: mod_base = OTHER; note = 2'-O-methyladenosine-3'-phosphate
  modified_base 6: mod_base = OTHER; note = 2'-O-methyluridine-3'-phosphate
  modified_base 7: mod_base = OTHER; note = 2'-fluorouridine-3'-phosphate
  modified_base 8: mod_base = OTHER; note = 2'-O-methyladenosine-3'-phosphate
  modified_base 9: mod_base = OTHER; note = 2'-fluorocytidine-3'-phosphate
  modified_base 10: mod_base = OTHER; note = 2'-fluorocytidine-3'-phosphate
  modified_base 11: mod_base = OTHER; note = 2'-fluorocytidine-3'-phosphate
  modified_base 12: mod_base = OTHER; note = 2'-O-methyluridine-3'-phosphate
  modified_base 13: mod_base = OTHER; note = 2'-O-methyladenosine-3'-phosphate
  modified_base 14: mod_base = OTHER; note = 2'-O-methyladenosine-3'-phosphate
  modified_base 15: mod_base = OTHER; note = 2'-O-methylguanosine-3'-phosphate
  modified_base 16: mod_base = OTHER; note = 2'-O-methyluridine-3'-phosphate
  modified_base 17: mod_base = OTHER; note = 2'-O-methyluridine-3'-phosphate
  modified_base 18: mod_base = OTHER; note = 2'-O-methyluridine-3'-phosphate
  modified_base 19: mod_base = OTHER; note = 2'-O-methyladenosine-3'-phosphate
  modified_base 20: mod_base = OTHER; note = 2'-O-methylguanosine-3'-phosphate
  modified_base 21: mod_base = OTHER; note = 2'-O-methyladenosine
agttattaccctaagtttaga

SEQ ID NO: 877 - RNA, 21 nt, synthetic construct
  source 1..21: mol_type = other RNA
  modified_base 1: mod_base = OTHER; note = 2'-O-methylcytidine-3'-phosphorothioate
  modified_base 2: mod_base = OTHER; note = 2'-O-methyluridine-3'-phosphorothioate
  modified_base 3: mod_base = OTHER; note = 2'-O-methylcytidine-3'-phosphate
  modified_base 4: mod_base = OTHER; note = 2'-O-methylcytidine-3'-phosphate
  modified_base 5: mod_base = OTHER; note = 2'-O-methyluridine-3'-phosphate
  modified_base 6: mod_base = OTHER; note = 2'-O-methyluridine-3'-phosphate
  modified_base 7: mod_base = OTHER; note = 2'-fluorocytidine-3'-phosphate
  modified_base 8: mod_base = OTHER; note = 2'-O-methyluridine-3'-phosphate
  modified_base 9: mod_base = OTHER; note = 2'-fluoroguanosine-3'-phosphate
  modified_base 10: mod_base = OTHER; note = 2'-fluoroguanosine-3'-phosphate
  modified_base 11: mod_base = OTHER; note = 2'-fluorocytidine-3'-phosphate
  modified_base 12: mod_base = OTHER; note = 2'-O-methyluridine-3'-phosphate
  modified_base 13: mod_base = OTHER; note = 2'-O-methylguanosine-3'-phosphate
  modified_base 14: mod_base = OTHER; note = 2'-O-methyluridine-3'-phosphate
  modified_base 15: mod_base = OTHER; note = 2'-O-methylcytidine-3'-phosphate
  modified_base 16: mod_base = OTHER; note = 2'-O-methyladenosine-3'-phosphate
  modified_base 17: mod_base = OTHER; note = 2'-O-methyladenosine-3'-phosphate
  modified_base 18: mod_base = OTHER; note = 2'-O-methylguanosine-3'-phosphate
  modified_base 19: mod_base = OTHER; note = 2'-O-methyluridine-3'-phosphate
  modified_base 20: mod_base = OTHER; note = 2'-O-methyladenosine-3'-phosphate
  modified_base 21: mod_base = OTHER; note = 2'-O-methyladenosine
ctccttctggctgtcaagtaa

SEQ ID NO: 878 - RNA, 21 nt, synthetic construct
  source 1..21: mol_type = other RNA
  modified_base 1: mod_base = OTHER; note = 2'-O-methyluridine-3'-phosphorothioate
  modified_base 2: mod_base = OTHER; note = 2'-O-methyluridine-3'-phosphorothioate
  modified_base 3: mod_base = OTHER; note = 2'-O-methyladenosine-3'-phosphate
  modified_base 4: mod_base = OTHER; note = 2'-O-methyladenosine-3'-phosphate
  modified_base 5: mod_base = OTHER; note = 2'-O-methyladenosine-3'-phosphate
  modified_base 6: mod_base = OTHER; note = 2'-O-methyladenosine-3'-phosphate
  modified_base 7: mod_base = OTHER; note = 2'-fluoroadenosine-3'-phosphate
  modified_base 8: mod_base = OTHER; note = 2'-O-methyladenosine-3'-phosphate
  modified_base 9: mod_base = OTHER; note = 2'-fluorocytidine-3'-phosphate
  modified_base 10: mod_base = OTHER; note = 2'-fluorocytidine-3'-phosphate
  modified_base 11: mod_base = OTHER; note = 2'-fluorocytidine-3'-phosphate
  modified_base 12: mod_base = OTHER; note = 2'-O-methyluridine-3'-phosphate
  modified_base 13: mod_base = OTHER; note = 2'-O-methyladenosine-3'-phosphate
  modified_base 14: mod_base = OTHER; note = 2'-O-methyluridine-3'-phosphate
  modified_base 15: mod_base = OTHER; note = 2'-O-methylcytidine-3'-phosphate
  modified_base 16: mod_base = OTHER; note = 2'-O-methyladenosine-3'-phosphate
  modified_base 17: mod_base = OTHER; note = 2'-O-methylcytidine-3'-phosphate
  modified_base 18: mod_base = OTHER; note = 2'-O-methyladenosine-3'-phosphate
  modified_base 19: mod_base = OTHER; note = 2'-O-methyluridine-3'-phosphate
  modified_base 20: mod_base = OTHER; note = 2'-O-methylcytidine-3'-phosphate
  modified_base 21: mod_base = OTHER; note = 2'-O-methyluridine
ttaaaaaaccctatcacatct

SEQ ID NO: 879 - RNA, 21 nt, synthetic construct
  source 1..21: mol_type = other RNA
  modified_base 1: mod_base = OTHER; note = 2'-O-methylcytidine-3'-phosphorothioate
  modified_base 2: mod_base = OTHER; note = 2'-O-methylcytidine-3'-phosphorothioate
  modified_base 3: mod_base = OTHER; note = 2'-O-methyluridine-3'-phosphate
  modified_base 4: mod_base = OTHER; note = 2'-O-methyladenosine-3'-phosphate
  modified_base 5: mod_base = OTHER; note = 2'-O-methyluridine-3'-phosphate
  modified_base 6: mod_base = OTHER; note = 2'-O-methylcytidine-3'-phosphate
  modified_base 7: mod_base = OTHER; note = 2'-fluoroadenosine-3'-phosphate
  modified_base 8: mod_base = OTHER; note = 2'-O-methylcytidine-3'-phosphate
  modified_base 9: mod_base = OTHER; note = 2'-fluoroadenosine-3'-phosphate
  modified_base 10: mod_base = OTHER; note = 2'-fluorouridine-3'-phosphate
  modified_base 11: mod_base = OTHER; note = 2'-fluorocytidine-3'-phosphate
  modified_base 12: mod_base = OTHER; note = 2'-O-methyluridine-3'-phosphate
  modified_base 13: mod_base = OTHER; note = 2'-O-methylcytidine-3'-phosphate
  modified_base 14: mod_base = OTHER; note = 2'-O-methylcytidine-3'-phosphate
  modified_base 15: mod_base = OTHER; note = 2'-O-methyluridine-3'-phosphate
  modified_base 16: mod_base = OTHER; note = 2'-O-methylguanosine-3'-phosphate
  modified_base 17: mod_base = OTHER; note = 2'-O-methyluridine-3'-phosphate
  modified_base 18: mod_base = OTHER; note = 2'-O-methyladenosine-3'-phosphate
  modified_base 19: mod_base = OTHER; note = 2'-O-methylguanosine-3'-phosphate
  modified_base 20: mod_base = OTHER; note = 2'-O-methyluridine-3'-phosphate
  modified_base 21: mod_base = OTHER; note = 2'-O-methyladenosine
cctatcacatctcctgtagta

SEQ ID NO: 880 - RNA, 21 nt, synthetic construct
  source 1..21: mol_type = other RNA
  modified_base 1: mod_base = OTHER; note = 2'-O-methyluridine-3'-phosphorothioate
  modified_base 2: mod_base = OTHER; note = 2'-O-methyladenosine-3'-phosphorothioate
  modified_base 3: mod_base = OTHER; note = 2'-O-methyluridine-3'-phosphate
  modified_base 4: mod_base = OTHER; note = 2'-O-methylcytidine-3'-phosphate
  modified_base 5: mod_base = OTHER; note = 2'-O-methyladenosine-3'-phosphate
  modified_base 6: mod_base = OTHER; note = 2'-O-methylcytidine-3'-phosphate
  modified_base 7: mod_base = OTHER; note = 2'-fluoroadenosine-3'-phosphate
  modified_base 8: mod_base = OTHER; note = 2'-O-methyluridine-3'-phosphate
  modified_base 9: mod_base = OTHER; note = 2'-fluorocytidine-3'-phosphate
  modified_base 10: mod_base = OTHER; note = 2'-fluorouridine-3'-phosphate
  modified_base 11: mod_base = OTHER; note = 2'-fluorocytidine-3'-phosphate
  modified_base 12: mod_base = OTHER; note = 2'-O-methylcytidine-3'-phosphate
  modified_base 13: mod_base = OTHER; note = 2'-O-methyluridine-3'-phosphate
  modified_base 14: mod_base = OTHER; note = 2'-O-methylguanosine-3'-phosphate
  modified_base 15: mod_base = OTHER; note = 2'-O-methyluridine-3'-phosphate
  modified_base 16: mod_base = OTHER; note = 2'-O-methyladenosine-3'-phosphate
  modified_base 17: mod_base = OTHER; note = 2'-O-methylguanosine-3'-phosphate
  modified_base 18: mod_base = OTHER; note = 2'-O-methyluridine-3'-phosphate
  modified_base 19: mod_base = OTHER; note = 2'-O-methylguanosine-3'-phosphate
  modified_base 20: mod_base = OTHER; note = 2'-O-methyladenosine-3'-phosphate
  modified_base 21: mod_base = OTHER; note = 2'-O-methyladenosine
tatcacatctcctgtagtgaa

SEQ ID NO: 881 - RNA, 21 nt, synthetic construct
  source 1..21: mol_type = other RNA
  modified_base 1: mod_base = OTHER; note = 2'-O-methyladenosine-3'-phosphorothioate
  modified_base 2: mod_base = OTHER; note = 2'-O-methyluridine-3'-phosphorothioate
  modified_base 3: mod_base = OTHER; note = 2'-O-methyluridine-3'-phosphate
  modified_base 4: mod_base = OTHER; note = 2'-O-methylguanosine-3'-phosphate
  modified_base 5: mod_base = OTHER; note = 2'-O-methyluridine-3'-phosphate
  modified_base 6: mod_base = OTHER; note = 2'-O-methyluridine-3'-phosphate
  modified_base 7: mod_base = OTHER; note = 2'-fluoroguanosine-3'-phosphate
  modified_base 8: mod_base = OTHER; note = 2'-O-methyluridine-3'-phosphate
  modified_base 9: mod_base = OTHER; note = 2'-fluoroadenosine-3'-phosphate
  modified_base 10: mod_base = OTHER; note = 2'-fluoroguanosine-3'-phosphate
  modified_base 11: mod_base = OTHER; note = 2'-fluoroadenosine-3'-phosphate
  modified_base 12: mod_base = OTHER; note = 2'-O-methylcytidine-3'-phosphate
  modified_base 13: mod_base = OTHER; note = 2'-O-methylguanosine-3'-phosphate
  modified_base 14: mod_base = OTHER; note = 2'-O-methyluridine-3'-phosphate
  modified_base 15: mod_base = OTHER; note = 2'-O-methylguanosine-3'-phosphate
  modified_base 16: mod_base = OTHER; note = 2'-O-methyladenosine-3'-phosphate
  modified_base 17: mod_base = OTHER; note = 2'-O-methyladenosine-3'-phosphate
  modified_base 18: mod_base = OTHER; note = 2'-O-methylcytidine-3'-phosphate
  modified_base 19: mod_base = OTHER; note = 2'-O-methylcytidine-3'-phosphate
  modified_base 20: mod_base = OTHER; note = 2'-O-methyluridine-3'-phosphate
  modified_base 21: mod_base = OTHER; note = 2'-O-methyladenosine
attgttgtagacgtgaaccta

SEQ ID NO: 882 - RNA, 21 nt, synthetic construct
  source 1..21: mol_type = other RNA
  modified_base 1: mod_base = OTHER; note = 2'-O-methylguanosine-3'-phosphorothioate
  modified_base 2: mod_base = OTHER; note = 2'-O-methyladenosine-3'-phosphorothioate
  modified_base 3: mod_base = OTHER; note = 2'-O-methyladenosine-3'-phosphate
  modified_base 4: mod_base = OTHER; note = 2'-O-methylguanosine-3'-phosphate
  modified_base 5: mod_base = OTHER; note = 2'-O-methyladenosine-3'-phosphate
  modified_base 6: mod_base = OTHER; note = 2'-O-methylguanosine-3'-phosphate
  modified_base 7: mod_base = OTHER; note = 2'-fluoroadenosine-3'-phosphate
  modified_base 8: mod_base = OTHER; note = 2'-O-methylcytidine-3'-phosphate
  modified_base 9: mod_base = OTHER; note = 2'-fluoroadenosine-3'-phosphate
  modified_base 10: mod_base = OTHER; note = 2'-fluoroguanosine-3'-phosphate
  modified_base 11: mod_base = OTHER; note = 2'-fluoroguanosine-3'-phosphate
  modified_base 12: mod_base = OTHER; note = 2'-O-methylguanosine-3'-phosphate
  modified_base 13: mod_base = OTHER; note = 2'-O-methyladenosine-3'-phosphate
  modified_base 14: mod_base = OTHER; note = 2'-O-methyluridine-3'-phosphate
  modified_base 15: mod_base = OTHER; note = 2'-O-methyladenosine-3'-phosphate
  modified_base 16: mod_base = OTHER; note = 2'-O-methyladenosine-3'-phosphate
  modified_base 17: mod_base = OTHER; note = 2'-O-methyladenosine-3'-phosphate
  modified_base 18: mod_base = OTHER; note = 2'-O-methylcytidine-3'-phosphate
  modified_base 19: mod_base = OTHER; note = 2'-O-methylcytidine-3'-phosphate
  modified_base 20: mod_base = OTHER; note = 2'-O-methylguanosine-3'-phosphate
  modified_base 21: mod_base = OTHER; note = 2'-O-methyladenosine
gaagagacagggataaaccga

SEQ ID NO: 883 - RNA, 21 nt, synthetic construct
  source 1..21: mol_type = other RNA
  modified_base 1: mod_base = OTHER; note = 2'-O-methyladenosine-3'-phosphorothioate
  modified_base 2: mod_base = OTHER; note = 2'-O-methyladenosine-3'-phosphorothioate
  modified_base 3: mod_base = OTHER; note = 2'-O-methylguanosine-3'-phosphate
  modified_base 4: mod_base = OTHER; note = 2'-O-methyladenosine-3'-phosphate
  modified_base 5: mod_base = OTHER; note = 2'-O-methylguanosine-3'-phosphate
  modified_base 6: mod_base = OTHER; note = 2'-O-methyladenosine-3'-phosphate
  modified_base 7: mod_base = OTHER; note = 2'-fluorocytidine-3'-phosphate
  modified_base 8: mod_base = OTHER; note = 2'-O-methyladenosine-3'-phosphate
  modified_base 9: mod_base = OTHER; note = 2'-fluoroguanosine-3'-phosphate
  modified_base 10: mod_base = OTHER; note = 2'-fluoroguanosine-3'-phosphate
  modified_base 11: mod_base = OTHER; note = 2'-fluoroguanosine-3'-phosphate
  modified_base 12: mod_base = OTHER; note = 2'-O-methyladenosine-3'-phosphate
  modified_base 13: mod_base = OTHER; note = 2'-O-methyluridine-3'-phosphate
  modified_base 14: mod_base = OTHER; note = 2'-O-methyladenosine-3'-phosphate
  modified_base 15: mod_base = OTHER; note = 2'-O-methyladenosine-3'-phosphate
  modified_base 16: mod_base = OTHER; note = 2'-O-methyladenosine-3'-phosphate
  modified_base 17: mod_base = OTHER; note = 2'-O-methylcytidine-3'-phosphate
  modified_base 18: mod_base = OTHER; note = 2'-O-methylcytidine-3'-phosphate
  modified_base 19: mod_base = OTHER; note = 2'-O-methylguanosine-3'-phosphate
  modified_base 20: mod_base = OTHER; note = 2'-O-methyladenosine-3'-phosphate
  modified_base 21: mod_base = OTHER; note = 2'-O-methyladenosine
aagagacagggataaaccgaa

SEQ ID NO: 884 - RNA, 21 nt, synthetic construct
  source 1..21: mol_type = other RNA
  modified_base 1: mod_base = OTHER; note = 2'-O-methyladenosine-3'-phosphorothioate
  modified_base 2: mod_base = OTHER; note = 2'-O-methylguanosine-3'-phosphorothioate
  modified_base 3: mod_base = OTHER; note = 2'-O-methyladenosine-3'-phosphate
  modified_base 4: mod_base = OTHER; note = 2'-O-methylcytidine-3'-phosphate
  modified_base 5: mod_base = OTHER; note = 2'-O-methyladenosine-3'-phosphate
  modified_base 6: mod_base = OTHER; note = 2'-O-methylguanosine-3'-phosphate
  modified_base 7: mod_base = OTHER; note = 2'-fluoroguanosine-3'-phosphate
  modified_base 8: mod_base = OTHER; note = 2'-O-methylguanosine-3'-phosphate
  modified_base 9: mod_base = OTHER; note = 2'-fluoroadenosine-3'-phosphate
  modified_base 10: mod_base = OTHER; note = 2'-fluorouridine-3'-phosphate
  modified_base 11: mod_base = OTHER; note = 2'-fluoroadenosine-3'-phosphate
  modified_base 12: mod_base = OTHER; note = 2'-O-methyladenosine-3'-phosphate
  modified_base 13: mod_base = OTHER; note = 2'-O-methyladenosine-3'-phosphate
  modified_base 14: mod_base = OTHER; note = 2'-O-methylcytidine-3'-phosphate
  modified_base 15: mod_base = OTHER; note = 2'-O-methylcytidine-3'-phosphate
  modified_base 16: mod_base = OTHER; note = 2'-O-methylguanosine-3'-phosphate
  modified_base 17: mod_base = OTHER; note = 2'-O-methyladenosine-3'-phosphate
  modified_base 18: mod_base = OTHER; note = 2'-O-methylguanosine-3'-phosphate
  modified_base 19: mod_base = OTHER; note = 2'-O-methyladenosine-3'-phosphate
  modified_base 20: mod_base = OTHER; note = 2'-O-methyladenosine-3'-phosphate
  modified_base 21: mod_base = OTHER; note = 2'-O-methyladenosine
agacagggataaaccgagaaa

SEQ ID NO: 885 - RNA, 21 nt, synthetic construct
  source 1..21: mol_type = other RNA
  modified_base 1: mod_base = OTHER; note = 2'-O-methylguanosine-3'-phosphorothioate
  modified_base 2: mod_base = OTHER; note = 2'-O-methyladenosine-3'-phosphorothioate
  modified_base 3: mod_base = OTHER; note = 2'-O-methylcytidine-3'-phosphate
  modified_base 4: mod_base = OTHER; note = 2'-O-methyladenosine-3'-phosphate
  modified_base 5: mod_base = OTHER; note = 2'-O-methylguanosine-3'-phosphate
  modified_base 6: mod_base = OTHER; note = 2'-O-methylguanosine-3'-phosphate
  modified_base 7: mod_base = OTHER; note = 2'-fluoroguanosine-3'-phosphate
  modified_base 8: mod_base = OTHER; note = 2'-O-methyladenosine-3'-phosphate
  modified_base 9: mod_base = OTHER; note = 2'-fluorouridine-3'-phosphate
  modified_base 10: mod_base = OTHER; note = 2'-fluoroadenosine-3'-phosphate
  modified_base 11: mod_base = OTHER; note = 2'-fluoroadenosine-3'-phosphate
  modified_base 12: mod_base = OTHER; note = 2'-O-methyladenosine-3'-phosphate
  modified_base 13: mod_base = OTHER; note = 2'-O-methylcytidine-3'-phosphate
  modified_base 14: mod_base = OTHER; note = 2'-O-methylcytidine-3'-phosphate
  modified_base 15: mod_base = OTHER; note = 2'-O-methylguanosine-3'-phosphate
  modified_base 16: mod_base = OTHER; note = 2'-O-methyladenosine-3'-phosphate
  modified_base 17: mod_base = OTHER; note = 2'-O-methylguanosine-3'-phosphate
  modified_base 18: mod_base = OTHER; note = 2'-O-methyladenosine-3'-phosphate
  modified_base 19: mod_base = OTHER; note = 2'-O-methyladenosine-3'-phosphate
  modified_base 20: mod_base = OTHER; note = 2'-O-methyladenosine-3'-phosphate
  modified_base 21: mod_base = OTHER; note = 2'-O-methyladenosine
gacagggataaaccgagaaaa

SEQ ID NO: 886 - RNA, 21 nt, synthetic construct
  source 1..21: mol_type = other RNA
  modified_base 1: mod_base = OTHER; note = 2'-O-methyladenosine-3'-phosphorothioate
  modified_base 2: mod_base = OTHER; note = 2'-O-methylguanosine-3'-phosphorothioate
  modified_base 3: mod_base = OTHER; note = 2'-O-methylguanosine-3'-phosphate
  modified_base 4: mod_base = OTHER; note = 2'-O-methylguanosine-3'-phosphate
  modified_base 5: mod_base = OTHER; note = 2'-O-methyladenosine-3'-phosphate
  modified_base 6: mod_base = OTHER; note = 2'-O-methyluridine-3'-phosphate
  modified_base 7: mod_base = OTHER; note = 2'-fluoroadenosine-3'-phosphate
  modified_base 8: mod_base = OTHER; note = 2'-O-methyladenosine-3'-phosphate
  modified_base 9: mod_base = OTHER; note = 2'-fluoroadenosine-3'-phosphate
  modified_base 10: mod_base = OTHER; note = 2'-fluorocytidine-3'-phosphate
  modified_base 11: mod_base = OTHER; note = 2'-fluorocytidine-3'-phosphate
  modified_base 12: mod_base = OTHER; note = 2'-O-methylguanosine-3'-phosphate
  modified_base 13: mod_base = OTHER; note = 2'-O-methyladenosine-3'-phosphate
  modified_base 14: mod_base = OTHER; note = 2'-O-methylguanosine-3'-phosphate
  modified_base 15: mod_base = OTHER; note = 2'-O-methyladenosine-3'-phosphate
  modified_base 16: mod_base = OTHER; note = 2'-O-methyladenosine-3'-phosphate
  modified_base 17: mod_base = OTHER; note = 2'-O-methyladenosine-3'-phosphate
  modified_base 18: mod_base = OTHER; note = 2'-O-methylguanosine-3'-phosphate
  modified_base 19: mod_base = OTHER; note = 2'-O-methyladenosine-3'-phosphate
  modified_base 20: mod_base = OTHER; note = 2'-O-methyladenosine-3'-phosphate
  modified_base 21: mod_base = OTHER; note = 2'-O-methyladenosine
agggataaaccgagaaagaaa

SEQ ID NO: 887 - RNA, 21 nt, synthetic construct
  source 1..21: mol_type = other RNA
  modified_base 1: mod_base = OTHER; note = 2'-O-methyladenosine-3'-phosphorothioate
  modified_base 2: mod_base = OTHER; note = 2'-O-methyladenosine-3'-phosphorothioate
  modified_base 3: mod_base = OTHER; note = 2'-O-methyladenosine-3'-phosphate
  modified_base 4: mod_base = OTHER; note = 2'-O-methylcytidine-3'-phosphate
  modified_base 5: mod_base = OTHER; note = 2'-O-methylcytidine-3'-phosphate
  modified_base 6: mod_base = OTHER; note = 2'-O-methylguanosine-3'-phosphate
  modified_base 7: mod_base = OTHER; note = 2'-fluoroadenosine-3'-phosphate
  modified_base 8: mod_base = OTHER; note = 2'-O-methylguanosine-3'-phosphate
  modified_base 9: mod_base = OTHER; note = 2'-fluoroadenosine-3'-phosphate
  modified_base 10: mod_base = OTHER; note = 2'-fluoroadenosine-3'-phosphate
  modified_base 11: mod_base = OTHER; note = 2'-fluoroadenosine-3'-phosphate
  modified_base 12: mod_base = OTHER; note = 2'-O-methylguanosine-3'-phosphate
  modified_base 13: mod_base = OTHER; note = 2'-O-methyladenosine-3'-phosphate
  modified_base 14: mod_base = OTHER; note = 2'-O-methyladenosine-3'-phosphate
  modified_base 15: mod_base = OTHER; note = 2'-O-methyladenosine-3'-phosphate
  modified_base 16: mod_base = OTHER; note = 2'-O-methyladenosine-3'-phosphate
  modified_base 17: mod_base = OTHER; note = 2'-O-methylguanosine-3'-phosphate
  modified_base 18: mod_base = OTHER; note = 2'-O-methyluridine-3'-phosphate
  modified_base 19: mod_base = OTHER; note = 2'-O-methyluridine-3'-phosphate
  modified_base 20: mod_base = OTHER; note = 2'-O-methylguanosine-3'-phosphate
  modified_base 21: mod_base = OTHER; note = 2'-O-methyladenosine
aaaccgagaaagaaaagttga

SEQ ID NO: 888 - RNA, 21 nt, synthetic construct
  source 1..21: mol_type = other RNA
  modified_base 1: mod_base = OTHER; note = 2'-O-methylguanosine-3'-phosphorothioate
  modified_base 2: mod_base = OTHER; note = 2'-O-methyluridine-3'-phosphorothioate
  modified_base 3: mod_base = OTHER; note = 2'-O-methyluridine-3'-phosphate
  modified_base 4: mod_base = OTHER; note = 2'-O-methylguanosine-3'-phosphate
  modified_base 5: mod_base = OTHER; note = 2'-O-methyladenosine-3'-phosphate
  modified_base 6: mod_base = OTHER; note = 2'-O-methylguanosine-3'-phosphate
  modified_base 7: mod_base = OTHER; note = 2'-fluoroguanosine-3'-phosphate
  modified_base 8: mod_base = OTHER; note = 2'-O-methyluridine-3'-phosphate
  modified_base 9: mod_base = OTHER; note = 2'-fluorouridine-3'-phosphate
  modified_base 10: mod_base = OTHER; note = 2'-fluoroadenosine-3'-phosphate
  modified_base 11: mod_base = OTHER; note = 2'-fluorouridine-3'-phosphate
  modified_base 12: mod_base = OTHER; note = 2'-O-methyladenosine-3'-phosphate
  modified_base 13: mod_base = OTHER; note = 2'-O-methyladenosine-3'-phosphate
  modified_base 14: mod_base = OTHER; note = 2'-O-methyladenosine-3'-phosphate
  modified_base 15: mod_base = OTHER; note = 2'-O-methyladenosine-3'-phosphate
  modified_base 16: mod_base = OTHER; note = 2'-O-methylcytidine-3'-phosphate
  modified_base 17: mod_base = OTHER; note = 2'-O-methylcytidine-3'-phosphate
  modified_base 18: mod_base = OTHER; note = 2'-O-methylcytidine-3'-phosphate
  modified_base 19: mod_base = OTHER; note = 2'-O-methyluridine-3'-phosphate
  modified_base 20: mod_base = OTHER; note = 2'-O-methyluridine-3'-phosphate
  modified_base 21: mod_base = OTHER; note = 2'-O-methyladenosine
gttgaggttataaaaccctta

SEQ ID NO: 889 - RNA, 21 nt, synthetic construct
  source 1..21: mol_type = other RNA
  modified_base 1: mod_base = OTHER; note = 2'-O-methylguanosine-3'-phosphorothioate
  modified_base 2: mod_base = OTHER; note = 2'-O-methylguanosine-3'-phosphorothioate
  modified_base 3: mod_base = OTHER; note = 2'-O-methyluridine-3'-phosphate
  modified_base 4: mod_base = OTHER; note = 2'-O-methyluridine-3'-phosphate
  modified_base 5: mod_base = OTHER; note = 2'-O-methyladenosine-3'-phosphate
  modified_base 6: mod_base = OTHER; note = 2'-O-methyluridine-3'-phosphate
  modified_base 7: mod_base = OTHER; note = 2'-fluoroadenosine-3'-phosphate
  modified_base 8: mod_base = OTHER; note = 2'-O-methyladenosine-3'-phosphate
  modified_base 9: mod_base = OTHER; note = 2'-fluoroadenosine-3'-phosphate
  modified_base 10: mod_base = OTHER; note = 2'-fluoroadenosine-3'-phosphate
  modified_base 11: mod_base = OTHER; note = 2'-fluorocytidine-3'-phosphate
  modified_base 12: mod_base = OTHER; note = 2'-O-methylcytidine-3'-phosphate
  modified_base 13: mod_base = OTHER; note = 2'-O-methylcytidine-3'-phosphate
  modified_base 14: mod_base = OTHER; note = 2'-O-methyluridine-3'-phosphate
  modified_base 15: mod_base = OTHER; note = 2'-O-methyluridine-3'-phosphate
  modified_base 16: mod_base = OTHER; note = 2'-O-methyladenosine-3'-phosphate
  modified_base 17: mod_base = OTHER; note = 2'-O-methylguanosine-3'-phosphate
  modified_base 18: mod_base = OTHER; note = 2'-O-methyluridine-3'-phosphate
  modified_base 19: mod_base = OTHER; note = 2'-O-methylguanosine-3'-phosphate
  modified_base 20: mod_base = OTHER; note = 2'-O-methylguanosine-3'-phosphate
  modified_base 21: mod_base = OTHER; note = 2'-O-methyladenosine
ggttataaaacccttagtgga

SEQ ID NO: 890 - RNA, 21 nt, synthetic construct
  source 1..21: mol_type = other RNA
  modified_base 1: mod_base = OTHER; note = 2'-O-methyladenosine-3'-phosphorothioate
  modified_base 2: mod_base = OTHER; note = 2'-O-methyladenosine-3'-phosphorothioate
  modified_base 3: mod_base = OTHER; note = 2'-O-methylcytidine-3'-phosphate
  modified_base 4: mod_base = OTHER; note = 2'-O-methylcytidine-3'-phosphate
  modified_base 5: mod_base = OTHER; note = 2'-O-methylcytidine-3'-phosphate
  modified_base 6: mod_base = OTHER; note = 2'-O-methyluridine-3'-phosphate
  modified_base 7: mod_base = OTHER; note = 2'-fluorouridine-3'-phosphate
  modified_base 8: mod_base = OTHER; note = 2'-O-methyladenosine-3'-phosphate
  modified_base 9: mod_base = OTHER; note = 2'-fluoroguanosine-3'-phosphate
  modified_base 10: mod_base = OTHER; note = 2'-fluorouridine-3'-phosphate
  modified_base 11: mod_base = OTHER; note = 2'-fluoroguanosine-3'-phosphate
  modified_base 12: mod_base = OTHER; note = 2'-O-methylguanosine-3'-phosphate
  modified_base 13: mod_base = OTHER; note = 2'-O-methylcytidine-3'-phosphate
  modified_base 14: mod_base = OTHER; note = 2'-O-methyluridine-3'-phosphate
  modified_base 15: mod_base = OTHER; note = 2'-O-methylguanosine-3'-phosphate
  modified_base 16: mod_base = OTHER; note = 2'-O-methyladenosine-3'-phosphate
  modified_base 17: mod_base = OTHER; note = 2'-O-methyladenosine-3'-phosphate
  modified_base 18: mod_base = OTHER; note = 2'-O-methyladenosine-3'-phosphate
  modified_base 19: mod_base = OTHER; note = 2'-O-methylcytidine-3'-phosphate
  modified_base 20: mod_base = OTHER; note = 2'-O-methyladenosine-3'-phosphate
  modified_base 21: mod_base = OTHER; note = 2'-O-methyladenosine
aacccttagtggctgaaacaa

SEQ ID NO: 891 - RNA, 21 nt, synthetic construct
  source 1..21: mol_type = other RNA
  modified_base 1: mod_base = OTHER; note = 2'-O-methyladenosine-3'-phosphorothioate
  modified_base 2: mod_base = OTHER; note = 2'-O-methylcytidine-3'-phosphorothioate
  modified_base 3: mod_base = OTHER; note = 2'-O-methylcytidine-3'-phosphate
  modified_base 4: mod_base = OTHER; note = 2'-O-methylcytidine-3'-phosphate
  modified_base 5: mod_base = OTHER; note = 2'-O-methyluridine-3'-phosphate
  modified_base 6: mod_base = OTHER; note = 2'-O-methyluridine-3'-phosphate
  modified_base 7: mod_base = OTHER; note = 2'-fluoroadenosine-3'-phosphate
  modified_base 8: mod_base = OTHER; note = 2'-O-methylguanosine-3'-phosphate
  modified_base 9: mod_base = OTHER; note = 2'-fluorouridine-3'-phosphate
  modified_base 10: mod_base = OTHER; note = 2'-fluoroguanosine-3'-phosphate
  modified_base 11: mod_base = OTHER; note = 2'-fluoroguanosine-3'-phosphate
  modified_base 12: mod_base = OTHER; note = 2'-O-methylcytidine-3'-phosphate
  modified_base 13: mod_base = OTHER; note = 2'-O-methyluridine-3'-phosphate
  modified_base 14: mod_base = OTHER; note = 2'-O-methylguanosine-3'-phosphate
  modified_base 15: mod_base = OTHER; note = 2'-O-methyladenosine-3'-phosphate
  modified_base 16: mod_base = OTHER; note = 2'-O-methyladenosine-3'-phosphate
  modified_base 17: mod_base = OTHER; note = 2'-O-methyladenosine-3'-phosphate
  modified_base 18: mod_base = OTHER; note = 2'-O-methylcytidine-3'-phosphate
  modified_base 19: mod_base = OTHER; note = 2'-O-methyladenosine-3'-phosphate
  modified_base 20: mod_base = OTHER; note = 2'-O-methylguanosine-3'-phosphate
  modified_base 21: mod_base = OTHER; note = 2'-O-methyladenosine
acccttagtggctgaaacaga

SEQ ID NO: 892 - RNA, 21 nt, synthetic construct
  source 1..21: mol_type = other RNA
  modified_base 1: mod_base = OTHER; note = 2'-O-methylcytidine-3'-phosphorothioate
  modified_base 2: mod_base = OTHER; note = 2'-O-methylcytidine-3'-phosphorothioate
  modified_base 3: mod_base = OTHER; note = 2'-O-methylcytidine-3'-phosphate
  modified_base 4: mod_base = OTHER; note = 2'-O-methyluridine-3'-phosphate
  modified_base 5: mod_base = OTHER; note = 2'-O-methyluridine-3'-phosphate
  modified_base 6: mod_base = OTHER; note = 2'-O-methyladenosine-3'-phosphate
  modified_base 7: mod_base = OTHER; note = 2'-fluoroguanosine-3'-phosphate
  modified_base 8: mod_base = OTHER; note = 2'-O-methyluridine-3'-phosphate
  modified_base 9: mod_base = OTHER; note = 2'-fluoroguanosine-3'-phosphate
  modified_base 10: mod_base = OTHER; note = 2'-fluoroguanosine-3'-phosphate
  modified_base 11: mod_base = OTHER; note = 2'-fluorocytidine-3'-phosphate
  modified_base 12: mod_base = OTHER; note = 2'-O-methyluridine-3'-phosphate
  modified_base 13: mod_base = OTHER; note = 2'-O-methylguanosine-3'-phosphate
  modified_base 14: mod_base = OTHER; note = 2'-O-methyladenosine-3'-phosphate
  modified_base 15: mod_base = OTHER; note = 2'-O-methyladenosine-3'-phosphate
  modified_base 16: mod_base = OTHER; note = 2'-O-methyladenosine-3'-phosphate
  modified_base 17: mod_base = OTHER; note = 2'-O-methylcytidine-3'-phosphate
  modified_base 18: mod_base = OTHER; note = 2'-O-methyladenosine-3'-phosphate
  modified_base 19: mod_base = OTHER; note = 2'-O-methylguanosine-3'-phosphate
  modified_base 20: mod_base = OTHER; note = 2'-O-methyladenosine-3'-phosphate
  modified_base 21: mod_base = OTHER; note = 2'-O-methyluridine
cccttagtggctgaaacagat

SEQ ID NO: 893 - RNA, 21 nt, synthetic construct
  source 1..21: mol_type = other RNA
  modified_base 1: mod_base = OTHER; note = 2'-O-methylcytidine-3'-phosphorothioate
  modified_base 2: mod_base = OTHER; note = 2'-O-methylcytidine-3'-phosphorothioate
  modified_base 3: mod_base = OTHER; note = 2'-O-methyluridine-3'-phosphate
  modified_base 4: mod_base = OTHER; note = 2'-O-methyluridine-3'-phosphate
  modified_base 5: mod_base = OTHER; note = 2'-O-methyladenosine-3'-phosphate
  modified_base 6: mod_base = OTHER; note = 2'-O-methylguanosine-3'-phosphate
  modified_base 7: mod_base = OTHER; note = 2'-fluorouridine-3'-phosphate
  modified_base 8: mod_base = OTHER; note = 2'-O-methylguanosine-3'-phosphate
  modified_base 9: mod_base = OTHER; note = 2'-fluoroguanosine-3'-phosphate
  modified_base 10: mod_base = OTHER; note = 2'-fluorocytidine-3'-phosphate
  modified_base 11: mod_base = OTHER; note = 2'-fluorouridine-3'-phosphate
  modified_base 12: mod_base = OTHER; note = 2'-O-methylguanosine-3'-phosphate
  modified_base 13: mod_base = OTHER; note = 2'-O-methyladenosine-3'-phosphate
  modified_base 14: mod_base = OTHER; note = 2'-O-methyladenosine-3'-phosphate
  modified_base 15: mod_base = OTHER; note = 2'-O-methyladenosine-3'-phosphate
  modified_base 16: mod_base = OTHER; note = 2'-O-methylcytidine-3'-phosphate
  modified_base 17: mod_base = OTHER; note = 2'-O-methyladenosine-3'-phosphate
  modified_base 18: mod_base = OTHER; note = 2'-O-methylguanosine-3'-phosphate
  modified_base 19: mod_base = OTHER; note = 2'-O-methyladenosine-3'-phosphate
  modified_base 20: mod_base = OTHER; note = 2'-O-methyluridine-3'-phosphate
  modified_base 21: mod_base = OTHER; note = 2'-O-methyladenosine
ccttagtggctgaaacagata

SEQ ID NO: 894 - RNA, 21 nt, synthetic construct
  source 1..21: mol_type = other RNA
  modified_base 1: mod_base = OTHER; note = 2'-O-methylcytidine-3'-phosphorothioate
  modified_base 2: mod_base = OTHER; note = 2'-O-methyladenosine-3'-phosphorothioate
  modified_base 3: mod_base = OTHER; note = 2'-O-methylguanosine-3'-phosphate
  modified_base 4: mod_base = OTHER; note = 2'-O-methyladenosine-3'-phosphate
  modified_base 5: mod_base = OTHER; note = 2'-O-methylguanosine-3'-phosphate
  modified_base 6: mod_base = OTHER; note = 2'-O-methylcytidine-3'-phosphate
  modified_base 7: mod_base = OTHER; note = 2'-fluorouridine-3'-phosphate
  modified_base 8: mod_base = OTHER; note = 2'-O-methyladenosine-3'-phosphate
  modified_base 9: mod_base = OTHER; note = 2'-fluorocytidine-3'-phosphate
  modified_base 10: mod_base = OTHER; note = 2'-fluoroadenosine-3'-phosphate
  modified_base 11: mod_base = OTHER; note = 2'-fluorouridine-3'-phosphate
  modified_base 12: mod_base = OTHER; note = 2'-O-methyluridine-3'-phosphate
  modified_base 13: mod_base = OTHER; note = 2'-O-methyluridine-3'-phosphate
  modified_base 14: mod_base = OTHER; note = 2'-O-methylguanosine-3'-phosphate
  modified_base 15: mod_base = OTHER; note = 2'-O-methyluridine-3'-phosphate
  modified_base 16: mod_base = OTHER; note = 2'-O-methylguanosine-3'-phosphate
  modified_base 17: mod_base = OTHER; note = 2'-O-methylguanosine-3'-phosphate
  modified_base 18: mod_base = OTHER; note = 2'-O-methyluridine-3'-phosphate
  modified_base 19: mod_base = OTHER; note = 2'-O-methyluridine-3'-phosphate
  modified_base 20: mod_base = OTHER; note = 2'-O-methylguanosine-3'-phosphate
  modified_base 21: mod_base = OTHER; note = 2'-O-methyladenosine
cagagctacatttgtggttga

SEQ ID NO: 895 - RNA, 21 nt, synthetic construct
  source 1..21: mol_type = other RNA
  modified_base 1: mod_base = OTHER; note = 2'-O-methyladenosine-3'-phosphorothioate
  modified_base 2: mod_base = OTHER; note = 2'-O-methylcytidine-3'-phosphorothioate
  modified_base 3: mod_base = OTHER; note = 2'-O-methyluridine-3'-phosphate
  modified_base 4: mod_base = OTHER; note = 2'-O-methylcytidine-3'-phosphate
  modified_base 5: mod_base = OTHER; note = 2'-O-methylcytidine-3'-phosphate
  modified_base 6: mod_base = OTHER; note = 2'-O-methyluridine-3'-phosphate
  modified_base 7: mod_base = OTHER; note = 2'-fluorocytidine-3'-phosphate
  modified_base 8: mod_base = OTHER; note = 2'-O-methylcytidine-3'-phosphate
  modified_base 9: mod_base = OTHER; note = 2'-fluorouridine-3'-phosphate
  modified_base 10: mod_base = OTHER; note = 2'-fluorouridine-3'-phosphate
  modified_base 11: mod_base = OTHER; note = 2'-fluoroadenosine-3'-phosphate
  modified_base 12: mod_base = OTHER; note = 2'-O-methylcytidine-3'-phosphate
  modified_base 13: mod_base = OTHER; note = 2'-O-methyluridine-3'-phosphate
  modified_base 14: mod_base = OTHER; note = 2'-O-methylcytidine-3'-phosphate
  modified_base 15: mod_base = OTHER; note = 2'-O-methylguanosine-3'-phosphate
  modified_base 16: mod_base = OTHER; note = 2'-O-methyladenosine-3'-phosphate
  modified_base 17: mod_base = OTHER; note = 2'-O-methyluridine-3'-phosphate
  modified_base 18: mod_base = OTHER; note = 2'-O-methyladenosine-3'-phosphate
  modified_base 19: mod_base = OTHER; note = 2'-O-methylcytidine-3'-phosphate
  modified_base 20: mod_base = OTHER; note = 2'-O-methyluridine-3'-phosphate
  modified_base 21: mod_base = OTHER; note = 2'-O-methyluridine
actcctccttactcgatactt

SEQ ID NO: 896 - RNA, 21 nt, synthetic construct
  source 1..21: mol_type = other RNA
  modified_base 1: mod_base = OTHER; note = 2'-O-methylcytidine-3'-phosphorothioate
  modified_base 2: mod_base = OTHER; note = 2'-O-methyluridine-3'-phosphorothioate
  modified_base 3: mod_base = OTHER; note = 2'-O-methylcytidine-3'-phosphate
  modified_base 4: mod_base = OTHER; note = 2'-O-methylcytidine-3'-phosphate
  modified_base 5: mod_base = OTHER; note = 2'-O-methyluridine-3'-phosphate
  modified_base 6: mod_base = OTHER; note = 2'-O-methylcytidine-3'-phosphate
  modified_base 7: mod_base = OTHER; note = 2'-fluorocytidine-3'-phosphate
  modified_base 8: mod_base = OTHER; note = 2'-O-methyluridine-3'-phosphate
  modified_base 9: mod_base = OTHER; note = 2'-fluorouridine-3'-phosphate
  modified_base 10: mod_base = OTHER; note = 2'-fluoroadenosine-3'-phosphate
  modified_base 11: mod_base = OTHER; note = 2'-fluorocytidine-3'-phosphate
  modified_base 12: mod_base = OTHER; note = 2'-O-methyluridine-3'-phosphate
  modified_base 13: mod_base = OTHER; note = 2'-O-methylcytidine-3'-phosphate
  modified_base 14: mod_base = OTHER; note = 2'-O-methylguanosine-3'-phosphate
  modified_base 15: mod_base = OTHER; note = 2'-O-methyladenosine-3'-phosphate
  modified_base 16: mod_base = OTHER; note = 2'-O-methyluridine-3'-phosphate
  modified_base 17: mod_base = OTHER; note = 2'-O-methyladenosine-3'-phosphate
  modified_base 18: mod_base = OTHER; note = 2'-O-methylcytidine-3'-phosphate
  modified_base 19: mod_base = OTHER; note = 2'-O-methyluridine-3'-phosphate
  modified_base 20: mod_base = OTHER; note = 2'-O-methyluridine-3'-phosphate
  modified_base 21: mod_base = OTHER; note = 2'-O-methyladenosine
ctcctccttactcgatactta

SEQ ID NO: 897 - RNA, 21 nt, synthetic construct
  source 1..21: mol_type = other RNA
  modified_base 1: mod_base = OTHER; note = 2'-O-methyluridine-3'-phosphorothioate
  modified_base 2: mod_base = OTHER; note = 2'-O-methylguanosine-3'-phosphorothioate
  modified_base 3: mod_base = OTHER; note = 2'-O-methylguanosine-3'-phosphate
  modified_base 4: mod_base = OTHER; note = 2'-O-methyluridine-3'-phosphate
  modified_base 5: mod_base = OTHER; note = 2'-O-methylguanosine-3'-phosphate
  modified_base 6: mod_base = OTHER; note = 2'-O-methyladenosine-3'-phosphate
  modified_base 7: mod_base = OTHER; note = 2'-fluorocytidine-3'-phosphate
  modified_base 8: mod_base = OTHER; note = 2'-O-methyladenosine-3'-phosphate
  modified_base 9: mod_base = OTHER; note = 2'-fluorocytidine-3'-phosphate
  modified_base 10: mod_base = OTHER; note = 2'-fluoroadenosine-3'-phosphate
  modified_base 11: mod_base = OTHER; note = 2'-fluoroguanosine-3'-phosphate
  modified_base 12: mod_base = OTHER; note = 2'-O-methylguanosine-3'-phosphate
  modified_base 13: mod_base = OTHER; note = 2'-O-methyladenosine-3'-phosphate
  modified_base 14: mod_base = OTHER; note = 2'-O-methyladenosine-3'-phosphate
  modified_base 15: mod_base = OTHER; note = 2'-O-methylcytidine-3'-phosphate
  modified_base 16: mod_base = OTHER; note = 2'-O-methylcytidine-3'-phosphate
  modified_base 17: mod_base = OTHER; note = 2'-O-methyluridine-3'-phosphate
  modified_base 18: mod_base = OTHER; note = 2'-O-methylguanosine-3'-phosphate
  modified_base 19: mod_base = OTHER; note = 2'-O-methyladenosine-3'-phosphate
  modified_base 20: mod_base = OTHER; note = 2'-O-methyladenosine-3'-phosphate
  modified_base 21: mod_base = OTHER; note = 2'-O-methyladenosine
tggtgacacaggaacctgaaa

SEQ ID NO: 898 - RNA, 21 nt, synthetic construct
  source 1..21: mol_type = other RNA
  modified_base 1: mod_base = OTHER; note = 2'-O-methyladenosine-3'-phosphorothioate
  modified_base 2: mod_base = OTHER; note = 2'-O-methyladenosine-3'-phosphorothioate
  modified_base 3: mod_base = OTHER; note = 2'-O-methylguanosine-3'-phosphate
  modified_base 4: mod_base = OTHER; note = 2'-O-methylguanosine-3'-phosphate
  modified_base 5: mod_base = OTHER; note = 2'-O-methyluridine-3'-phosphate
  modified_base 6: mod_base = OTHER; note = 2'-O-methylguanosine-3'-phosphate
  modified_base 7: mod_base = OTHER; note = 2'-fluorocytidine-3'-phosphate
  modified_base 8: mod_base = OTHER; note = 2'-O-methyladenosine-3'-phosphate
  modified_base 9: mod_base = OTHER; note = 2'-fluoroadenosine-3'-phosphate
  modified_base 10: mod_base = OTHER; note = 2'-fluoroadenosine-3'-phosphate
  modified_base 11: mod_base = OTHER; note = 2'-fluoroadenosine-3'-phosphate
  modified_base 12: mod_base = OTHER; note = 2'-O-methyluridine-3'-phosphate
  modified_base 13: mod_base = OTHER; note = 2'-O-methyluridine-3'-phosphate
  modified_base 14: mod_base = OTHER; note = 2'-O-methylcytidine-3'-phosphate
  modified_base 15: mod_base = OTHER; note = 2'-O-methylcytidine-3'-phosphate
  modified_base 16: mod_base = OTHER; note = 2'-O-methyluridine-3'-phosphate
  modified_base 17: mod_base = OTHER; note = 2'-O-methyluridine-3'-phosphate
  modified_base 18: mod_base = OTHER; note = 2'-O-methyladenosine-3'-phosphate
  modified_base 19: mod_base = OTHER; note = 2'-O-methylguanosine-3'-phosphate
  modified_base 20: mod_base = OTHER; note = 2'-O-methyluridine-3'-phosphate
  modified_base 21: mod_base = OTHER; note = 2'-O-methyladenosine
aaggtgcaaaattccttagta

SEQ ID NO: 899 - RNA, 21 nt, synthetic construct
  source 1..21: mol_type = other RNA
  modified_base 1: mod_base = OTHER; note = 2'-O-methyluridine-3'-phosphorothioate
  modified_base 2: mod_base = OTHER; note = 2'-O-methyluridine-3'-phosphorothioate
  modified_base 3: mod_base = OTHER; note = 2'-O-methylcytidine-3'-phosphate
  modified_base 4: mod_base = OTHER; note = 2'-O-methylcytidine-3'-phosphate
  modified_base 5: mod_base = OTHER; note = 2'-O-methyluridine-3'-phosphate
  modified_base 6: mod_base = OTHER; note = 2'-O-methyluridine-3'-phosphate
  modified_base 7: mod_base = OTHER; note = 2'-fluoroadenosine-3'-phosphate
  modified_base 8: mod_base = OTHER; note = 2'-O-methylguanosine-3'-phosphate
  modified_base 9: mod_base = OTHER; note = 2'-fluorouridine-3'-phosphate
  modified_base 10: mod_base = OTHER; note = 2'-fluoroguanosine-3'-phosphate
  modified_base 11: mod_base = OTHER; note = 2'-fluoroadenosine-3'-phosphate
  modified_base 12: mod_base = OTHER; note = 2'-O-methyluridine-3'-phosphate
  modified_base 13: mod_base = OTHER; note = 2'-O-methylguanosine-3'-phosphate
  modified_base 14: mod_base = OTHER; note = 2'-O-methylcytidine-3'-phosphate
  modified_base 15: mod_base = OTHER; note = 2'-O-methyluridine-3'-phosphate
  modified_base 16: mod_base = OTHER; note = 2'-O-methylguanosine-3'-phosphate
  modified_base 17: mod_base = OTHER; note = 2'-O-methyladenosine-3'-phosphate
  modified_base 18: mod_base = OTHER; note = 2'-O-methylguanosine-3'-phosphate
  modified_base 19: mod_base = OTHER; note = 2'-O-methyladenosine-3'-phosphate
  modified_base 20: mod_base = OTHER; note = 2'-O-methyluridine-3'-phosphate
  modified_base 21: mod_base = OTHER; note = 2'-O-methyladenosine
ttccttagtgatgctgagata

SEQ ID NO: 900 - RNA, 21 nt, synthetic construct
  source 1..21: mol_type = other RNA
  modified_base 1: mod_base = OTHER; note = 2'-O-methyluridine-3'-phosphorothioate
  modified_base 2: mod_base = OTHER; note = 2'-O-methylguanosine-3'-phosphorothioate
  modified_base 3: mod_base = OTHER; note = 2'-O-methylcytidine-3'-phosphate
  modified_base 4: mod_base = OTHER; note = 2'-O-methyluridine-3'-phosphate
  modified_base 5: mod_base = OTHER; note = 2'-O-methylguanosine-3'-phosphate
  modified_base 6: mod_base = OTHER; note = 2'-O-methyladenosine-3'-phosphate
  modified_base 7: mod_base = OTHER; note = 2'-fluoroguanosine-3'-phosphate
  modified_base 8: mod_base = OTHER; note = 2'-O-methyladenosine-3'-phosphate
  modified_base 9: mod_base = OTHER; note = 2'-fluorouridine-3'-phosphate
  modified_base 10: mod_base = OTHER; note = 2'-fluorocytidine-3'-phosphate
  modified_base 11: mod_base = OTHER; note = 2'-fluoroadenosine-3'-phosphate
  modified_base 12: mod_base = OTHER; note = 2'-O-methyluridine-3'-phosphate
  modified_base 13: mod_base = OTHER; note = 2'-O-methylcytidine-3'-phosphate
  modified_base 14: mod_base = OTHER; note = 2'-O-methylcytidine-3'-phosphate
  modified_base 15: mod_base = OTHER; note = 2'-O-methyladenosine-3'-phosphate
  modified_base 16: mod_base = OTHER; note = 2'-O-methylguanosine-3'-phosphate
  modified_base 17: mod_base = OTHER; note = 2'-O-methyluridine-3'-phosphate
  modified_base 18: mod_base = OTHER; note = 2'-O-methyluridine-3'-phosphate
  modified_base 19: mod_base = OTHER; note = 2'-O-methyladenosine-3'-phosphate
  modified_base 20: mod_base = OTHER; note = 2'-O-methylguanosine-3'-phosphate
  modified_base 21: mod_base = OTHER; note = 2'-O-methyluridine
tgctgagatcatccagttagt

SEQ ID NO: 901 - RNA, 21 nt, synthetic construct
  source 1..21: mol_type = other RNA
  modified_base 1: mod_base = OTHER; note = 2'-O-methyluridine-3'-phosphorothioate
  modified_base 2: mod_base = OTHER; note = 2'-O-methylguanosine-3'-phosphorothioate
  modified_base 3: mod_base = OTHER; note = 2'-O-methylcytidine-3'-phosphate
  modified_base 4: mod_base = OTHER; note = 2'-O-methyluridine-3'-phosphate
  modified_base 5: mod_base = OTHER; note = 2'-O-methylguanosine-3'-phosphate
  modified_base 6: mod_base = OTHER; note = 2'-O-methyladenosine-3'-phosphate
  modified_base 7: mod_base = OTHER; note = 2'-fluoroguanosine-3'-phosphate
  modified_base 8: mod_base = OTHER; note = 2'-O-methyladenosine-3'-phosphate
  modified_base 9: mod_base = OTHER; note = 2'-fluorouridine-3'-phosphate
  modified_base 10: mod_base = OTHER; note = 2'-fluorocytidine-3'-phosphate
  modified_base 11: mod_base = OTHER; note = 2'-fluoroadenosine-3'-phosphate
  modified_base 12: mod_base = OTHER; note = 2'-O-methyluridine-3'-phosphate
  modified_base 13: mod_base = OTHER; note = 2'-O-methylcytidine-3'-phosphate
  modified_base 14: mod_base = OTHER; note = 2'-O-methylcytidine-3'-phosphate
  modified_base 15: mod_base = OTHER; note = 2'-O-methyladenosine-3'-phosphate
  modified_base 16: mod_base = OTHER; note = 2'-O-methylguanosine-3'-phosphate
  modified_base 17: mod_base = OTHER; note = 2'-O-methyluridine-3'-phosphate
  modified_base 18: mod_base = OTHER; note = 2'-O-methyluridine-3'-phosphate
  modified_base 19: mod_base = OTHER; note = 2'-O-methyladenosine-3'-phosphate
  modified_base 20: mod_base = OTHER; note = 2'-O-methylguanosine-3'-phosphate
  modified_base 21: mod_base = OTHER; note = 2'-O-methyluridine
tgctgagatcatccagttagt

SEQ ID NO: 902 - RNA, 21 nt, synthetic construct
  source 1..21: mol_type = other RNA
  modified_base 1: mod_base = OTHER; note = 2'-O-methyluridine-3'-phosphorothioate
  modified_base 2: mod_base = OTHER; note = 2'-O-methylguanosine-3'-phosphorothioate
  modified_base 3: mod_base = OTHER; note = 2'-O-methyladenosine-3'-phosphate
  modified_base 4: mod_base = OTHER; note = 2'-O-methylguanosine-3'-phosphate
  modified_base 5: mod_base = OTHER; note = 2'-O-methyladenosine-3'-phosphate
  modified_base 6: mod_base = OTHER; note = 2'-O-methyluridine-3'-phosphate
  modified_base 7: mod_base = OTHER; note = 2'-fluorocytidine-3'-phosphate
  modified_base 8: mod_base = OTHER; note = 2'-O-methyladenosine-3'-phosphate
  modified_base 9: mod_base = OTHER; note = 2'-fluorouridine-3'-phosphate
  modified_base 10: mod_base = OTHER; note = 2'-fluorocytidine-3'-phosphate
  modified_base 11: mod_base = OTHER; note = 2'-fluorocytidine-3'-phosphate
  modified_base 12: mod_base = OTHER; note = 2'-O-methyladenosine-3'-phosphate
  modified_base 13: mod_base = OTHER; note = 2'-O-methylguanosine-3'-phosphate
  modified_base 14: mod_base = OTHER; note = 2'-O-methyluridine-3'-phosphate
  modified_base 15: mod_base = OTHER; note = 2'-O-methyluridine-3'-phosphate
  modified_base 16: mod_base = OTHER; note = 2'-O-methyladenosine-3'-phosphate
  modified_base 17: mod_base = OTHER; note = 2'-O-methylguanosine-3'-phosphate
  modified_base 18: mod_base = OTHER; note = 2'-O-methyluridine-3'-phosphate
  modified_base 19: mod_base = OTHER; note = 2'-O-methylcytidine-3'-phosphate
  modified_base 20: mod_base = OTHER; note = 2'-O-methyladenosine-3'-phosphate
  modified_base 21: mod_base = OTHER; note = 2'-O-methyladenosine
tgagatcatccagttagtcaa

SEQ ID NO: 903 - RNA, 21 nt, synthetic construct
  source 1..21: mol_type = other RNA
  modified_base 1: mod_base = OTHER; note = 2'-O-methyladenosine-3'-phosphorothioate
  modified_base 2: mod_base = OTHER; note = 2'-O-methylguanosine-3'-phosphorothioate
  modified_base 3: mod_base = OTHER; note = 2'-O-methyladenosine-3'-phosphate
  modified_base 4: mod_base = OTHER; note = 2'-O-methyluridine-3'-phosphate
  modified_base 5: mod_base = OTHER; note = 2'-O-methylcytidine-3'-phosphate
  modified_base 6: mod_base = OTHER; note = 2'-O-methyladenosine-3'-phosphate
  modified_base 7: mod_base = OTHER; note = 2'-fluorouridine-3'-phosphate
  modified_base 8: mod_base = OTHER; note = 2'-O-methylcytidine-3'-phosphate
  modified_base 9: mod_base = OTHER; note = 2'-fluorocytidine-3'-phosphate
  modified_base 10: mod_base = OTHER; note = 2'-fluoroadenosine-3'-phosphate
  modified_base 11: mod_base = OTHER; note = 2'-fluoroguanosine-3'-phosphate
  modified_base 12: mod_base = OTHER; note = 2'-O-methyluridine-3'-phosphate
  modified_base 13: mod_base = OTHER; note = 2'-O-methyluridine-3'-phosphate
  modified_base 14: mod_base = OTHER; note = 2'-O-methyladenosine-3'-phosphate
  modified_base 15: mod_base = OTHER; note = 2'-O-methylguanosine-3'-phosphate
  modified_base 16: mod_base = OTHER; note = 2'-O-methyluridine-3'-phosphate
  modified_base 17: mod_base = OTHER; note = 2'-O-methylcytidine-3'-phosphate
  modified_base 18: mod_base = OTHER; note = 2'-O-methyladenosine-3'-phosphate
  modified_base 19: mod_base = OTHER; note = 2'-O-methyladenosine-3'-phosphate
  modified_base 20: mod_base = OTHER; note = 2'-O-methyluridine-3'-phosphate
  modified_base 21: mod_base = OTHER; note = 2'-O-methyladenosine
agatcatccagttagtcaata

SEQ ID NO: 904 - RNA, 21 nt, synthetic construct
  source 1..21: mol_type = other RNA
  modified_base 1: mod_base = OTHER; note = 2'-O-methyladenosine-3'-phosphorothioate
  modified_base 2: mod_base = OTHER; note = 2'-O-methyluridine-3'-phosphorothioate
  modified_base 3: mod_base = OTHER; note = 2'-O-methylcytidine-3'-phosphate
  modified_base 4: mod_base = OTHER; note = 2'-O-methyladenosine-3'-phosphate
  modified_base 5: mod_base = OTHER; note = 2'-O-methyluridine-3'-phosphate
  modified_base 6: mod_base = OTHER; note = 2'-O-methylcytidine-3'-phosphate
  modified_base 7: mod_base = OTHER; note = 2'-fluorocytidine-3'-phosphate
  modified_base 8: mod_base = OTHER; note = 2'-O-methyladenosine-3'-phosphate
  modified_base 9: mod_base = OTHER; note = 2'-fluoroguanosine-3'-phosphate
  modified_base 10: mod_base = OTHER; note = 2'-fluorouridine-3'-phosphate
  modified_base 11: mod_base = OTHER; note = 2'-fluorouridine-3'-phosphate
  modified_base 12: mod_base = OTHER; note = 2'-O-methyladenosine-3'-phosphate
  modified_base 13: mod_base = OTHER; note = 2'-O-methylguanosine-3'-phosphate
  modified_base 14: mod_base = OTHER; note = 2'-O-methyluridine-3'-phosphate
  modified_base 15: mod_base = OTHER; note = 2'-O-methylcytidine-3'-phosphate
  modified_base 16: mod_base = OTHER; note = 2'-O-methyladenosine-3'-phosphate
  modified_base 17: mod_base = OTHER; note = 2'-O-methyladenosine-3'-phosphate
  modified_base 18: mod_base = OTHER; note = 2'-O-methyluridine-3'-phosphate
  modified_base 19: mod_base = OTHER; note = 2'-O-methylguanosine-3'-phosphate
  modified_base 20: mod_base = OTHER; note = 2'-O-methylcytidine-3'-phosphate
  modified_base 21: mod_base = OTHER; note = 2'-O-methyluridine
atcatccagttagtcaatgct

SEQ ID NO: 905 - RNA, 21 nt, synthetic construct
  source 1..21: mol_type = other RNA
  modified_base 1: mod_base = OTHER; note = 2'-O-methyluridine-3'-phosphorothioate
  modified_base 2: mod_base = OTHER; note = 2'-O-methylcytidine-3'-phosphorothioate
  modified_base 3: mod_base = OTHER; note = 2'-O-methylcytidine-3'-phosphate
  modified_base 4: mod_base = OTHER; note = 2'-O-methyladenosine-3'-phosphate
  modified_base 5: mod_base = OTHER; note = 2'-O-methylguanosine-3'-phosphate
  modified_base 6: mod_base = OTHER; note = 2'-O-methyluridine-3'-phosphate
  modified_base 7: mod_base = OTHER; note = 2'-fluorouridine-3'-phosphate
  modified_base 8: mod_base = OTHER; note = 2'-O-methyladenosine-3'-phosphate
  modified_base 9: mod_base = OTHER; note = 2'-fluoroguanosine-3'-phosphate
  modified_base 10: mod_base = OTHER; note = 2'-fluorouridine-3'-phosphate
  modified_base 11: mod_base = OTHER; note = 2'-fluorocytidine-3'-phosphate
  modified_base 12: mod_base = OTHER; note = 2'-O-methyladenosine-3'-phosphate
  modified_base 13: mod_base = OTHER; note = 2'-O-methyladenosine-3'-phosphate
  modified_base 14: mod_base = OTHER; note = 2'-O-methyluridine-3'-phosphate
  modified_base 15: mod_base = OTHER; note = 2'-O-methylguanosine-3'-phosphate
  modified_base 16: mod_base = OTHER; note = 2'-O-methylcytidine-3'-phosphate
  modified_base 17: mod_base = OTHER; note = 2'-O-methyluridine-3'-phosphate
  modified_base 18: mod_base = OTHER; note = 2'-O-methyladenosine-3'-phosphate
  modified_base 19: mod_base = OTHER; note = 2'-O-methyladenosine-3'-phosphate
  modified_base 20: mod_base = OTHER; note = 2'-O-methylguanosine-3'-phosphate
  modified_base 21: mod_base = OTHER; note = 2'-O-methyladenosine
tccagttagtcaatgctaaga

SEQ ID NO: 906 - RNA, 21 nt, synthetic construct
  source 1..21: mol_type = other RNA
  modified_base 1: mod_base = OTHER; note = 2'-O-methyladenosine-3'-phosphorothioate
  modified_base 2: mod_base = OTHER; note = 2'-O-methylguanosine-3'-phosphorothioate
  modified_base 3: mod_base = OTHER; note = 2'-O-methyluridine-3'-phosphate
  modified_base 4: mod_base = OTHER; note = 2'-O-methyluridine-3'-phosphate
  modified_base 5: mod_base = OTHER; note = 2'-O-methyladenosine-3'-phosphate
  modified_base 6: mod_base = OTHER; note = 2'-O-methylguanosine-3'-phosphate
  modified_base 7: mod_base = OTHER; note = 2'-fluorouridine-3'-phosphate
  modified_base 8: mod_base = OTHER; note = 2'-O-methylcytidine-3'-phosphate
  modified_base 9: mod_base = OTHER; note = 2'-fluoroadenosine-3'-phosphate
  modified_base 10: mod_base = OTHER; note = 2'-fluoroadenosine-3'-phosphate
  modified_base 11: mod_base = OTHER; note = 2'-fluorouridine-3'-phosphate
  modified_base 12: mod_base = OTHER; note = 2'-O-methylguanosine-3'-phosphate
  modified_base 13: mod_base = OTHER; note = 2'-O-methylcytidine-3'-phosphate
  modified_base 14: mod_base = OTHER; note = 2'-O-methyluridine-3'-phosphate
  modified_base 15: mod_base = OTHER; note = 2'-O-methyladenosine-3'-phosphate
  modified_base 16: mod_base = OTHER; note = 2'-O-methyladenosine-3'-phosphate
  modified_base 17: mod_base = OTHER; note = 2'-O-methylguanosine-3'-phosphate
  modified_base 18: mod_base = OTHER; note = 2'-O-methylcytidine-3'-phosphate
  modified_base 19: mod_base = OTHER; note = 2'-O-methyladenosine-3'-phosphate
  modified_base 20: mod_base = OTHER; note = 2'-O-methyluridine-3'-phosphate
  modified_base 21: mod_base = OTHER; note = 2'-O-methyladenosine
agttagtcaatgctaagcata

SEQ ID NO: 907 - RNA, 21 nt, synthetic construct
  source 1..21: mol_type = other RNA
  modified_base 1: mod_base = OTHER; note = 2'-O-methylguanosine-3'-phosphorothioate
  modified_base 2: mod_base = OTHER; note = 2'-O-methyluridine-3'-phosphorothioate
  modified_base 3: mod_base = OTHER; note = 2'-O-methyluridine-3'-phosphate
  modified_base 4: mod_base = OTHER; note = 2'-O-methyladenosine-3'-phosphate
  modified_base 5: mod_base = OTHER; note = 2'-O-methylguanosine-3'-phosphate
  modified_base 6: mod_base = OTHER; note = 2'-O-methyluridine-3'-phosphate
  modified_base 7: mod_base = OTHER; note = 2'-fluorocytidine-3'-phosphate
  modified_base 8: mod_base = OTHER; note = 2'-O-methyladenosine-3'-phosphate
  modified_base 9: mod_base = OTHER; note = 2'-fluoroadenosine-3'-phosphate
  modified_base 10: mod_base = OTHER; note = 2'-fluorouridine-3'-phosphate
  modified_base 11: mod_base = OTHER; note = 2'-fluoroguanosine-3'-phosphate
  modified_base 12: mod_base = OTHER; note = 2'-O-methylcytidine-3'-phosphate
  modified_base 13: mod_base = OTHER; note = 2'-O-methyluridine-3'-phosphate
  modified_base 14: mod_base = OTHER; note = 2'-O-methyladenosine-3'-phosphate
  modified_base 15: mod_base = OTHER; note = 2'-O-methyladenosine-3'-phosphate
  modified_base 16: mod_base = OTHER; note = 2'-O-methylguanosine-3'-phosphate
  modified_base 17: mod_base = OTHER; note = 2'-O-methylcytidine-3'-phosphate
  modified_base 18: mod_base = OTHER; note = 2'-O-methyladenosine-3'-phosphate
  modified_base 19: mod_base = OTHER; note = 2'-O-methyluridine-3'-phosphate
  modified_base 20: mod_base = OTHER; note = 2'-O-methyladenosine-3'-phosphate
  modified_base 21: mod_base = OTHER; note = 2'-O-methyluridine
gttagtcaatgctaagcatat

SEQ ID NO: 908 - RNA, 21 nt, synthetic construct
  source 1..21: mol_type = other RNA
  modified_base 1: mod_base = OTHER; note = 2'-O-methyluridine-3'-phosphorothioate
  modified_base 2: mod_base = OTHER; note = 2'-O-methyluridine-3'-phosphorothioate
  modified_base 3: mod_base = OTHER; note = 2'-O-methyladenosine-3'-phosphate
  modified_base 4: mod_base = OTHER; note = 2'-O-methylguanosine-3'-phosphate
  modified_base 5: mod_base = OTHER; note = 2'-O-methyluridine-3'-phosphate
  modified_base 6: mod_base = OTHER; note = 2'-O-methylcytidine-3'-phosphate
  modified_base 7: mod_base = OTHER; note = 2'-fluoroadenosine-3'-phosphate
  modified_base 8: mod_base = OTHER; note = 2'-O-methyladenosine-3'-phosphate
  modified_base 9: mod_base = OTHER; note = 2'-fluorouridine-3'-phosphate
  modified_base 10: mod_base = OTHER; note = 2'-fluoroguanosine-3'-phosphate
  modified_base 11: mod_base = OTHER; note = 2'-fluorocytidine-3'-phosphate
  modified_base 12: mod_base = OTHER; note = 2'-O-methyluridine-3'-phosphate
  modified_base 13: mod_base = OTHER; note = 2'-O-methyladenosine-3'-phosphate
  modified_base 14: mod_base = OTHER; note = 2'-O-methyladenosine-3'-phosphate
  modified_base 15: mod_base = OTHER; note = 2'-O-methylguanosine-3'-phosphate
  modified_base 16: mod_base = OTHER; note = 2'-O-methylcytidine-3'-phosphate
  modified_base 17: mod_base = OTHER; note = 2'-O-methyladenosine-3'-phosphate
  modified_base 18: mod_base = OTHER; note = 2'-O-methyluridine-3'-phosphate
  modified_base 19: mod_base = OTHER; note = 2'-O-methyladenosine-3'-phosphate
  modified_base 20: mod_base = OTHER; note = 2'-O-methyluridine-3'-phosphate
  modified_base 21: mod_base = OTHER; note = 2'-O-methyladenosine
ttagtcaatgctaagcatata

SEQ ID NO: 909 - RNA, 21 nt, synthetic construct
  source 1..21: mol_type = other RNA
  modified_base 1: mod_base = OTHER; note = 2'-O-methylguanosine-3'-phosphorothioate
  modified_base 2: mod_base = OTHER; note = 2'-O-methyluridine-3'-phosphorothioate
  modified_base 3: mod_base = OTHER; note = 2'-O-methylcytidine-3'-phosphate
  modified_base 4: mod_base = OTHER; note = 2'-O-methyladenosine-3'-phosphate
  modified_base 5: mod_base = OTHER; note = 2'-O-methyladenosine-3'-phosphate
  modified_base 6: mod_base = OTHER; note = 2'-O-methyluridine-3'-phosphate
  modified_base 7: mod_base = OTHER; note = 2'-fluoroguanosine-3'-phosphate
  modified_base 8: mod_base = OTHER; note = 2'-O-methylcytidine-3'-phosphate
  modified_base 9: mod_base = OTHER; note = 2'-fluorouridine-3'-phosphate
  modified_base 10: mod_base = OTHER; note = 2'-fluoroadenosine-3'-phosphate
  modified_base 11: mod_base = OTHER; note = 2'-fluoroadenosine-3'-phosphate
  modified_base 12: mod_base = OTHER; note = 2'-O-methylguanosine-3'-phosphate
  modified_base 13: mod_base = OTHER; note = 2'-O-methylcytidine-3'-phosphate
  modified_base 14: mod_base = OTHER; note = 2'-O-methyladenosine-3'-phosphate
  modified_base 15: mod_base = OTHER; note = 2'-O-methyluridine-3'-phosphate
  modified_base 16: mod_base = OTHER; note = 2'-O-methyladenosine-3'-phosphate
  modified_base 17: mod_base = OTHER; note = 2'-O-methyluridine-3'-phosphate
  modified_base 18: mod_base = OTHER; note = 2'-O-methylcytidine-3'-phosphate
  modified_base 19: mod_base = OTHER; note = 2'-O-methylcytidine-3'-phosphate
  modified_base 20: mod_base = OTHER; note = 2'-O-methylcytidine-3'-phosphate
  modified_base 21: mod_base = OTHER; note = 2'-O-methyladenosine
gtcaatgctaagcatatccca

SEQ ID NO: 910 - RNA, 21 nt, synthetic construct
  source 1..21: mol_type = other RNA
  modified_base 1: mod_base = OTHER; note = 2'-O-methylguanosine-3'-phosphorothioate
  modified_base 2: mod_base = OTHER; note = 2'-O-methylcytidine-3'-phosphorothioate
  modified_base 3: mod_base = OTHER; note = 2'-O-methyladenosine-3'-phosphate
  modified_base 4: mod_base = OTHER; note = 2'-O-methyluridine-3'-phosphate
  modified_base 5: mod_base = OTHER; note = 2'-O-methyladenosine-3'-phosphate
  modified_base 6: mod_base = OTHER; note = 2'-O-methyluridine-3'-phosphate
  modified_base 7: mod_base = OTHER; note = 2'-fluorocytidine-3'-phosphate
  modified_base 8: mod_base = OTHER; note = 2'-O-methylcytidine-3'-phosphate
  modified_base 9: mod_base = OTHER; note = 2'-fluorocytidine-3'-phosphate
  modified_base 10: mod_base = OTHER; note = 2'-fluoroadenosine-3'-phosphate
  modified_base 11: mod_base = OTHER; note = 2'-fluoroguanosine-3'-phosphate
  modified_base 12: mod_base = OTHER; note = 2'-O-methylcytidine-3'-phosphate
  modified_base 13: mod_base = OTHER; note = 2'-O-methylcytidine-3'-phosphate
  modified_base 14: mod_base = OTHER; note = 2'-O-methyluridine-3'-phosphate
  modified_base 15: mod_base = OTHER; note = 2'-O-methyladenosine-3'-phosphate
  modified_base 16: mod_base = OTHER; note = 2'-O-methylcytidine-3'-phosphate
  modified_base 17: mod_base = OTHER; note = 2'-O-methyladenosine-3'-phosphate
  modified_base 18: mod_base = OTHER; note = 2'-O-methyladenosine-3'-phosphate
  modified_base 19: mod_base = OTHER; note = 2'-O-methylguanosine-3'-phosphate
  modified_base 20: mod_base = OTHER; note = 2'-O-methyluridine-3'-phosphate
  modified_base 21: mod_base = OTHER; note = 2'-O-methyluridine
gcatatcccagcctacaagtt

SEQ ID NO: 911 - RNA, 21 nt, synthetic construct
  source 1..21: mol_type = other RNA
  modified_base 1: mod_base = OTHER; note = 2'-O-methylcytidine-3'-phosphorothioate
  modified_base 2: mod_base = OTHER; note = 2'-O-methyladenosine-3'-phosphorothioate
  modified_base 3: mod_base = OTHER; note = 2'-O-methyluridine-3'-phosphate
  modified_base 4: mod_base = OTHER; note = 2'-O-methyladenosine-3'-phosphate
  modified_base 5: mod_base = OTHER; note = 2'-O-methyluridine-3'-phosphate
  modified_base 6: mod_base = OTHER; note = 2'-O-methylcytidine-3'-phosphate
  modified_base 7: mod_base = OTHER; note = 2'-fluorocytidine-3'-phosphate
  modified_base 8: mod_base = OTHER; note = 2'-O-methylcytidine-3'-phosphate
  modified_base 9: mod_base = OTHER; note = 2'-fluoroadenosine-3'-phosphate
  modified_base 10: mod_base = OTHER; note = 2'-fluoroguanosine-3'-phosphate
  modified_base 11: mod_base = OTHER; note = 2'-fluorocytidine-3'-phosphate
  modified_base 12: mod_base = OTHER; note = 2'-O-methylcytidine-3'-phosphate
  modified_base 13: mod_base = OTHER; note = 2'-O-methyluridine-3'-phosphate
  modified_base 14: mod_base = OTHER; note = 2'-O-methyladenosine-3'-phosphate
  modified_base 15: mod_base = OTHER; note = 2'-O-methylcytidine-3'-phosphate
  modified_base 16: mod_base = OTHER; note = 2'-O-methyladenosine-3'-phosphate
  modified_base 17: mod_base = OTHER; note = 2'-O-methyladenosine-3'-phosphate
  modified_base 18: mod_base = OTHER; note = 2'-O-methylguanosine-3'-phosphate
  modified_base 19: mod_base = OTHER; note = 2'-O-methyluridine-3'-phosphate
  modified_base 20: mod_base = OTHER; note = 2'-O-methyluridine-3'-phosphate
  modified_base 21: mod_base = OTHER; note = 2'-O-methyladenosine
catatcccagcctacaagtta

SEQ ID NO: 912 - RNA, 21 nt, synthetic construct
  source 1..21: mol_type = other RNA
  modified_base 1: mod_base = OTHER; note = 2'-O-methyladenosine-3'-phosphorothioate
  modified_base 2: mod_base = OTHER; note = 2'-O-methyluridine-3'-phosphorothioate
  modified_base 3: mod_base = OTHER; note = 2'-O-methyladenosine-3'-phosphate
  modified_base 4: mod_base = OTHER; note = 2'-O-methyluridine-3'-phosphate
  modified_base 5: mod_base = OTHER; note = 2'-O-methylcytidine-3'-phosphate
  modified_base 6: mod_base = OTHER; note = 2'-O-methylcytidine-3'-phosphate
  modified_base 7: mod_base = OTHER; note = 2'-fluorocytidine-3'-phosphate
  modified_base 8: mod_base = OTHER; note = 2'-O-methyladenosine-3'-phosphate
  modified_base 9: mod_base = OTHER; note = 2'-fluoroguanosine-3'-phosphate
  modified_base 10: mod_base = OTHER; note = 2'-fluorocytidine-3'-phosphate
  modified_base 11: mod_base = OTHER; note = 2'-fluorocytidine-3'-phosphate
  modified_base 12: mod_base = OTHER; note = 2'-O-methyluridine-3'-phosphate
  modified_base 13: mod_base = OTHER; note = 2'-O-methyladenosine-3'-phosphate
  modified_base 14: mod_base = OTHER; note = 2'-O-methylcytidine-3'-phosphate
  modified_base 15: mod_base = OTHER; note = 2'-O-methyladenosine-3'-phosphate
  modified_base 16: mod_base = OTHER; note = 2'-O-methyladenosine-3'-phosphate
  modified_base 17: mod_base = OTHER; note = 2'-O-methylguanosine-3'-phosphate
  modified_base 18: mod_base = OTHER; note = 2'-O-methyluridine-3'-phosphate
  modified_base 19: mod_base = OTHER; note = 2'-O-methyluridine-3'-phosphate
  modified_base 20: mod_base = OTHER; note = 2'-O-methylguanosine-3'-phosphate
  modified_base 21: mod_base = OTHER; note = 2'-O-methyladenosine
atatcccagcctacaagttga

SEQ ID NO: 913 - RNA, 21 nt, synthetic construct
  source 1..21: mol_type = other RNA
  modified_base 1: mod_base = OTHER; note = 2'-O-methyladenosine-3'-phosphorothioate
  modified_base 2: mod_base = OTHER; note = 2'-O-methylguanosine-3'-phosphorothioate
  modified_base 3: mod_base = OTHER; note = 2'-O-methylcytidine-3'-phosphate
  modified_base 4: mod_base = OTHER; note = 2'-O-methylcytidine-3'-phosphate
  modified_base 5: mod_base = OTHER; note = 2'-O-methyluridine-3'-phosphate
  modified_base 6: mod_base = OTHER; note = 2'-O-methyladenosine-3'-phosphate
  modified_base 7: mod_base = OTHER; note = 2'-fluorocytidine-3'-phosphate
  modified_base 8: mod_base = OTHER; note = 2'-O-methyladenosine-3'-phosphate
  modified_base 9: mod_base = OTHER; note = 2'-fluoroadenosine-3'-phosphate
  modified_base 10: mod_base = OTHER; note = 2'-fluoroguanosine-3'-phosphate
  modified_base 11: mod_base = OTHER; note = 2'-fluorouridine-3'-phosphate
  modified_base 12: mod_base = OTHER; note = 2'-O-methyluridine-3'-phosphate
  modified_base 13: mod_base = OTHER; note = 2'-O-methylguanosine-3'-phosphate
  modified_base 14: mod_base = OTHER; note = 2'-O-methylguanosine-3'-phosphate
  modified_base 15: mod_base = OTHER; note = 2'-O-methyladenosine-3'-phosphate
  modified_base 16: mod_base = OTHER; note = 2'-O-methyladenosine-3'-phosphate
  modified_base 17: mod_base = OTHER; note = 2'-O-methyladenosine-3'-phosphate
  modified_base 18: mod_base = OTHER; note = 2'-O-methylcytidine-3'-phosphate
  modified_base 19: mod_base = OTHER; note = 2'-O-methyluridine-3'-phosphate
  modified_base 20: mod_base = OTHER; note = 2'-O-methylcytidine-3'-phosphate
  modified_base 21: mod_base = OTHER; note = 2'-O-methyluridine
agcctacaagttggaaactct

SEQ ID NO: 914 - RNA, 21 nt, synthetic construct
  source 1..21: mol_type = other RNA
  modified_base 1: mod_base = OTHER; note = 2'-O-methylcytidine-3'-phosphorothioate
  modified_base 2: mod_base = OTHER; note = 2'-O-methyladenosine-3'-phosphorothioate
  modified_base 3: mod_base = OTHER; note = 2'-O-methyladenosine-3'-phosphate
  modified_base 4: mod_base = OTHER; note = 2'-O-methylguanosine-3'-phosphate
  modified_base 5: mod_base = OTHER; note = 2'-O-methyluridine-3'-phosphate
  modified_base 6: mod_base = OTHER; note = 2'-O-methyluridine-3'-phosphate
  modified_base 7: mod_base = OTHER; note = 2'-fluoroguanosine-3'-phosphate
  modified_base 8: mod_base = OTHER; note = 2'-O-methylguanosine-3'-phosphate
  modified_base 9: mod_base = OTHER; note = 2'-fluoroadenosine-3'-phosphate
  modified_base 10: mod_base = OTHER; note = 2'-fluoroadenosine-3'-phosphate
  modified_base 11: mod_base = OTHER; note = 2'-fluoroadenosine-3'-phosphate
  modified_base 12: mod_base = OTHER; note = 2'-O-methylcytidine-3'-phosphate
  modified_base 13: mod_base = OTHER; note = 2'-O-methyluridine-3'-phosphate
  modified_base 14: mod_base = OTHER; note = 2'-O-methylcytidine-3'-phosphate
  modified_base 15: mod_base = OTHER; note = 2'-O-methyluridine-3'-phosphate
  modified_base 16: mod_base = OTHER; note = 2'-O-methylguanosine-3'-phosphate
  modified_base 17: mod_base = OTHER; note = 2'-O-methyladenosine-3'-phosphate
  modified_base 18: mod_base = OTHER; note = 2'-O-methyluridine-3'-phosphate
  modified_base 19: mod_base = OTHER; note = 2'-O-methylguanosine-3'-phosphate
  modified_base 20: mod_base = OTHER; note = 2'-O-methylguanosine-3'-phosphate
  modified_base 21: mod_base = OTHER; note = 2'-O-methyladenosine
caagttggaaactctgatgga

SEQ ID NO: 915 - RNA, 21 nt, synthetic construct
  source 1..21: mol_type = other RNA
  modified_base 1: mod_base = OTHER; note = 2'-O-methyladenosine-3'-phosphorothioate
  modified_base 2: mod_base = OTHER; note = 2'-O-methyladenosine-3'-phosphorothioate
  modified_base 3: mod_base = OTHER; note = 2'-O-methylguanosine-3'-phosphate
  modified_base 4: mod_base = OTHER; note = 2'-O-methyluridine-3'-phosphate
  modified_base 5: mod_base = OTHER; note = 2'-O-methyluridine-3'-phosphate
  modified_base 6: mod_base = OTHER; note = 2'-O-methylguanosine-3'-phosphate
  modified_base 7: mod_base = OTHER; note = 2'-fluoroguanosine-3'-phosphate
  modified_base 8: mod_base = OTHER; note = 2'-O-methyladenosine-3'-phosphate
  modified_base 9: mod_base = OTHER; note = 2'-fluoroadenosine-3'-phosphate
  modified_base 10: mod_base = OTHER; note = 2'-fluoroadenosine-3'-phosphate
  modified_base 11: mod_base = OTHER; note = 2'-fluorocytidine-3'-phosphate
  modified_base 12: mod_base = OTHER; note = 2'-O-methyluridine-3'-phosphate
  modified_base 13: mod_base = OTHER; note = 2'-O-methylcytidine-3'-phosphate
  modified_base 14: mod_base = OTHER; note = 2'-O-methyluridine-3'-phosphate
  modified_base 15: mod_base = OTHER; note = 2'-O-methylguanosine-3'-phosphate
  modified_base 16: mod_base = OTHER; note = 2'-O-methyladenosine-3'-phosphate
  modified_base 17: mod_base = OTHER; note = 2'-O-methyluridine-3'-phosphate
  modified_base 18: mod_base = OTHER; note = 2'-O-methylguanosine-3'-phosphate
  modified_base 19: mod_base = OTHER; note = 2'-O-methylguanosine-3'-phosphate
  modified_base 20: mod_base = OTHER; note = 2'-O-methyladenosine-3'-phosphate
  modified_base 21: mod_base = OTHER; note = 2'-O-methyladenosine
aagttggaaactctgatggaa

SEQ ID NO: 916 - RNA, 21 nt, synthetic construct
  source 1..21: mol_type = other RNA
  modified_base 1: mod_base = OTHER; note = 2'-O-methylguanosine-3'-phosphorothioate
  modified_base 2: mod_base = OTHER; note = 2'-O-methylguanosine-3'-phosphorothioate
  modified_base 3: mod_base = OTHER; note = 2'-O-methyladenosine-3'-phosphate
  modified_base 4: mod_base = OTHER; note = 2'-O-methyladenosine-3'-phosphate
  modified_base 5: mod_base = OTHER; note = 2'-O-methyladenosine-3'-phosphate
  modified_base 6: mod_base = OTHER; note = 2'-O-methylcytidine-3'-phosphate
  modified_base 7: mod_base = OTHER; note = 2'-fluorouridine-3'-phosphate
  modified_base 8: mod_base = OTHER; note = 2'-O-methylcytidine-3'-phosphate
  modified_base 9: mod_base = OTHER; note = 2'-fluorouridine-3'-phosphate
  modified_base 10: mod_base = OTHER; note = 2'-fluoroguanosine-3'-phosphate
  modified_base 11: mod_base = OTHER; note = 2'-fluoroadenosine-3'-phosphate
  modified_base 12: mod_base = OTHER; note = 2'-O-methyluridine-3'-phosphate
  modified_base 13: mod_base = OTHER; note = 2'-O-methylguanosine-3'-phosphate
  modified_base 14: mod_base = OTHER; note = 2'-O-methylguanosine-3'-phosphate
  modified_base 15: mod_base = OTHER; note = 2'-O-methyladenosine-3'-phosphate
  modified_base 16: mod_base = OTHER; note = 2'-O-methyladenosine-3'-phosphate
  modified_base 17: mod_base = OTHER; note = 2'-O-methyladenosine-3'-phosphate
  modified_base 18: mod_base = OTHER; note = 2'-O-methylcytidine-3'-phosphate
  modified_base 19: mod_base = OTHER; note = 2'-O-methyluridine-3'-phosphate
  modified_base 20: mod_base = OTHER; note = 2'-O-methylcytidine-3'-phosphate
  modified_base 21: mod_base = OTHER; note = 2'-O-methyladenosine
ggaaactctgatggaaactca

SEQ ID NO: 917 - RNA, 21 nt, synthetic construct
  source 1..21: mol_type = other RNA
  modified_base 1: mod_base = OTHER; note = 2'-O-methylguanosine-3'-phosphorothioate
  modified_base 2: mod_base = OTHER; note = 2'-O-methyladenosine-3'-phosphorothioate
  modified_base 3: mod_base = OTHER; note = 2'-O-methyladenosine-3'-phosphate
  modified_base 4: mod_base = OTHER; note = 2'-O-methyladenosine-3'-phosphate
  modified_base 5: mod_base = OTHER; note = 2'-O-methylcytidine-3'-phosphate
  modified_base 6: mod_base = OTHER; note = 2'-O-methyluridine-3'-phosphate
  modified_base 7: mod_base = OTHER; note = 2'-fluorocytidine-3'-phosphate
  modified_base 8: mod_base = OTHER; note = 2'-O-methyladenosine-3'-phosphate
  modified_base 9: mod_base = OTHER; note = 2'-fluorouridine-3'-phosphate
  modified_base 10: mod_base = OTHER; note = 2'-fluoroguanosine-3'-phosphate
  modified_base 11: mod_base = OTHER; note = 2'-fluoroadenosine-3'-phosphate
  modified_base 12: mod_base = OTHER; note = 2'-O-methylguanosine-3'-phosphate
  modified_base 13: mod_base = OTHER; note = 2'-O-methylcytidine-3'-phosphate
  modified_base 14: mod_base = OTHER; note = 2'-O-methylguanosine-3'-phosphate
  modified_base 15: mod_base = OTHER; note = 2'-O-methyluridine-3'-phosphate
  modified_base 16: mod_base = OTHER; note = 2'-O-methylguanosine-3'-phosphate
  modified_base 17: mod_base = OTHER; note = 2'-O-methylguanosine-3'-phosphate
  modified_base 18: mod_base = OTHER; note = 2'-O-methyluridine-3'-phosphate
  modified_base 19: mod_base = OTHER; note = 2'-O-methylguanosine-3'-phosphate
  modified_base 20: mod_base = OTHER; note = 2'-O-methyluridine-3'-phosphate
  modified_base 21: mod_base = OTHER; note = 2'-O-methyladenosine
gaaactcatgagcgtggtgta

SEQ ID NO: 918 - RNA, 21 nt, synthetic construct
  source 1..21: mol_type = other RNA
  modified_base 1: mod_base = OTHER; note = 2'-O-methyladenosine-3'-phosphorothioate
  modified_base 2: mod_base = OTHER; note = 2'-O-methyladenosine-3'-phosphorothioate
  modified_base 3: mod_base = OTHER; note = 2'-O-methylcytidine-3'-phosphate
  modified_base 4: mod_base = OTHER; note = 2'-O-methyluridine-3'-phosphate
  modified_base 5: mod_base = OTHER; note = 2'-O-methylcytidine-3'-phosphate
  modified_base 6: mod_base = OTHER; note = 2'-O-methyladenosine-3'-phosphate
  modified_base 7: mod_base = OTHER; note = 2'-fluorouridine-3'-phosphate
  modified_base 8: mod_base = OTHER; note = 2'-O-methylguanosine-3'-phosphate
  modified_base 9: mod_base = OTHER; note = 2'-fluoroadenosine-3'-phosphate
  modified_base 10: mod_base = OTHER; note = 2'-fluoroguanosine-3'-phosphate
  modified_base 11: mod_base = OTHER; note = 2'-fluorocytidine-3'-phosphate
  modified_base 12: mod_base = OTHER; note = 2'-O-methylguanosine-3'-phosphate
  modified_base 13: mod_base = OTHER; note = 2'-O-methyluridine-3'-phosphate
  modified_base 14: mod_base = OTHER; note = 2'-O-methylguanosine-3'-phosphate
  modified_base 15: mod_base = OTHER; note = 2'-O-methylguanosine-3'-phosphate
  modified_base 16: mod_base = OTHER; note = 2'-O-methyluridine-3'-phosphate
  modified_base 17: mod_base = OTHER; note = 2'-O-methylguanosine-3'-phosphate
  modified_base 18: mod_base = OTHER; note = 2'-O-methyluridine-3'-phosphate
  modified_base 19: mod_base = OTHER; note = 2'-O-methyladenosine-3'-phosphate
  modified_base 20: mod_base = OTHER; note = 2'-O-methyluridine-3'-phosphate
  modified_base 21: mod_base = OTHER; note = 2'-O-methyladenosine
aactcatgagcgtggtgtata

SEQ ID NO: 919 - RNA, 21 nt, synthetic construct
  source 1..21: mol_type = other RNA
  modified_base 1: mod_base = OTHER; note = 2'-O-methyladenosine-3'-phosphorothioate
  modified_base 2: mod_base = OTHER; note = 2'-O-methylcytidine-3'-phosphorothioate
  modified_base 3: mod_base = OTHER; note = 2'-O-methyluridine-3'-phosphate
  modified_base 4: mod_base = OTHER; note = 2'-O-methylcytidine-3'-phosphate
  modified_base 5: mod_base = OTHER; note = 2'-O-methyladenosine-3'-phosphate
  modified_base 6: mod_base = OTHER; note = 2'-O-methyluridine-3'-phosphate
  modified_base 7: mod_base = OTHER; note = 2'-fluoroguanosine-3'-phosphate
  modified_base 8: mod_base = OTHER; note = 2'-O-methyladenosine-3'-phosphate
  modified_base 9: mod_base = OTHER; note = 2'-fluoroguanosine-3'-phosphate
  modified_base 10: mod_base = OTHER; note = 2'-fluorocytidine-3'-phosphate
  modified_base 11: mod_base = OTHER; note = 2'-fluoroguanosine-3'-phosphate
  modified_base 12: mod_base = OTHER; note = 2'-O-methyluridine-3'-phosphate
  modified_base 13: mod_base = OTHER; note = 2'-O-methylguanosine-3'-phosphate
  modified_base 14: mod_base = OTHER; note = 2'-O-methylguanosine-3'-phosphate
  modified_base 15: mod_base = OTHER; note = 2'-O-methyluridine-3'-phosphate
  modified_base 16: mod_base = OTHER; note = 2'-O-methylguanosine-3'-phosphate
  modified_base 17: mod_base = OTHER; note = 2'-O-methyluridine-3'-phosphate
  modified_base 18: mod_base = OTHER; note = 2'-O-methyladenosine-3'-phosphate
  modified_base 19: mod_base = OTHER; note = 2'-O-methyluridine-3'-phosphate
  modified_base 20: mod_base = OTHER; note = 2'-O-methylcytidine-3'-phosphate
  modified_base 21: mod_base = OTHER; note = 2'-O-methyluridine
actcatgagcgtggtgtatct

SEQ ID NO: 920 - RNA, 21 nt, synthetic construct
  source 1..21: mol_type = other RNA
  modified_base 1: mod_base = OTHER; note = 2'-O-methyluridine-3'-phosphorothioate
  modified_base 2: mod_base = OTHER; note = 2'-O-methylcytidine-3'-phosphorothioate
  modified_base 3: mod_base = OTHER; note = 2'-O-methyladenosine-3'-phosphate
  modified_base 4: mod_base = OTHER; note = 2'-O-methyluridine-3'-phosphate
  modified_base 5: mod_base = OTHER; note = 2'-O-methylguanosine-3'-phosphate
  modified_base 6: mod_base = OTHER; note = 2'-O-methyladenosine-3'-phosphate
  modified_base 7: mod_base = OTHER; note = 2'-fluoroguanosine-3'-phosphate
  modified_base 8: mod_base = OTHER; note = 2'-O-methylcytidine-3'-phosphate
  modified_base 9: mod_base = OTHER; note = 2'-fluoroguanosine-3'-phosphate
  modified_base 10: mod_base = OTHER; note = 2'-fluorouridine-3'-phosphate
  modified_base 11: mod_base = OTHER; note = 2'-fluoroguanosine-3'-phosphate
  modified_base 12: mod_base = OTHER; note = 2'-O-methylguanosine-3'-phosphate
  modified_base 13: mod_base = OTHER; note = 2'-O-methyluridine-3'-phosphate
  modified_base 14: mod_base = OTHER; note = 2'-O-methylguanosine-3'-phosphate
  modified_base 15: mod_base = OTHER; note = 2'-O-methyluridine-3'-phosphate
  modified_base 16: mod_base = OTHER; note = 2'-O-methyladenosine-3'-phosphate
  modified_base 17: mod_base = OTHER; note = 2'-O-methyluridine-3'-phosphate
  modified_base 18: mod_base = OTHER; note = 2'-O-methylcytidine-3'-phosphate
  modified_base 19: mod_base = OTHER; note = 2'-O-methyluridine-3'-phosphate
  modified_base 20: mod_base = OTHER; note = 2'-O-methyladenosine-3'-phosphate
  modified_base 21: mod_base = OTHER; note = 2'-O-methyluridine
tcatgagcgtggtgtatctat

SEQ ID NO: 921 - RNA, 21 nt, synthetic construct
  source 1..21: mol_type = other RNA
  modified_base 1: mod_base = OTHER; note = 2'-O-methyladenosine-3'-phosphorothioate
  modified_base 2: mod_base = OTHER; note = 2'-O-methyluridine-3'-phosphorothioate
  modified_base 3: mod_base = OTHER; note = 2'-O-methylguanosine-3'-phosphate
  modified_base 4: mod_base = OTHER; note = 2'-O-methyladenosine-3'-phosphate
  modified_base 5: mod_base = OTHER; note = 2'-O-methylguanosine-3'-phosphate
  modified_base 6: mod_base = OTHER; note = 2'-O-methylcytidine-3'-phosphate
  modified_base 7: mod_base = OTHER; note = 2'-fluoroguanosine-3'-phosphate
  modified_base 8: mod_base = OTHER; note = 2'-O-methyluridine-3'-phosphate
  modified_base 9: mod_base = OTHER; note = 2'-fluoroguanosine-3'-phosphate
  modified_base 10: mod_base = OTHER; note = 2'-fluoroguanosine-3'-phosphate
  modified_base 11: mod_base = OTHER; note = 2'-fluorouridine-3'-phosphate
  modified_base 12: mod_base = OTHER; note = 2'-O-methylguanosine-3'-phosphate
  modified_base 13: mod_base = OTHER; note = 2'-O-methyluridine-3'-phosphate
  modified_base 14: mod_base = OTHER; note = 2'-O-methyladenosine-3'-phosphate
  modified_base 15: mod_base = OTHER; note = 2'-O-methyluridine-3'-phosphate
  modified_base 16: mod_base = OTHER; note = 2'-O-methylcytidine-3'-phosphate
  modified_base 17: mod_base = OTHER; note = 2'-O-methyluridine-3'-phosphate
  modified_base 18: mod_base = OTHER; note = 2'-O-methyladenosine-3'-phosphate
  modified_base 19: mod_base = OTHER; note = 2'-O-methyluridine-3'-phosphate
  modified_base 20: mod_base = OTHER; note = 2'-O-methyluridine-3'-phosphate
  modified_base 21: mod_base = OTHER; note = 2'-O-methyladenosine
atgagcgtggtgtatctatta

SEQ ID NO: 922 - RNA, 21 nt, synthetic construct
  source 1..21: mol_type = other RNA
  modified_base 1: mod_base = OTHER; note = 2'-O-methyluridine-3'-phosphorothioate
  modified_base 2: mod_base = OTHER; note = 2'-O-methylguanosine-3'-phosphorothioate
  modified_base 3: mod_base = OTHER; note = 2'-O-methyladenosine-3'-phosphate
  modified_base 4: mod_base = OTHER; note = 2'-O-methylguanosine-3'-phosphate
  modified_base 5: mod_base = OTHER; note = 2'-O-methylcytidine-3'-phosphate
  modified_base 6: mod_base = OTHER; note = 2'-O-methylguanosine-3'-phosphate
  modified_base 7: mod_base = OTHER; note = 2'-fluorouridine-3'-phosphate
  modified_base 8: mod_base = OTHER; note = 2'-O-methylguanosine-3'-phosphate
  modified_base 9: mod_base = OTHER; note = 2'-fluoroguanosine-3'-phosphate
  modified_base 10: mod_base = OTHER; note = 2'-fluorouridine-3'-phosphate
  modified_base 11: mod_base = OTHER; note = 2'-fluoroguanosine-3'-phosphate
  modified_base 12: mod_base = OTHER; note = 2'-O-methyluridine-3'-phosphate
  modified_base 13: mod_base = OTHER; note = 2'-O-methyladenosine-3'-phosphate
  modified_base 14: mod_base = OTHER; note = 2'-O-methyluridine-3'-phosphate
  modified_base 15: mod_base = OTHER; note = 2'-O-methylcytidine-3'-phosphate
  modified_base 16: mod_base = OTHER; note = 2'-O-methyluridine-3'-phosphate
  modified_base 17: mod_base = OTHER; note = 2'-O-methyladenosine-3'-phosphate
  modified_base 18: mod_base = OTHER; note = 2'-O-methyluridine-3'-phosphate
  modified_base 19: mod_base = OTHER; note = 2'-O-methyluridine-3'-phosphate
  modified_base 20: mod_base = OTHER; note = 2'-O-methylcytidine-3'-phosphate
  modified_base 21: mod_base = OTHER; note = 2'-O-methyladenosine
tgagcgtggtgtatctattca

SEQ ID NO: 923 - RNA, 21 nt, synthetic construct
  source 1..21: mol_type = other RNA
  modified_base 1: mod_base = OTHER; note = 2'-O-methylguanosine-3'-phosphorothioate
  modified_base 2: mod_base = OTHER; note = 2'-O-methyladenosine-3'-phosphorothioate
  modified_base 3: mod_base = OTHER; note = 2'-O-methylguanosine-3'-phosphate
  modified_base 4: mod_base = OTHER; note = 2'-O-methylcytidine-3'-phosphate
  modified_base 5: mod_base = OTHER; note = 2'-O-methylguanosine-3'-phosphate
  modified_base 6: mod_base = OTHER; note = 2'-O-methyluridine-3'-phosphate
  modified_base 7: mod_base = OTHER; note = 2'-fluoroguanosine-3'-phosphate
  modified_base 8: mod_base = OTHER; note = 2'-O-methylguanosine-3'-phosphate
  modified_base 9: mod_base = OTHER; note = 2'-fluorouridine-3'-phosphate
  modified_base 10: mod_base = OTHER; note = 2'-fluoroguanosine-3'-phosphate
  modified_base 11: mod_base = OTHER; note = 2'-fluorouridine-3'-phosphate
  modified_base 12: mod_base = OTHER; note = 2'-O-methyladenosine-3'-phosphate
  modified_base 13: mod_base = OTHER; note = 2'-O-methyluridine-3'-phosphate
  modified_base 14: mod_base = OTHER; note = 2'-O-methylcytidine-3'-phosphate
  modified_base 15: mod_base = OTHER; note = 2'-O-methyluridine-3'-phosphate
  modified_base 16: mod_base = OTHER; note = 2'-O-methyladenosine-3'-phosphate
  modified_base 17: mod_base = OTHER; note = 2'-O-methyluridine-3'-phosphate
  modified_base 18: mod_base = OTHER; note = 2'-O-methyluridine-3'-phosphate
  modified_base 19: mod_base = OTHER; note = 2'-O-methylcytidine-3'-phosphate
  modified_base 20: mod_base = OTHER; note = 2'-O-methylguanosine-3'-phosphate
  modified_base 21: mod_base = OTHER; note = 2'-O-methyladenosine
gagcgtggtgtatctattcga

SEQ ID NO: 924 - RNA, 21 nt, synthetic construct
  source 1..21: mol_type = other RNA
  modified_base 1: mod_base = OTHER; note = 2'-O-methyladenosine-3'-phosphorothioate
  modified_base 2: mod_base = OTHER; note = 2'-O-methylcytidine-3'-phosphorothioate
  modified_base 3: mod_base = OTHER; note = 2'-O-methylcytidine-3'-phosphate
  modified_base 4: mod_base = OTHER; note = 2'-O-methyluridine-3'-phosphate
  modified_base 5: mod_base = OTHER; note = 2'-O-methyladenosine-3'-phosphate
  modified_base 6: mod_base = OTHER; note = 2'-O-methylcytidine-3'-phosphate
  modified_base 7: mod_base = OTHER; note = 2'-fluorocytidine-3'-phosphate
  modified_base 8: mod_base = OTHER; note = 2'-O-methyluridine-3'-phosphate
  modified_base 9: mod_base = OTHER; note = 2'-fluorouridine-3'-phosphate
  modified_base 10: mod_base = OTHER; note = 2'-fluoroadenosine-3'-phosphate
  modified_base 11: mod_base = OTHER; note = 2'-fluorocytidine-3'-phosphate
  modified_base 12: mod_base = OTHER; note = 2'-O-methyladenosine-3'-phosphate
  modified_base 13: mod_base = OTHER; note = 2'-O-methylguanosine-3'-phosphate
  modified_base 14: mod_base = OTHER; note = 2'-O-methylguanosine-3'-phosphate
  modified_base 15: mod_base = OTHER; note = 2'-O-methylguanosine-3'-phosphate
  modified_base 16: mod_base = OTHER; note = 2'-O-methyladenosine-3'-phosphate
  modified_base 17: mod_base = OTHER; note = 2'-O-methyluridine-3'-phosphate
  modified_base 18: mod_base = OTHER; note = 2'-O-methyluridine-3'-phosphate
  modified_base 19: mod_base = OTHER; note = 2'-O-methyladenosine-3'-phosphate
  modified_base 20: mod_base = OTHER; note = 2'-O-methyluridine-3'-phosphate
  modified_base 21: mod_base = OTHER; note = 2'-O-methyladenosine
acctaccttacagggattata

SEQ ID NO: 925 - RNA, 21 nt, synthetic construct
  source 1..21: mol_type = other RNA
  modified_base 1: mod_base = OTHER; note = 2'-O-methylcytidine-3'-phosphorothioate
  modified_base 2: mod_base = OTHER; note = 2'-O-methyluridine-3'-phosphorothioate
  modified_base 3: mod_base = OTHER; note = 2'-O-methyladenosine-3'-phosphate
  modified_base 4: mod_base = OTHER; note = 2'-O-methylcytidine-3'-phosphate
  modified_base 5: mod_base = OTHER; note = 2'-O-methylcytidine-3'-phosphate
  modified_base 6: mod_base = OTHER; note = 2'-O-methyluridine-3'-phosphate
  modified_base 7: mod_base = OTHER; note = 2'-fluorouridine-3'-phosphate
  modified_base 8: mod_base = OTHER; note = 2'-O-methyladenosine-3'-phosphate
  modified_base 9: mod_base = OTHER; note = 2'-fluorocytidine-3'-phosphate
  modified_base 10: mod_base = OTHER; note = 2'-fluoroadenosine-3'-phosphate
  modified_base 11: mod_base = OTHER; note = 2'-fluoroguanosine-3'-phosphate
  modified_base 12: mod_base = OTHER; note = 2'-O-methylguanosine-3'-phosphate
  modified_base 13: mod_base = OTHER; note = 2'-O-methylguanosine-3'-phosphate
  modified_base 14: mod_base = OTHER; note = 2'-O-methyladenosine-3'-phosphate
  modified_base 15: mod_base = OTHER; note = 2'-O-methyluridine-3'-phosphate
  modified_base 16: mod_base = OTHER; note = 2'-O-methyluridine-3'-phosphate
  modified_base 17: mod_base = OTHER; note = 2'-O-methyladenosine-3'-phosphate
  modified_base 18: mod_base = OTHER; note = 2'-O-methyluridine-3'-phosphate
  modified_base 19: mod_base = OTHER; note = 2'-O-methyladenosine-3'-phosphate
  modified_base 20: mod_base = OTHER; note = 2'-O-methyladenosine-3'-phosphate
  modified_base 21: mod_base = OTHER; note = 2'-O-methyluridine
ctaccttacagggattataat

SEQ ID NO: 926 - RNA, 21 nt, synthetic construct
  source 1..21: mol_type = other RNA
  modified_base 1: mod_base = OTHER; note = 2'-O-methyluridine-3'-phosphorothioate
  modified_base 2: mod_base = OTHER; note = 2'-O-methyladenosine-3'-phosphorothioate
  modified_base 3: mod_base = OTHER; note = 2'-O-methylcytidine-3'-phosphate
  modified_base 4: mod_base = OTHER; note = 2'-O-methyladenosine-3'-phosphate
  modified_base 5: mod_base = OTHER; note = 2'-O-methylguanosine-3'-phosphate
  modified_base 6: mod_base = OTHER; note = 2'-O-methylguanosine-3'-phosphate
  modified_base 7: mod_base = OTHER; note = 2'-fluoroguanosine-3'-phosphate
  modified_base 8: mod_base = OTHER; note = 2'-O-methyladenosine-3'-phosphate
  modified_base 9: mod_base = OTHER; note = 2'-fluorouridine-3'-phosphate
  modified_base 10: mod_base = OTHER; note = 2'-fluorouridine-3'-phosphate
  modified_base 11: mod_base = OTHER; note = 2'-fluoroadenosine-3'-phosphate
  modified_base 12: mod_base = OTHER; note = 2'-O-methyluridine-3'-phosphate
  modified_base 13: mod_base = OTHER; note = 2'-O-methyladenosine-3'-phosphate
  modified_base 14: mod_base = OTHER; note = 2'-O-methyladenosine-3'-phosphate
  modified_base 15: mod_base = OTHER; note = 2'-O-methyluridine-3'-phosphate
  modified_base 16: mod_base = OTHER; note = 2'-O-methyluridine-3'-phosphate
  modified_base 17: mod_base = OTHER; note = 2'-O-methyladenosine-3'-phosphate
  modified_base 18: mod_base = OTHER; note = 2'-O-methylcytidine-3'-phosphate
  modified_base 19: mod_base = OTHER; note = 2'-O-methyluridine-3'-phosphate
  modified_base 20: mod_base = OTHER; note = 2'-O-methylcytidine-3'-phosphate
  modified_base 21: mod_base = OTHER; note = 2'-O-methyladenosine
tacagggattataattactca

SEQ ID NO: 927 - RNA, 21 nt, synthetic construct
  source 1..21: mol_type = other RNA
  modified_base 1: mod_base = OTHER; note = 2'-O-methyladenosine-3'-phosphorothioate
  modified_base 2: mod_base = OTHER; note = 2'-O-methylguanosine-3'-phosphorothioate
  modified_base 3: mod_base = OTHER; note = 2'-O-methylcytidine-3'-phosphate
  modified_base 4: mod_base = OTHER; note = 2'-O-methyladenosine-3'-phosphate
  modified_base 5: mod_base = OTHER; note = 2'-O-methylguanosine-3'-phosphate
  modified_base 6: mod_base = OTHER; note = 2'-O-methylcytidine-3'-phosphate
  modified_base 7: mod_base = OTHER; note = 2'-fluorocytidine-3'-phosphate
  modified_base 8: mod_base = OTHER; note = 2'-O-methylguanosine-3'-phosphate
  modified_base 9: mod_base = OTHER; note = 2'-fluoroadenosine-3'-phosphate
  modified_base 10: mod_base = OTHER; note = 2'-fluoroguanosine-3'-phosphate
  modified_base 11: mod_base = OTHER; note = 2'-fluorouridine-3'-phosphate
  modified_base 12: mod_base = OTHER; note = 2'-O-methylcytidine-3'-phosphate
  modified_base 13: mod_base = OTHER; note = 2'-O-methylcytidine-3'-phosphate
  modified_base 14: mod_base = OTHER; note = 2'-O-methyluridine-3'-phosphate
  modified_base 15: mod_base = OTHER; note = 2'-O-methyluridine-3'-phosphate
  modified_base 16: mod_base = OTHER; note = 2'-O-methylguanosine-3'-phosphate
  modified_base 17: mod_base = OTHER; note = 2'-O-methylcytidine-3'-phosphate
  modified_base 18: mod_base = OTHER; note = 2'-O-methyladenosine-3'-phosphate
  modified_base 19: mod_base = OTHER; note = 2'-O-methylguanosine-3'-phosphate
  modified_base 20: mod_base = OTHER; note = 2'-O-methyladenosine-3'-phosphate
  modified_base 21: mod_base = OTHER; note = 2'-O-methyluridine
agcagccgagtccttgcagat

SEQ ID NO: 928 - RNA, 21 nt, synthetic construct
  source 1..21: mol_type = other RNA
  modified_base 1: mod_base = OTHER; note = 2'-O-methyluridine-3'-phosphorothioate
  modified_base 2: mod_base = OTHER; note = 2'-O-methyluridine-3'-phosphorothioate
  modified_base 3: mod_base = OTHER; note = 2'-O-methylguanosine-3'-phosphate
  modified_base 4: mod_base = OTHER; note = 2'-O-methylcytidine-3'-phosphate
  modified_base 5: mod_base = OTHER; note = 2'-O-methyladenosine-3'-phosphate
  modified_base 6: mod_base = OTHER; note = 2'-O-methylguanosine-3'-phosphate
  modified_base 7: mod_base = OTHER; note = 2'-fluoroadenosine-3'-phosphate
  modified_base 8: mod_base = OTHER; note = 2'-O-methyluridine-3'-phosphate
  modified_base 9: mod_base = OTHER; note = 2'-fluoroguanosine-3'-phosphate
  modified_base 10: mod_base = OTHER; note = 2'-fluoroguanosine-3'-phosphate
  modified_base 11: mod_base = OTHER; note = 2'-fluoroguanosine-3'-phosphate
  modified_base 12: mod_base = OTHER; note = 2'-O-methyladenosine-3'-phosphate
  modified_base 13: mod_base = OTHER; note = 2'-O-methyluridine-3'-phosphate
  modified_base 14: mod_base = OTHER; note = 2'-O-methylguanosine-3'-phosphate
  modified_base 15: mod_base = OTHER; note = 2'-O-methyladenosine-3'-phosphate
  modified_base 16: mod_base = OTHER; note = 2'-O-methylcytidine-3'-phosphate
  modified_base 17: mod_base = OTHER; note = 2'-O-methyluridine-3'-phosphate
  modified_base 18: mod_base = OTHER; note = 2'-O-methylcytidine-3'-phosphate
  modified_base 19: mod_base = OTHER; note = 2'-O-methylguanosine-3'-phosphate
  modified_base 20: mod_base = OTHER; note = 2'-O-methyluridine-3'-phosphate
  modified_base 21: mod_base = OTHER; note = 2'-O-methyladenosine
ttgcagatgggatgactcgta

SEQ ID NO: 929 - RNA, 21 nt, synthetic construct
  source 1..21: mol_type = other RNA
  modified_base 1: mod_base = OTHER; note = 2'-O-methyluridine-3'-phosphorothioate
  modified_base 2: mod_base = OTHER; note = 2'-O-methylguanosine-3'-phosphorothioate
  modified_base 3: mod_base = OTHER; note = 2'-O-methylcytidine-3'-phosphate
  modified_base 4: mod_base = OTHER; note = 2'-O-methyladenosine-3'-phosphate
  modified_base 5: mod_base = OTHER; note = 2'-O-methylguanosine-3'-phosphate
  modified_base 6: mod_base = OTHER; note = 2'-O-methyladenosine-3'-phosphate
  modified_base 7: mod_base = OTHER; note = 2'-fluorouridine-3'-phosphate
  modified_base 8: mod_base = OTHER; note = 2'-O-methylguanosine-3'-phosphate
  modified_base 9: mod_base = OTHER; note = 2'-fluoroguanosine-3'-phosphate
  modified_base 10: mod_base = OTHER; note = 2'-fluoroguanosine-3'-phosphate
  modified_base 11: mod_base = OTHER; note = 2'-fluoroadenosine-3'-phosphate
  modified_base 12: mod_base = OTHER; note = 2'-O-methyluridine-3'-phosphate
  modified_base 13: mod_base = OTHER; note = 2'-O-methylguanosine-3'-phosphate
  modified_base 14: mod_base = OTHER; note = 2'-O-methyladenosine-3'-phosphate
  modified_base 15: mod_base = OTHER; note = 2'-O-methylcytidine-3'-phosphate
  modified_base 16: mod_base = OTHER; note = 2'-O-methyluridine-3'-phosphate
  modified_base 17: mod_base = OTHER; note = 2'-O-methylcytidine-3'-phosphate
  modified_base 18: mod_base = OTHER; note = 2'-O-methylguanosine-3'-phosphate
  modified_base 19: mod_base = OTHER; note = 2'-O-methyluridine-3'-phosphate
  modified_base 20: mod_base = OTHER; note = 2'-O-methylguanosine-3'-phosphate
  modified_base 21: mod_base = OTHER; note = 2'-O-methyladenosine
tgcagatgggatgactcgtga

SEQ ID NO: 930 - RNA, 21 nt, synthetic construct
  source 1..21: mol_type = other RNA
  modified_base 1: mod_base = OTHER; note = 2'-O-methylcytidine-3'-phosphorothioate
  modified_base 2: mod_base = OTHER; note = 2'-O-methyladenosine-3'-phosphorothioate
  modified_base 3: mod_base = OTHER; note = 2'-O-methylguanosine-3'-phosphate
  modified_base 4: mod_base = OTHER; note = 2'-O-methyladenosine-3'-phosphate
  modified_base 5: mod_base = OTHER; note = 2'-O-methyluridine-3'-phosphate
  modified_base 6: mod_base = OTHER; note = 2'-O-methylguanosine-3'-phosphate
  modified_base 7: mod_base = OTHER; note = 2'-fluoroguanosine-3'-phosphate
  modified_base 8: mod_base = OTHER; note = 2'-O-methylguanosine-3'-phosphate
  modified_base 9: mod_base = OTHER; note = 2'-fluoroadenosine-3'-phosphate
  modified_base 10: mod_base = OTHER; note = 2'-fluorouridine-3'-phosphate
  modified_base 11: mod_base = OTHER; note = 2'-fluoroguanosine-3'-phosphate
  modified_base 12: mod_base = OTHER; note = 2'-O-methyladenosine-3'-phosphate
  modified_base 13: mod_base = OTHER; note = 2'-O-methylcytidine-3'-phosphate
  modified_base 14: mod_base = OTHER; note = 2'-O-methyluridine-3'-phosphate
  modified_base 15: mod_base = OTHER; note = 2'-O-methylcytidine-3'-phosphate
  modified_base 16: mod_base = OTHER; note = 2'-O-methylguanosine-3'-phosphate
  modified_base 17: mod_base = OTHER; note = 2'-O-methyluridine-3'-phosphate
  modified_base 18: mod_base = OTHER; note = 2'-O-methylguanosine-3'-phosphate
  modified_base 19: mod_base = OTHER; note = 2'-O-methylguanosine-3'-phosphate
  modified_base 20: mod_base = OTHER; note = 2'-O-methylcytidine-3'-phosphate
  modified_base 21: mod_base = OTHER; note = 2'-O-methyladenosine
cagatgggatgactcgtggca

SEQ ID NO: 931 - RNA, 21 nt, synthetic construct
  source 1..21: mol_type = other RNA
  modified_base 1: mod_base = OTHER; note = 2'-O-methyladenosine-3'-phosphorothioate
  modified_base 2: mod_base = OTHER; note = 2'-O-methylguanosine-3'-phosphorothioate
  modified_base 3: mod_base = OTHER; note = 2'-O-methyladenosine-3'-phosphate
  modified_base 4: mod_base = OTHER; note = 2'-O-methyluridine-3'-phosphate
  modified_base 5: mod_base = OTHER; note = 2'-O-methylguanosine-3'-phosphate
  modified_base 6: mod_base = OTHER; note = 2'-O-methylguanosine-3'-phosphate
  modified_base 7: mod_base = OTHER; note = 2'-fluoroguanosine-3'-phosphate
  modified_base 8: mod_base = OTHER; note = 2'-O-methyladenosine-3'-phosphate
  modified_base 9: mod_base = OTHER; note = 2'-fluorouridine-3'-phosphate
  modified_base 10: mod_base = OTHER; note = 2'-fluoroguanosine-3'-phosphate
  modified_base 11: mod_base = OTHER; note = 2'-fluoroadenosine-3'-phosphate
  modified_base 12: mod_base = OTHER; note = 2'-O-methylcytidine-3'-phosphate
  modified_base 13: mod_base = OTHER; note = 2'-O-methyluridine-3'-phosphate
  modified_base 14: mod_base = OTHER; note = 2'-O-methylcytidine-3'-phosphate
  modified_base 15: mod_base = OTHER; note = 2'-O-methylguanosine-3'-phosphate
  modified_base 16: mod_base = OTHER; note = 2'-O-methyluridine-3'-phosphate
  modified_base 17: mod_base = OTHER; note = 2'-O-methylguanosine-3'-phosphate
  modified_base 18: mod_base = OTHER; note = 2'-O-methylguanosine-3'-phosphate
  modified_base 19: mod_base = OTHER; note = 2'-O-methylcytidine-3'-phosphate
  modified_base 20: mod_base = OTHER; note = 2'-O-methylcytidine-3'-phosphate
  modified_base 21: mod_base = OTHER; note = 2'-O-methyladenosine
agatgggatgactcgtggcca

SEQ ID NO: 932 - RNA, 21 nt, synthetic construct
  source 1..21: mol_type = other RNA
  modified_base 1: mod_base = OTHER; note = 2'-O-methyladenosine-3'-phosphorothioate
  modified_base 2: mod_base = OTHER; note = 2'-O-methylcytidine-3'-phosphorothioate
  modified_base 3: mod_base = OTHER; note = 2'-O-methyluridine-3'-phosphate
  modified_base 4: mod_base = OTHER; note = 2'-O-methylcytidine-3'-phosphate
  modified_base 5: mod_base = OTHER; note = 2'-O-methylguanosine-3'-phosphate
  modified_base 6: mod_base = OTHER; note = 2'-O-methyluridine-3'-phosphate
  modified_base 7: mod_base = OTHER; note = 2'-fluoroguanosine-3'-phosphate
  modified_base 8: mod_base = OTHER; note = 2'-O-methylguanosine-3'-phosphate
  modified_base 9: mod_base = OTHER; note = 2'-fluorocytidine-3'-phosphate
  modified_base 10: mod_base = OTHER; note = 2'-fluorocytidine-3'-phosphate
  modified_base 11: mod_base = OTHER; note = 2'-fluorocytidine-3'-phosphate
  modified_base 12: mod_base = OTHER; note = 2'-O-methyladenosine-3'-phosphate
  modified_base 13: mod_base = OTHER; note = 2'-O-methylguanosine-3'-phosphate
  modified_base 14: mod_base = OTHER; note = 2'-O-methyluridine-3'-phosphate
  modified_base 15: mod_base = OTHER; note = 2'-O-methyluridine-3'-phosphate
  modified_base 16: mod_base = OTHER; note = 2'-O-methylguanosine-3'-phosphate
  modified_base 17: mod_base = OTHER; note = 2'-O-methyluridine-3'-phosphate
  modified_base 18: mod_base = OTHER; note = 2'-O-methylguanosine-3'-phosphate
  modified_base 19: mod_base = OTHER; note = 2'-O-methylcytidine-3'-phosphate
  modified_base 20: mod_base = OTHER; note = 2'-O-methylguanosine-3'-phosphate
  modified_base 21: mod_base = OTHER; note = 2'-O-methyluridine
actcgtggcccagttgtgcgt

SEQ ID NO: 933 - RNA, 21 nt, synthetic construct
  source 1..21: mol_type = other RNA
  modified_base 1: mod_base = OTHER; note = 2'-O-methylcytidine-3'-phosphorothioate
  modified_base 2: mod_base = OTHER; note = 2'-O-methylcytidine-3'-phosphorothioate
  modified_base 3: mod_base = OTHER; note = 2'-O-methyladenosine-3'-phosphate
  modified_base 4: mod_base = OTHER; note = 2'-O-methylguanosine-3'-phosphate
  modified_base 5: mod_base = OTHER; note = 2'-O-methyluridine-3'-phosphate
  modified_base 6: mod_base = OTHER; note = 2'-O-methyluridine-3'-phosphate
  modified_base 7: mod_base = OTHER; note = 2'-fluoroguanosine-3'-phosphate
  modified_base 8: mod_base = OTHER; note = 2'-O-methyluridine-3'-phosphate
  modified_base 9: mod_base = OTHER; note = 2'-fluoroguanosine-3'-phosphate
  modified_base 10: mod_base = OTHER; note = 2'-fluorocytidine-3'-phosphate
  modified_base 11: mod_base = OTHER; note = 2'-fluoroguanosine-3'-phosphate
  modified_base 12: mod_base = OTHER; note = 2'-O-methyluridine-3'-phosphate
  modified_base 13: mod_base = OTHER; note = 2'-O-methylcytidine-3'-phosphate
  modified_base 14: mod_base = OTHER; note = 2'-O-methyluridine-3'-phosphate
  modified_base 15: mod_base = OTHER; note = 2'-O-methyluridine-3'-phosphate
  modified_base 16: mod_base = OTHER; note = 2'-O-methylcytidine-3'-phosphate
  modified_base 17: mod_base = OTHER; note = 2'-O-methylcytidine-3'-phosphate
  modified_base 18: mod_base = OTHER; note = 2'-O-methyladenosine-3'-phosphate
  modified_base 19: mod_base = OTHER; note = 2'-O-methylcytidine-3'-phosphate
  modified_base 20: mod_base = OTHER; note = 2'-O-methylguanosine-3'-phosphate
  modified_base 21: mod_base = OTHER; note = 2'-O-methyluridine
ccagttgtgcgtcttccacgt

SEQ ID NO: 934 - RNA, 21 nt, synthetic construct
  source 1..21: mol_type = other RNA
  modified_base 1: mod_base = OTHER; note = 2'-O-methylguanosine-3'-phosphorothioate
  modified_base 2: mod_base = OTHER; note = 2'-O-methyluridine-3'-phosphorothioate
  modified_base 3: mod_base = OTHER; note = 2'-O-methyluridine-3'-phosphate
  modified_base 4: mod_base = OTHER; note = 2'-O-methylguanosine-3'-phosphate
  modified_base 5: mod_base = OTHER; note = 2'-O-methyluridine-3'-phosphate
  modified_base 6: mod_base = OTHER; note = 2'-O-methylguanosine-3'-phosphate
  modified_base 7: mod_base = OTHER; note = 2'-fluorocytidine-3'-phosphate
  modified_base 8: mod_base = OTHER; note = 2'-O-methylguanosine-3'-phosphate
  modified_base 9: mod_base = OTHER; note = 2'-fluorouridine-3'-phosphate
  modified_base 10: mod_base = OTHER; note = 2'-fluorocytidine-3'-phosphate
  modified_base 11: mod_base = OTHER; note = 2'-fluorouridine-3'-phosphate
  modified_base 12: mod_base = OTHER; note = 2'-O-methyluridine-3'-phosphate
  modified_base 13: mod_base = OTHER; note = 2'-O-methylcytidine-3'-phosphate
  modified_base 14: mod_base = OTHER; note = 2'-O-methylcytidine-3'-phosphate
  modified_base 15: mod_base = OTHER; note = 2'-O-methyladenosine-3'-phosphate
  modified_base 16: mod_base = OTHER; note = 2'-O-methylcytidine-3'-phosphate
  modified_base 17: mod_base = OTHER; note = 2'-O-methylguanosine-3'-phosphate
  modified_base 18: mod_base = OTHER; note = 2'-O-methyluridine-3'-phosphate
  modified_base 19: mod_base = OTHER; note = 2'-O-methylguanosine-3'-phosphate
  modified_base 20: mod_base = OTHER; note = 2'-O-methylcytidine-3'-phosphate
  modified_base 21: mod_base = OTHER; note = 2'-O-methyluridine
gttgtgcgtcttccacgtgct

SEQ ID NO: 935 - RNA, 21 nt, synthetic construct
  source 1..21: mol_type = other RNA
  modified_base 1: mod_base = OTHER; note = 2'-O-methyladenosine-3'-phosphorothioate
  modified_base 2: mod_base = OTHER; note = 2'-O-methylguanosine-3'-phosphorothioate
  modified_base 3: mod_base = OTHER; note = 2'-O-methyluridine-3'-phosphate
  modified_base 4: mod_base = OTHER; note = 2'-O-methylguanosine-3'-phosphate
  modified_base 5: mod_base = OTHER; note = 2'-O-methyladenosine-3'-phosphate
  modified_base 6: mod_base = OTHER; note = 2'-O-methyladenosine-3'-phosphate
  modified_base 7: mod_base = OTHER; note = 2'-fluoroadenosine-3'-phosphate
  modified_base 8: mod_base = OTHER; note = 2'-O-methylguanosine-3'-phosphate
  modified_base 9: mod_base = OTHER; note = 2'-fluorocytidine-3'-phosphate
  modified_base 10: mod_base = OTHER; note = 2'-fluorocytidine-3'-phosphate
  modified_base 11: mod_base = OTHER; note = 2'-fluorouridine-3'-phosphate
  modified_base 12: mod_base = OTHER; note = 2'-O-methylguanosine-3'-phosphate
  modified_base 13: mod_base = OTHER; note = 2'-O-methylguanosine-3'-phosphate
  modified_base 14: mod_base = OTHER; note = 2'-O-methylcytidine-3'-phosphate
  modified_base 15: mod_base = OTHER; note = 2'-O-methyluridine-3'-phosphate
  modified_base 16: mod_base = OTHER; note = 2'-O-methylcytidine-3'-phosphate
  modified_base 17: mod_base = OTHER; note = 2'-O-methylguanosine-3'-phosphate
  modified_base 18: mod_base = OTHER; note = 2'-O-methyladenosine-3'-phosphate
  modified_base 19: mod_base = OTHER; note = 2'-O-methyladenosine-3'-phosphate
  modified_base 20: mod_base = OTHER; note = 2'-O-methyladenosine-3'-phosphate
  modified_base 21: mod_base = OTHER; note = 2'-O-methyladenosine
agtgaaagcctggctcgaaaa

SEQ ID NO: 936 - RNA, 21 nt, synthetic construct
  source 1..21: mol_type = other RNA
  modified_base 1: mod_base = OTHER; note = 2'-O-methylcytidine-3'-phosphorothioate
  modified_base 2: mod_base = OTHER; note = 2'-O-methyluridine-3'-phosphorothioate
  modified_base 3: mod_base = OTHER; note = 2'-O-methylguanosine-3'-phosphate
  modified_base 4: mod_base = OTHER; note = 2'-O-methylguanosine-3'-phosphate
  modified_base 5: mod_base = OTHER; note = 2'-O-methylcytidine-3'-phosphate
  modified_base 6: mod_base = OTHER; note = 2'-O-methyluridine-3'-phosphate
  modified_base 7: mod_base = OTHER; note = 2'-fluorocytidine-3'-phosphate
  modified_base 8: mod_base = OTHER; note = 2'-O-methylguanosine-3'-phosphate
  modified_base 9: mod_base = OTHER; note = 2'-fluoroadenosine-3'-phosphate
  modified_base 10: mod_base = OTHER; note = 2'-fluoroadenosine-3'-phosphate
  modified_base 11: mod_base = OTHER; note = 2'-fluoroadenosine-3'-phosphate
  modified_base 12: mod_base = OTHER; note = 2'-O-methylcytidine-3'-phosphate
  modified_base 13: mod_base = OTHER; note = 2'-O-methyladenosine-3'-phosphate
  modified_base 14: mod_base = OTHER; note = 2'-O-methyluridine-3'-phosphate
  modified_base 15: mod_base = OTHER; note = 2'-O-methylcytidine-3'-phosphate
  modified_base 16: mod_base = OTHER; note = 2'-O-methyluridine-3'-phosphate
  modified_base 17: mod_base = OTHER; note = 2'-O-methylguanosine-3'-phosphate
  modified_base 18: mod_base = OTHER; note = 2'-O-methyladenosine-3'-phosphate
  modified_base 19: mod_base = OTHER; note = 2'-O-methyladenosine-3'-phosphate
  modified_base 20: mod_base = OTHER; note = 2'-O-methylguanosine-3'-phosphate
  modified_base 21: mod_base = OTHER; note = 2'-O-methyladenosine
ctggctcgaaacatctgaaga

SEQ ID NO: 937 - RNA, 21 nt, synthetic construct
  source 1..21: mol_type = other RNA
  modified_base 1: mod_base = OTHER; note = 2'-O-methylguanosine-3'-phosphorothioate
  modified_base 2: mod_base = OTHER; note = 2'-O-methyladenosine-3'-phosphorothioate
  modified_base 3: mod_base = OTHER; note = 2'-O-methyladenosine-3'-phosphate
  modified_base 4: mod_base = OTHER; note = 2'-O-methyladenosine-3'-phosphate
  modified_base 5: mod_base = OTHER; note = 2'-O-methylcytidine-3'-phosphate
  modified_base 6: mod_base = OTHER; note = 2'-O-methyladenosine-3'-phosphate
  modified_base 7: mod_base = OTHER; note = 2'-fluorouridine-3'-phosphate
  modified_base 8: mod_base = OTHER; note = 2'-O-methylcytidine-3'-phosphate
  modified_base 9: mod_base = OTHER; note = 2'-fluorouridine-3'-phosphate
  modified_base 10: mod_base = OTHER; note = 2'-fluoroguanosine-3'-phosphate
  modified_base 11: mod_base = OTHER; note = 2'-fluoroadenosine-3'-phosphate
  modified_base 12: mod_base = OTHER; note = 2'-O-methyladenosine-3'-phosphate
  modified_base 13: mod_base = OTHER; note = 2'-O-methylguanosine-3'-phosphate
  modified_base 14: mod_base = OTHER; note = 2'-O-methylguanosine-3'-phosphate
  modified_base 15: mod_base = OTHER; note = 2'-O-methylguanosine-3'-phosphate
  modified_base 16: mod_base = OTHER; note = 2'-O-methyluridine-3'-phosphate
  modified_base 17: mod_base = OTHER; note = 2'-O-methyluridine-3'-phosphate
  modified_base 18: mod_base = OTHER; note = 2'-O-methylcytidine-3'-phosphate
  modified_base 19: mod_base = OTHER; note = 2'-O-methylguanosine-3'-phosphate
  modified_base 20: mod_base = OTHER; note = 2'-O-methylcytidine-3'-phosphate
  modified_base 21: mod_base = OTHER; note = 2'-O-methyladenosine
gaaacatctgaagggttcgca

SEQ ID NO: 938 - RNA, 21 nt, synthetic construct
  source 1..21: mol_type = other RNA
  modified_base 1: mod_base = OTHER; note = 2'-O-methyladenosine-3'-phosphorothioate
  modified_base 2: mod_base = OTHER; note = 2'-O-methyladenosine-3'-phosphorothioate
  modified_base 3: mod_base = OTHER; note = 2'-O-methyladenosine-3'-phosphate
  modified_base 4: mod_base = OTHER; note = 2'-O-methylcytidine-3'-phosphate
  modified_base 5: mod_base = OTHER; note = 2'-O-methyladenosine-3'-phosphate
  modified_base 6: mod_base = OTHER; note = 2'-O-methyluridine-3'-phosphate
  modified_base 7: mod_base = OTHER; note = 2'-fluorocytidine-3'-phosphate
  modified_base 8: mod_base = OTHER; note = 2'-O-methyluridine-3'-phosphate
  modified_base 9: mod_base = OTHER; note = 2'-fluoroguanosine-3'-phosphate
  modified_base 10: mod_base = OTHER; note = 2'-fluoroadenosine-3'-phosphate
  modified_base 11: mod_base = OTHER; note = 2'-fluoroadenosine-3'-phosphate
  modified_base 12: mod_base = OTHER; note = 2'-O-methylguanosine-3'-phosphate
  modified_base 13: mod_base = OTHER; note = 2'-O-methylguanosine-3'-phosphate
  modified_base 14: mod_base = OTHER; note = 2'-O-methylguanosine-3'-phosphate
  modified_base 15: mod_base = OTHER; note = 2'-O-methyluridine-3'-phosphate
  modified_base 16: mod_base = OTHER; note = 2'-O-methyluridine-3'-phosphate
  modified_base 17: mod_base = OTHER; note = 2'-O-methylcytidine-3'-phosphate
  modified_base 18: mod_base = OTHER; note = 2'-O-methylguanosine-3'-phosphate
  modified_base 19: mod_base = OTHER; note = 2'-O-methylcytidine-3'-phosphate
  modified_base 20: mod_base = OTHER; note = 2'-O-methyladenosine-3'-phosphate
  modified_base 21: mod_base = OTHER; note = 2'-O-methyladenosine
aaacatctgaagggttcgcaa

SEQ ID NO: 939 - RNA, 21 nt, synthetic construct
  source 1..21: mol_type = other RNA
  modified_base 1: mod_base = OTHER; note = 2'-O-methylcytidine-3'-phosphorothioate
  modified_base 2: mod_base = OTHER; note = 2'-O-methyluridine-3'-phosphorothioate
  modified_base 3: mod_base = OTHER; note = 2'-O-methylguanosine-3'-phosphate
  modified_base 4: mod_base = OTHER; note = 2'-O-methyladenosine-3'-phosphate
  modified_base 5: mod_base = OTHER; note = 2'-O-methyladenosine-3'-phosphate
  modified_base 6: mod_base = OTHER; note = 2'-O-methylguanosine-3'-phosphate
  modified_base 7: mod_base = OTHER; note = 2'-fluoroguanosine-3'-phosphate
  modified_base 8: mod_base = OTHER; note = 2'-O-methylguanosine-3'-phosphate
  modified_base 9: mod_base = OTHER; note = 2'-fluorouridine-3'-phosphate
  modified_base 10: mod_base = OTHER; note = 2'-fluorouridine-3'-phosphate
  modified_base 11: mod_base = OTHER; note = 2'-fluorocytidine-3'-phosphate
  modified_base 12: mod_base = OTHER; note = 2'-O-methylguanosine-3'-phosphate
  modified_base 13: mod_base = OTHER; note = 2'-O-methylcytidine-3'-phosphate
  modified_base 14: mod_base = OTHER; note = 2'-O-methyladenosine-3'-phosphate
  modified_base 15: mod_base = OTHER; note = 2'-O-methylguanosine-3'-phosphate
  modified_base 16: mod_base = OTHER; note = 2'-O-methyluridine-3'-phosphate
  modified_base 17: mod_base = OTHER; note = 2'-O-methylguanosine-3'-phosphate
  modified_base 18: mod_base = OTHER; note = 2'-O-methyladenosine-3'-phosphate
  modified_base 19: mod_base = OTHER; note = 2'-O-methyluridine-3'-phosphate
  modified_base 20: mod_base = OTHER; note = 2'-O-methyladenosine-3'-phosphate
  modified_base 21: mod_base = OTHER; note = 2'-O-methyladenosine
ctgaagggttcgcagtgataa

SEQ ID NO: 940 - RNA, 21 nt, synthetic construct
  source 1..21: mol_type = other RNA
  modified_base 1: mod_base = OTHER; note = 2'-O-methylguanosine-3'-phosphorothioate
  modified_base 2: mod_base = OTHER; note = 2'-O-methyladenosine-3'-phosphorothioate
  modified_base 3: mod_base = OTHER; note = 2'-O-methyladenosine-3'-phosphate
  modified_base 4: mod_base = OTHER; note = 2'-O-methylguanosine-3'-phosphate
  modified_base 5: mod_base = OTHER; note = 2'-O-methylguanosine-3'-phosphate
  modified_base 6: mod_base = OTHER; note = 2'-O-methylguanosine-3'-phosphate
  modified_base 7: mod_base = OTHER; note = 2'-fluorouridine-3'-phosphate
  modified_base 8: mod_base = OTHER; note = 2'-O-methyluridine-3'-phosphate
  modified_base 9: mod_base = OTHER; note = 2'-fluorocytidine-3'-phosphate
  modified_base 10: mod_base = OTHER; note = 2'-fluoroguanosine-3'-phosphate
  modified_base 11: mod_base = OTHER; note = 2'-fluorocytidine-3'-phosphate
  modified_base 12: mod_base = OTHER; note = 2'-O-methyladenosine-3'-phosphate
  modified_base 13: mod_base = OTHER; note = 2'-O-methylguanosine-3'-phosphate
  modified_base 14: mod_base = OTHER; note = 2'-O-methyluridine-3'-phosphate
  modified_base 15: mod_base = OTHER; note = 2'-O-methylguanosine-3'-phosphate
  modified_base 16: mod_base = OTHER; note = 2'-O-methyladenosine-3'-phosphate
  modified_base 17: mod_base = OTHER; note = 2'-O-methyluridine-3'-phosphate
  modified_base 18: mod_base = OTHER; note = 2'-O-methyladenosine-3'-phosphate
  modified_base 19: mod_base = OTHER; note = 2'-O-methyladenosine-3'-phosphate
  modified_base 20: mod_base = OTHER; note = 2'-O-methyladenosine-3'-phosphate
  modified_base 21: mod_base = OTHER; note = 2'-O-methyladenosine
gaagggttcgcagtgataaaa

SEQ ID NO: 941 - RNA, 21 nt, synthetic construct
  source 1..21: mol_type = other RNA
  modified_base 1: mod_base = OTHER; note = 2'-O-methylguanosine-3'-phosphorothioate
  modified_base 2: mod_base = OTHER; note = 2'-O-methylcytidine-3'-phosphorothioate
  modified_base 3: mod_base = OTHER; note = 2'-O-methyladenosine-3'-phosphate
  modified_base 4: mod_base = OTHER; note = 2'-O-methyluridine-3'-phosphate
  modified_base 5: mod_base = OTHER; note = 2'-O-methyluridine-3'-phosphate
  modified_base 6: mod_base = OTHER; note = 2'-O-methyluridine-3'-phosphate
  modified_base 7: mod_base = OTHER; note = 2'-fluoroguanosine-3'-phosphate
  modified_base 8: mod_base = OTHER; note = 2'-O-methyladenosine-3'-phosphate
  modified_base 9: mod_base = OTHER; note = 2'-fluorocytidine-3'-phosphate
  modified_base 10: mod_base = OTHER; note = 2'-fluoroadenosine-3'-phosphate
  modified_base 11: mod_base = OTHER; note = 2'-fluoroguanosine-3'-phosphate
  modified_base 12: mod_base = OTHER; note = 2'-O-methylcytidine-3'-phosphate
  modified_base 13: mod_base = OTHER; note = 2'-O-methyladenosine-3'-phosphate
  modified_base 14: mod_base = OTHER; note = 2'-O-methylcytidine-3'-phosphate
  modified_base 15: mod_base = OTHER; note = 2'-O-methyluridine-3'-phosphate
  modified_base 16: mod_base = OTHER; note = 2'-O-methyladenosine-3'-phosphate
  modified_base 17: mod_base = OTHER; note = 2'-O-methylguanosine-3'-phosphate
  modified_base 18: mod_base = OTHER; note = 2'-O-methylcytidine-3'-phosphate
  modified_base 19: mod_base = OTHER; note = 2'-O-methyladenosine-3'-phosphate
  modified_base 20: mod_base = OTHER; note = 2'-O-methylguanosine-3'-phosphate
  modified_base 21: mod_base = OTHER; note = 2'-O-methyladenosine
gcatttgacagcactagcaga

SEQ ID NO: 942 - RNA, 21 nt, synthetic construct
  source 1..21: mol_type = other RNA
  modified_base 1: mod_base = OTHER; note = 2'-O-methyluridine-3'-phosphorothioate
  modified_base 2: mod_base = OTHER; note = 2'-O-methyluridine-3'-phosphorothioate
  modified_base 3: mod_base = OTHER; note = 2'-O-methylguanosine-3'-phosphate
  modified_base 4: mod_base = OTHER; note = 2'-O-methyladenosine-3'-phosphate
  modified_base 5: mod_base = OTHER; note = 2'-O-methylcytidine-3'-phosphate
  modified_base 6: mod_base = OTHER; note = 2'-O-methyladenosine-3'-phosphate
  modified_base 7: mod_base = OTHER; note = 2'-fluoroguanosine-3'-phosphate
  modified_base 8: mod_base = OTHER; note = 2'-O-methylcytidine-3'-phosphate
  modified_base 9: mod_base = OTHER; note = 2'-fluoroadenosine-3'-phosphate
  modified_base 10: mod_base = OTHER; note = 2'-fluorocytidine-3'-phosphate
  modified_base 11: mod_base = OTHER; note = 2'-fluorouridine-3'-phosphate
  modified_base 12: mod_base = OTHER; note = 2'-O-methyladenosine-3'-phosphate
  modified_base 13: mod_base = OTHER; note = 2'-O-methylguanosine-3'-phosphate
  modified_base 14: mod_base = OTHER; note = 2'-O-methylcytidine-3'-phosphate
  modified_base 15: mod_base = OTHER; note = 2'-O-methyladenosine-3'-phosphate
  modified_base 16: mod_base = OTHER; note = 2'-O-methylguanosine-3'-phosphate
  modified_base 17: mod_base = OTHER; note = 2'-O-methyladenosine-3'-phosphate
  modified_base 18: mod_base = OTHER; note = 2'-O-methyluridine-3'-phosphate
  modified_base 19: mod_base = OTHER; note = 2'-O-methyluridine-3'-phosphate
  modified_base 20: mod_base = OTHER; note = 2'-O-methyluridine-3'-phosphate
  modified_base 21: mod_base = OTHER; note = 2'-O-methyladenosine
ttgacagcactagcagattta

SEQ ID NO: 943 - RNA, 21 nt, synthetic construct
  source 1..21: mol_type = other RNA
  modified_base 1: mod_base = OTHER; note = 2'-O-methylguanosine-3'-phosphorothioate
  modified_base 2: mod_base = OTHER; note = 2'-O-methylcytidine-3'-phosphorothioate
  modified_base 3: mod_base = OTHER; note = 2'-O-methyladenosine-3'-phosphate
  modified_base 4: mod_base = OTHER; note = 2'-O-methylcytidine-3'-phosphate
  modified_base 5: mod_base = OTHER; note = 2'-O-methyluridine-3'-phosphate
  modified_base 6: mod_base = OTHER; note = 2'-O-methyladenosine-3'-phosphate
  modified_base 7: mod_base = OTHER; note = 2'-fluoroguanosine-3'-phosphate
  modified_base 8: mod_base = OTHER; note = 2'-O-methylcytidine-3'-phosphate
  modified_base 9: mod_base = OTHER; note = 2'-fluoroadenosine-3'-phosphate
  modified_base 10: mod_base = OTHER; note = 2'-fluoroguanosine-3'-phosphate
  modified_base 11: mod_base = OTHER; note = 2'-fluoroadenosine-3'-phosphate
  modified_base 12: mod_base = OTHER; note = 2'-O-methyluridine-3'-phosphate
  modified_base 13: mod_base = OTHER; note = 2'-O-methyluridine-3'-phosphate
  modified_base 14: mod_base = OTHER; note = 2'-O-methyluridine-3'-phosphate
  modified_base 15: mod_base = OTHER; note = 2'-O-methylguanosine-3'-phosphate
  modified_base 16: mod_base = OTHER; note = 2'-O-methylcytidine-3'-phosphate
  modified_base 17: mod_base = OTHER; note = 2'-O-methyladenosine-3'-phosphate
  modified_base 18: mod_base = OTHER; note = 2'-O-methylcytidine-3'-phosphate
  modified_base 19: mod_base = OTHER; note = 2'-O-methylguanosine-3'-phosphate
  modified_base 20: mod_base = OTHER; note = 2'-O-methyluridine-3'-phosphate
  modified_base 21: mod_base = OTHER; note = 2'-O-methyladenosine
gcactagcagatttgcacgta

SEQ ID NO: 944 - RNA, 21 nt, synthetic construct
  source 1..21: mol_type = other RNA
  modified_base 1: mod_base = OTHER; note = 2'-O-methylcytidine-3'-phosphorothioate
  modified_base 2: mod_base = OTHER; note = 2'-O-methyladenosine-3'-phosphorothioate
  modified_base 3: mod_base = OTHER; note = 2'-O-methylcytidine-3'-phosphate
  modified_base 4: mod_base = OTHER; note = 2'-O-methyluridine-3'-phosphate
  modified_base 5: mod_base = OTHER; note = 2'-O-methyladenosine-3'-phosphate
  modified_base 6: mod_base = OTHER; note = 2'-O-methylguanosine-3'-phosphate
  modified_base 7: mod_base = OTHER; note = 2'-fluorocytidine-3'-phosphate
  modified_base 8: mod_base = OTHER; note = 2'-O-methyladenosine-3'-phosphate
  modified_base 9: mod_base = OTHER; note = 2'-fluoroguanosine-3'-phosphate
  modified_base 10: mod_base = OTHER; note = 2'-fluoroadenosine-3'-phosphate
  modified_base 11: mod_base = OTHER; note = 2'-fluorouridine-3'-phosphate
  modified_base 12: mod_base = OTHER; note = 2'-O-methyluridine-3'-phosphate
  modified_base 13: mod_base = OTHER; note = 2'-O-methyluridine-3'-phosphate
  modified_base 14: mod_base = OTHER; note = 2'-O-methylguanosine-3'-phosphate
  modified_base 15: mod_base = OTHER; note = 2'-O-methylcytidine-3'-phosphate
  modified_base 16: mod_base = OTHER; note = 2'-O-methyladenosine-3'-phosphate
  modified_base 17: mod_base = OTHER; note = 2'-O-methylcytidine-3'-phosphate
  modified_base 18: mod_base = OTHER; note = 2'-O-methylguanosine-3'-phosphate
  modified_base 19: mod_base = OTHER; note = 2'-O-methyluridine-3'-phosphate
  modified_base 20: mod_base = OTHER; note = 2'-O-methylcytidine-3'-phosphate
  modified_base 21: mod_base = OTHER; note = 2'-O-methyluridine
cactagcagatttgcacgtct

SEQ ID NO: 945 - RNA, 21 nt, synthetic construct
  source 1..21: mol_type = other RNA
  modified_base 1: mod_base = OTHER; note = 2'-O-methylcytidine-3'-phosphorothioate
  modified_base 2: mod_base = OTHER; note = 2'-O-methyluridine-3'-phosphorothioate
  modified_base 3: mod_base = OTHER; note = 2'-O-methyladenosine-3'-phosphate
  modified_base 4: mod_base = OTHER; note = 2'-O-methylguanosine-3'-phosphate
  modified_base 5: mod_base = OTHER; note = 2'-O-methylcytidine-3'-phosphate
  modified_base 6: mod_base = OTHER; note = 2'-O-methyladenosine-3'-phosphate
  modified_base 7: mod_base = OTHER; note = 2'-fluoroguanosine-3'-phosphate
  modified_base 8: mod_base = OTHER; note = 2'-O-methyladenosine-3'-phosphate
  modified_base 9: mod_base = OTHER; note = 2'-fluorouridine-3'-phosphate
  modified_base 10: mod_base = OTHER; note = 2'-fluorouridine-3'-phosphate
  modified_base 11: mod_base = OTHER; note = 2'-fluorouridine-3'-phosphate
  modified_base 12: mod_base = OTHER; note = 2'-O-methylguanosine-3'-phosphate
  modified_base 13: mod_base = OTHER; note = 2'-O-methylcytidine-3'-phosphate
  modified_base 14: mod_base = OTHER; note = 2'-O-methyladenosine-3'-phosphate
  modified_base 15: mod_base = OTHER; note = 2'-O-methylcytidine-3'-phosphate
  modified_base 16: mod_base = OTHER; note = 2'-O-methylguanosine-3'-phosphate
  modified_base 17: mod_base = OTHER; note = 2'-O-methyluridine-3'-phosphate
  modified_base 18: mod_base = OTHER; note = 2'-O-methylcytidine-3'-phosphate
  modified_base 19: mod_base = OTHER; note = 2'-O-methyluridine-3'-phosphate
  modified_base 20: mod_base = OTHER; note = 2'-O-methyladenosine-3'-phosphate
  modified_base 21: mod_base = OTHER; note = 2'-O-methyladenosine
ctagcagatttgcacgtctaa

SEQ ID NO: 946 - RNA, 21 nt, synthetic construct
  source 1..21: mol_type = other RNA
  modified_base 1: mod_base = OTHER; note = 2'-O-methyluridine-3'-phosphorothioate
  modified_base 2: mod_base = OTHER; note = 2'-O-methyladenosine-3'-phosphorothioate
  modified_base 3: mod_base = OTHER; note = 2'-O-methylguanosine-3'-phosphate
  modified_base 4: mod_base = OTHER; note = 2'-O-methylcytidine-3'-phosphate
  modified_base 5: mod_base = OTHER; note = 2'-O-methyladenosine-3'-phosphate
  modified_base 6: mod_base = OTHER; note = 2'-O-methylguanosine-3'-phosphate
  modified_base 7: mod_base = OTHER; note = 2'-fluoroadenosine-3'-phosphate
  modified_base 8: mod_base = OTHER; note = 2'-O-methyluridine-3'-phosphate
  modified_base 9: mod_base = OTHER; note = 2'-fluorouridine-3'-phosphate
  modified_base 10: mod_base = OTHER; note = 2'-fluorouridine-3'-phosphate
  modified_base 11: mod_base = OTHER; note = 2'-fluoroguanosine-3'-phosphate
  modified_base 12: mod_base = OTHER; note = 2'-O-methylcytidine-3'-phosphate
  modified_base 13: mod_base = OTHER; note = 2'-O-methyladenosine-3'-phosphate
  modified_base 14: mod_base = OTHER; note = 2'-O-methylcytidine-3'-phosphate
  modified_base 15: mod_base = OTHER; note = 2'-O-methylguanosine-3'-phosphate
  modified_base 16: mod_base = OTHER; note = 2'-O-methyluridine-3'-phosphate
  modified_base 17: mod_base = OTHER; note = 2'-O-methylcytidine-3'-phosphate
  modified_base 18: mod_base = OTHER; note = 2'-O-methyluridine-3'-phosphate
  modified_base 19: mod_base = OTHER; note = 2'-O-methyladenosine-3'-phosphate
  modified_base 20: mod_base = OTHER; note = 2'-O-methylcytidine-3'-phosphate
  modified_base 21: mod_base = OTHER; note = 2'-O-methyladenosine
tagcagatttgcacgtctaca

SEQ ID NO: 947 - RNA, 21 nt, synthetic construct
  source 1..21: mol_type = other RNA
  modified_base 1: mod_base = OTHER; note = 2'-O-methyladenosine-3'-phosphorothioate
  modified_base 2: mod_base = OTHER; note = 2'-O-methylguanosine-3'-phosphorothioate
  modified_base 3: mod_base = OTHER; note = 2'-O-methylcytidine-3'-phosphate
  modified_base 4: mod_base = OTHER; note = 2'-O-methyladenosine-3'-phosphate
  modified_base 5: mod_base = OTHER; note = 2'-O-methylguanosine-3'-phosphate
  modified_base 6: mod_base = OTHER; note = 2'-O-methyladenosine-3'-phosphate
  modified_base 7: mod_base = OTHER; note = 2'-fluorouridine-3'-phosphate
  modified_base 8: mod_base = OTHER; note = 2'-O-methyluridine-3'-phosphate
  modified_base 9: mod_base = OTHER; note = 2'-fluorouridine-3'-phosphate
  modified_base 10: mod_base = OTHER; note = 2'-fluoroguanosine-3'-phosphate
  modified_base 11: mod_base = OTHER; note = 2'-fluorocytidine-3'-phosphate
  modified_base 12: mod_base = OTHER; note = 2'-O-methyladenosine-3'-phosphate
  modified_base 13: mod_base = OTHER; note = 2'-O-methylcytidine-3'-phosphate
  modified_base 14: mod_base = OTHER; note = 2'-O-methylguanosine-3'-phosphate
  modified_base 15: mod_base = OTHER; note = 2'-O-methyluridine-3'-phosphate
  modified_base 16: mod_base = OTHER; note = 2'-O-methylcytidine-3'-phosphate
  modified_base 17: mod_base = OTHER; note = 2'-O-methyluridine-3'-phosphate
  modified_base 18: mod_base = OTHER; note = 2'-O-methyladenosine-3'-phosphate
  modified_base 19: mod_base = OTHER; note = 2'-O-methylcytidine-3'-phosphate
  modified_base 20: mod_base = OTHER; note = 2'-O-methyladenosine-3'-phosphate
  modified_base 21: mod_base = OTHER; note = 2'-O-methyladenosine
agcagatttgcacgtctacaa

SEQ ID NO: 948 - RNA, 21 nt, synthetic construct
  source 1..21: mol_type = other RNA
  modified_base 1: mod_base = OTHER; note = 2'-O-methylguanosine-3'-phosphorothioate
  modified_base 2: mod_base = OTHER; note = 2'-O-methyladenosine-3'-phosphorothioate
  modified_base 3: mod_base = OTHER; note = 2'-O-methyluridine-3'-phosphate
  modified_base 4: mod_base = OTHER; note = 2'-O-methyluridine-3'-phosphate
  modified_base 5: mod_base = OTHER; note = 2'-O-methyluridine-3'-phosphate
  modified_base 6: mod_base = OTHER; note = 2'-O-methylguanosine-3'-phosphate
  modified_base 7: mod_base = OTHER; note = 2'-fluorocytidine-3'-phosphate
  modified_base 8: mod_base = OTHER; note = 2'-O-methyladenosine-3'-phosphate
  modified_base 9: mod_base = OTHER; note = 2'-fluorocytidine-3'-phosphate
  modified_base 10: mod_base = OTHER; note = 2'-fluoroguanosine-3'-phosphate
  modified_base 11: mod_base = OTHER; note = 2'-fluorouridine-3'-phosphate
  modified_base 12: mod_base = OTHER; note = 2'-O-methylcytidine-3'-phosphate
  modified_base 13: mod_base = OTHER; note = 2'-O-methyluridine-3'-phosphate
  modified_base 14: mod_base = OTHER; note = 2'-O-methyladenosine-3'-phosphate
  modified_base 15: mod_base = OTHER; note = 2'-O-methylcytidine-3'-phosphate
  modified_base 16: mod_base = OTHER; note = 2'-O-methyladenosine-3'-phosphate
  modified_base 17: mod_base = OTHER; note = 2'-O-methylguanosine-3'-phosphate
  modified_base 18: mod_base = OTHER; note = 2'-O-methyladenosine-3'-phosphate
  modified_base 19: mod_base = OTHER; note = 2'-O-methyladenosine-3'-phosphate
  modified_base 20: mod_base = OTHER; note = 2'-O-methyladenosine-3'-phosphate
  modified_base 21: mod_base = OTHER; note = 2'-O-methyladenosine
gatttgcacgtctacagaaaa

SEQ ID NO: 949 - RNA, 21 nt, synthetic construct
  source 1..21: mol_type = other RNA
  modified_base 1: mod_base = OTHER; note = 2'-O-methyluridine-3'-phosphorothioate
  modified_base 2: mod_base = OTHER; note = 2'-O-methyluridine-3'-phosphorothioate
  modified_base 3: mod_base = OTHER; note = 2'-O-methyluridine-3'-phosphate
  modified_base 4: mod_base = OTHER; note = 2'-O-methylguanosine-3'-phosphate
  modified_base 5: mod_base = OTHER; note = 2'-O-methylcytidine-3'-phosphate
  modified_base 6: mod_base = OTHER; note = 2'-O-methyladenosine-3'-phosphate
  modified_base 7: mod_base = OTHER; note = 2'-fluorocytidine-3'-phosphate
  modified_base 8: mod_base = OTHER; note = 2'-O-methylguanosine-3'-phosphate
  modified_base 9: mod_base = OTHER; note = 2'-fluorouridine-3'-phosphate
  modified_base 10: mod_base = OTHER; note = 2'-fluorocytidine-3'-phosphate
  modified_base 11: mod_base = OTHER; note = 2'-fluorouridine-3'-phosphate
  modified_base 12: mod_base = OTHER; note = 2'-O-methyladenosine-3'-phosphate
  modified_base 13: mod_base = OTHER; note = 2'-O-methylcytidine-3'-phosphate
  modified_base 14: mod_base = OTHER; note = 2'-O-methyladenosine-3'-phosphate
  modified_base 15: mod_base = OTHER; note = 2'-O-methylguanosine-3'-phosphate
  modified_base 16: mod_base = OTHER; note = 2'-O-methyladenosine-3'-phosphate
  modified_base 17: mod_base = OTHER; note = 2'-O-methyladenosine-3'-phosphate
  modified_base 18: mod_base = OTHER; note = 2'-O-methyladenosine-3'-phosphate
  modified_base 19: mod_base = OTHER; note = 2'-O-methylcytidine-3'-phosphate
  modified_base 20: mod_base = OTHER; note = 2'-O-methyluridine-3'-phosphate
  modified_base 21: mod_base = OTHER; note = 2'-O-methyluridine
tttgcacgtctacagaaactt

SEQ ID NO: 950 - RNA, 21 nt, synthetic construct
  source 1..21: mol_type = other RNA
  modified_base 1: mod_base = OTHER; note = 2'-O-methyluridine-3'-phosphorothioate
  modified_base 2: mod_base = OTHER; note = 2'-O-methyluridine-3'-phosphorothioate
  modified_base 3: mod_base = OTHER; note = 2'-O-methylguanosine-3'-phosphate
  modified_base 4: mod_base = OTHER; note = 2'-O-methylcytidine-3'-phosphate
  modified_base 5: mod_base = OTHER; note = 2'-O-methyladenosine-3'-phosphate
  modified_base 6: mod_base = OTHER; note = 2'-O-methylcytidine-3'-phosphate
  modified_base 7: mod_base = OTHER; note = 2'-fluoroguanosine-3'-phosphate
  modified_base 8: mod_base = OTHER; note = 2'-O-methyluridine-3'-phosphate
  modified_base 9: mod_base = OTHER; note = 2'-fluorocytidine-3'-phosphate
  modified_base 10: mod_base = OTHER; note = 2'-fluorouridine-3'-phosphate
  modified_base 11: mod_base = OTHER; note = 2'-fluoroadenosine-3'-phosphate
  modified_base 12: mod_base = OTHER; note = 2'-O-methylcytidine-3'-phosphate
  modified_base 13: mod_base = OTHER; note = 2'-O-methyladenosine-3'-phosphate
  modified_base 14: mod_base = OTHER; note = 2'-O-methylguanosine-3'-phosphate
  modified_base 15: mod_base = OTHER; note = 2'-O-methyladenosine-3'-phosphate
  modified_base 16: mod_base = OTHER; note = 2'-O-methyladenosine-3'-phosphate
  modified_base 17: mod_base = OTHER; note = 2'-O-methyladenosine-3'-phosphate
  modified_base 18: mod_base = OTHER; note = 2'-O-methylcytidine-3'-phosphate
  modified_base 19: mod_base = OTHER; note = 2'-O-methyluridine-3'-phosphate
  modified_base 20: mod_base = OTHER; note = 2'-O-methyluridine-3'-phosphate
  modified_base 21: mod_base = OTHER; note = 2'-O-methyladenosine
ttgcacgtctacagaaactta

SEQ ID NO: 951 - RNA, 21 nt, synthetic construct
  source 1..21: mol_type = other RNA
  modified_base 1: mod_base = OTHER; note = 2'-O-methylcytidine-3'-phosphorothioate
  modified_base 2: mod_base = OTHER; note = 2'-O-methyluridine-3'-phosphorothioate
  modified_base 3: mod_base = OTHER; note = 2'-O-methylguanosine-3'-phosphate
  modified_base 4: mod_base = OTHER; note = 2'-O-methylguanosine-3'-phosphate
  modified_base 5: mod_base = OTHER; note = 2'-O-methyladenosine-3'-phosphate
  modified_base 6: mod_base = OTHER; note = 2'-O-methylcytidine-3'-phosphate
  modified_base 7: mod_base = OTHER; note = 2'-fluoroguanosine-3'-phosphate
  modified_base 8: mod_base = OTHER; note = 2'-O-methylcytidine-3'-phosphate
  modified_base 9: mod_base = OTHER; note = 2'-fluoroadenosine-3'-phosphate
  modified_base 10: mod_base = OTHER; note = 2'-fluoroadenosine-3'-phosphate
  modified_base 11: mod_base = OTHER; note = 2'-fluorocytidine-3'-phosphate
  modified_base 12: mod_base = OTHER; note = 2'-O-methylcytidine-3'-phosphate
  modified_base 13: mod_base = OTHER; note = 2'-O-methyluridine-3'-phosphate
  modified_base 14: mod_base = OTHER; note = 2'-O-methyluridine-3'-phosphate
  modified_base 15: mod_base = OTHER; note = 2'-O-methyluridine-3'-phosphate
  modified_base 16: mod_base = OTHER; note = 2'-O-methyladenosine-3'-phosphate
  modified_base 17: mod_base = OTHER; note = 2'-O-methyluridine-3'-phosphate
  modified_base 18: mod_base = OTHER; note = 2'-O-methyladenosine-3'-phosphate
  modified_base 19: mod_base = OTHER; note = 2'-O-methyluridine-3'-phosphate
  modified_base 20: mod_base = OTHER; note = 2'-O-methylcytidine-3'-phosphate
  modified_base 21: mod_base = OTHER; note = 2'-O-methyladenosine
ctggacgcaacctttatatca

SEQ ID NO: 952 - RNA, 21 nt, synthetic construct
  source 1..21: mol_type = other RNA
  modified_base 1: mod_base = OTHER; note = 2'-O-methylguanosine-3'-phosphorothioate
  modified_base 2: mod_base = OTHER; note = 2'-O-methylguanosine-3'-phosphorothioate
  modified_base 3: mod_base = OTHER; note = 2'-O-methyladenosine-3'-phosphate
  modified_base 4: mod_base = OTHER; note = 2'-O-methylcytidine-3'-phosphate
  modified_base 5: mod_base = OTHER; note = 2'-O-methylguanosine-3'-phosphate
  modified_base 6: mod_base = OTHER; note = 2'-O-methylcytidine-3'-phosphate
  modified_base 7: mod_base = OTHER; note = 2'-fluoroadenosine-3'-phosphate
  modified_base 8: mod_base = OTHER; note = 2'-O-methyladenosine-3'-phosphate
  modified_base 9: mod_base = OTHER; note = 2'-fluorocytidine-3'-phosphate
  modified_base 10: mod_base = OTHER; note = 2'-fluorocytidine-3'-phosphate
  modified_base 11: mod_base = OTHER; note = 2'-fluorouridine-3'-phosphate
  modified_base 12: mod_base = OTHER; note = 2'-O-methyluridine-3'-phosphate
  modified_base 13: mod_base = OTHER; note = 2'-O-methyluridine-3'-phosphate
  modified_base 14: mod_base = OTHER; note = 2'-O-methyladenosine-3'-phosphate
  modified_base 15: mod_base = OTHER; note = 2'-O-methyluridine-3'-phosphate
  modified_base 16: mod_base = OTHER; note = 2'-O-methyladenosine-3'-phosphate
  modified_base 17: mod_base = OTHER; note = 2'-O-methyluridine-3'-phosphate
  modified_base 18: mod_base = OTHER; note = 2'-O-methylcytidine-3'-phosphate
  modified_base 19: mod_base = OTHER; note = 2'-O-methylcytidine-3'-phosphate
  modified_base 20: mod_base = OTHER; note = 2'-O-methylguanosine-3'-phosphate
  modified_base 21: mod_base = OTHER; note = 2'-O-methyluridine
ggacgcaacctttatatccgt

SEQ ID NO: 953 - RNA, 21 nt, synthetic construct
  source 1..21: mol_type = other RNA
  modified_base 1: mod_base = OTHER; note = 2'-O-methylguanosine-3'-phosphorothioate
  modified_base 2: mod_base = OTHER; note = 2'-O-methyladenosine-3'-phosphorothioate
  modified_base 3: mod_base = OTHER; note = 2'-O-methylcytidine-3'-phosphate
  modified_base 4: mod_base = OTHER; note = 2'-O-methylguanosine-3'-phosphate
  modified_base 5: mod_base = OTHER; note = 2'-O-methylcytidine-3'-phosphate
  modified_base 6: mod_base = OTHER; note = 2'-O-methyladenosine-3'-phosphate
  modified_base 7: mod_base = OTHER; note = 2'-fluoroadenosine-3'-phosphate
  modified_base 8: mod_base = OTHER; note = 2'-O-methylcytidine-3'-phosphate
  modified_base 9: mod_base = OTHER; note = 2'-fluorocytidine-3'-phosphate
  modified_base 10: mod_base = OTHER; note = 2'-fluorouridine-3'-phosphate
  modified_base 11: mod_base = OTHER; note = 2'-fluorouridine-3'-phosphate
  modified_base 12: mod_base = OTHER; note = 2'-O-methyluridine-3'-phosphate
  modified_base 13: mod_base = OTHER; note = 2'-O-methyladenosine-3'-phosphate
  modified_base 14: mod_base = OTHER; note = 2'-O-methyluridine-3'-phosphate
  modified_base 15: mod_base = OTHER; note = 2'-O-methyladenosine-3'-phosphate
  modified_base 16: mod_base = OTHER; note = 2'-O-methyluridine-3'-phosphate
  modified_base 17: mod_base = OTHER; note = 2'-O-methylcytidine-3'-phosphate
  modified_base 18: mod_base = OTHER; note = 2'-O-methylcytidine-3'-phosphate
  modified_base 19: mod_base = OTHER; note = 2'-O-methylguanosine-3'-phosphate
  modified_base 20: mod_base = OTHER; note = 2'-O-methyluridine-3'-phosphate
  modified_base 21: mod_base = OTHER; note = 2'-O-methyluridine
gacgcaacctttatatccgtt

SEQ ID NO: 954 - RNA, 21 nt, synthetic construct
  source 1..21: mol_type = other RNA
  modified_base 1: mod_base = OTHER; note = 2'-O-methylcytidine-3'-phosphorothioate
  modified_base 2: mod_base = OTHER; note = 2'-O-methylguanosine-3'-phosphorothioate
  modified_base 3: mod_base = OTHER; note = 2'-O-methyluridine-3'-phosphate
  modified_base 4: mod_base = OTHER; note = 2'-O-methyluridine-3'-phosphate
  modified_base 5: mod_base = OTHER; note = 2'-O-methyladenosine-3'-phosphate
  modified_base 6: mod_base = OTHER; note = 2'-O-methylguanosine-3'-phosphate
  modified_base 7: mod_base = OTHER; note = 2'-fluorouridine-3'-phosphate
  modified_base 8: mod_base = OTHER; note = 2'-O-methylguanosine-3'-phosphate
  modified_base 9: mod_base = OTHER; note = 2'-fluoroguanosine-3'-phosphate
  modified_base 10: mod_base = OTHER; note = 2'-fluorouridine-3'-phosphate
  modified_base 11: mod_base = OTHER; note = 2'-fluoroadenosine-3'-phosphate
  modified_base 12: mod_base = OTHER; note = 2'-O-methyladenosine-3'-phosphate
  modified_base 13: mod_base = OTHER; note = 2'-O-methylcytidine-3'-phosphate
  modified_base 14: mod_base = OTHER; note = 2'-O-methyluridine-3'-phosphate
  modified_base 15: mod_base = OTHER; note = 2'-O-methyladenosine-3'-phosphate
  modified_base 16: mod_base = OTHER; note = 2'-O-methyluridine-3'-phosphate
  modified_base 17: mod_base = OTHER; note = 2'-O-methyluridine-3'-phosphate
  modified_base 18: mod_base = OTHER; note = 2'-O-methylguanosine-3'-phosphate
  modified_base 19: mod_base = OTHER; note = 2'-O-methyluridine-3'-phosphate
  modified_base 20: mod_base = OTHER; note = 2'-O-methyladenosine-3'-phosphate
  modified_base 21: mod_base = OTHER; note = 2'-O-methyladenosine
cgttagtggtaactattgtaa

SEQ ID NO: 955 - RNA, 21 nt, synthetic construct
  source 1..21: mol_type = other RNA
  modified_base 1: mod_base = OTHER; note = 2'-O-methyluridine-3'-phosphorothioate
  modified_base 2: mod_base = OTHER; note = 2'-O-methyluridine-3'-phosphorothioate
  modified_base 3: mod_base = OTHER; note = 2'-O-methyladenosine-3'-phosphate
  modified_base 4: mod_base = OTHER; note = 2'-O-methylguanosine-3'-phosphate
  modified_base 5: mod_base = OTHER; note = 2'-O-methyluridine-3'-phosphate
  modified_base 6: mod_base = OTHER; note = 2'-O-methylguanosine-3'-phosphate
  modified_base 7: mod_base = OTHER; note = 2'-fluoroguanosine-3'-phosphate
  modified_base 8: mod_base = OTHER; note = 2'-O-methyluridine-3'-phosphate
  modified_base 9: mod_base = OTHER; note = 2'-fluoroadenosine-3'-phosphate
  modified_base 10: mod_base = OTHER; note = 2'-fluoroadenosine-3'-phosphate
  modified_base 11: mod_base = OTHER; note = 2'-fluorocytidine-3'-phosphate
  modified_base 12: mod_base = OTHER; note = 2'-O-methyluridine-3'-phosphate
  modified_base 13: mod_base = OTHER; note = 2'-O-methyladenosine-3'-phosphate
  modified_base 14: mod_base = OTHER; note = 2'-O-methyluridine-3'-phosphate
  modified_base 15: mod_base = OTHER; note = 2'-O-methyluridine-3'-phosphate
  modified_base 16: mod_base = OTHER; note = 2'-O-methylguanosine-3'-phosphate
  modified_base 17: mod_base = OTHER; note = 2'-O-methyluridine-3'-phosphate
  modified_base 18: mod_base = OTHER; note = 2'-O-methyladenosine-3'-phosphate
  modified_base 19: mod_base = OTHER; note = 2'-O-methylcytidine-3'-phosphate
  modified_base 20: mod_base = OTHER; note = 2'-O-methyluridine-3'-phosphate
  modified_base 21: mod_base = OTHER; note = 2'-O-methyladenosine
ttagtggtaactattgtacta

SEQ ID NO: 956 - RNA, 21 nt, synthetic construct
  source 1..21: mol_type = other RNA
  modified_base 1: mod_base = OTHER; note = 2'-O-methyluridine-3'-phosphorothioate
  modified_base 2: mod_base = OTHER; note = 2'-O-methyladenosine-3'-phosphorothioate
  modified_base 3: mod_base = OTHER; note = 2'-O-methyladenosine-3'-phosphate
  modified_base 4: mod_base = OTHER; note = 2'-O-methylcytidine-3'-phosphate
  modified_base 5: mod_base = OTHER; note = 2'-O-methyluridine-3'-phosphate
  modified_base 6: mod_base = OTHER; note = 2'-O-methyladenosine-3'-phosphate
  modified_base 7: mod_base = OTHER; note = 2'-fluorouridine-3'-phosphate
  modified_base 8: mod_base = OTHER; note = 2'-O-methyluridine-3'-phosphate
  modified_base 9: mod_base = OTHER; note = 2'-fluoroguanosine-3'-phosphate
  modified_base 10: mod_base = OTHER; note = 2'-fluorouridine-3'-phosphate
  modified_base 11: mod_base = OTHER; note = 2'-fluoroadenosine-3'-phosphate
  modified_base 12: mod_base = OTHER; note = 2'-O-methylcytidine-3'-phosphate
  modified_base 13: mod_base = OTHER; note = 2'-O-methyluridine-3'-phosphate
  modified_base 14: mod_base = OTHER; note = 2'-O-methylguanosine-3'-phosphate
  modified_base 15: mod_base = OTHER; note = 2'-O-methyladenosine-3'-phosphate
  modified_base 16: mod_base = OTHER; note = 2'-O-methylcytidine-3'-phosphate
  modified_base 17: mod_base = OTHER; note = 2'-O-methyladenosine-3'-phosphate
  modified_base 18: mod_base = OTHER; note = 2'-O-methyladenosine-3'-phosphate
  modified_base 19: mod_base = OTHER; note = 2'-O-methylguanosine-3'-phosphate
  modified_base 20: mod_base = OTHER; note = 2'-O-methyladenosine-3'-phosphate
  modified_base 21: mod_base = OTHER; note = 2'-O-methyladenosine
taactattgtactgacaagaa

SEQ ID NO: 957 - RNA, 21 nt, synthetic construct
  source 1..21: mol_type = other RNA
  modified_base 1: mod_base = OTHER; note = 2'-O-methyluridine-3'-phosphorothioate
  modified_base 2: mod_base = OTHER; note = 2'-O-methyladenosine-3'-phosphorothioate
  modified_base 3: mod_base = OTHER; note = 2'-O-methyluridine-3'-phosphate
  modified_base 4: mod_base = OTHER; note = 2'-O-methyluridine-3'-phosphate
  modified_base 5: mod_base = OTHER; note = 2'-O-methylguanosine-3'-phosphate
  modified_base 6: mod_base = OTHER; note = 2'-O-methyluridine-3'-phosphate
  modified_base 7: mod_base = OTHER; note = 2'-fluoroadenosine-3'-phosphate
  modified_base 8: mod_base = OTHER; note = 2'-O-methylcytidine-3'-phosphate
  modified_base 9: mod_base = OTHER; note = 2'-fluorouridine-3'-phosphate
  modified_base 10: mod_base = OTHER; note = 2'-fluoroguanosine-3'-phosphate
  modified_base 11: mod_base = OTHER; note = 2'-fluoroadenosine-3'-phosphate
  modified_base 12: mod_base = OTHER; note = 2'-O-methylcytidine-3'-phosphate
  modified_base 13: mod_base = OTHER; note = 2'-O-methyladenosine-3'-phosphate
  modified_base 14: mod_base = OTHER; note = 2'-O-methyladenosine-3'-phosphate
  modified_base 15: mod_base = OTHER; note = 2'-O-methylguanosine-3'-phosphate
  modified_base 16: mod_base = OTHER; note = 2'-O-methyladenosine-3'-phosphate
  modified_base 17: mod_base = OTHER; note = 2'-O-methyladenosine-3'-phosphate
  modified_base 18: mod_base = OTHER; note = 2'-O-methyladenosine-3'-phosphate
  modified_base 19: mod_base = OTHER; note = 2'-O-methylcytidine-3'-phosphate
  modified_base 20: mod_base = OTHER; note = 2'-O-methylcytidine-3'-phosphate
  modified_base 21: mod_base = OTHER; note = 2'-O-methyluridine
tattgtactgacaagaaacct

SEQ ID NO: 958 - RNA, 21 nt, synthetic construct
  source 1..21: mol_type = other RNA
  modified_base 1: mod_base = OTHER; note = 2'-O-methyladenosine-3'-phosphorothioate
  modified_base 2: mod_base = OTHER; note = 2'-O-methylcytidine-3'-phosphorothioate
  modified_base 3: mod_base = OTHER; note = 2'-O-methyladenosine-3'-phosphate
  modified_base 4: mod_base = OTHER; note = 2'-O-methyladenosine-3'-phosphate
  modified_base 5: mod_base = OTHER; note = 2'-O-methylguanosine-3'-phosphate
  modified_base 6: mod_base = OTHER; note = 2'-O-methyladenosine-3'-phosphate
  modified_base 7: mod_base = OTHER; note = 2'-fluoroadenosine-3'-phosphate
  modified_base 8: mod_base = OTHER; note = 2'-O-methyladenosine-3'-phosphate
  modified_base 9: mod_base = OTHER; note = 2'-fluorocytidine-3'-phosphate
  modified_base 10: mod_base = OTHER; note = 2'-fluorocytidine-3'-phosphate
  modified_base 11: mod_base = OTHER; note = 2'-fluorouridine-3'-phosphate
  modified_base 12: mod_base = OTHER; note = 2'-O-methylguanosine-3'-phosphate
  modified_base 13: mod_base = OTHER; note = 2'-O-methylcytidine-3'-phosphate
  modified_base 14: mod_base = OTHER; note = 2'-O-methyluridine-3'-phosphate
  modified_base 15: mod_base = OTHER; note = 2'-O-methylguanosine-3'-phosphate
  modified_base 16: mod_base = OTHER; note = 2'-O-methylcytidine-3'-phosphate
  modified_base 17: mod_base = OTHER; note = 2'-O-methyluridine-3'-phosphate
  modified_base 18: mod_base = OTHER; note = 2'-O-methyladenosine-3'-phosphate
  modified_base 19: mod_base = OTHER; note = 2'-O-methyluridine-3'-phosphate
  modified_base 20: mod_base = OTHER; note = 2'-O-methyladenosine-3'-phosphate
  modified_base 21: mod_base = OTHER; note = 2'-O-methyladenosine
acaagaaacctgctgctataa

SEQ ID NO: 959 - RNA, 21 nt, synthetic construct
  source 1..21: mol_type = other RNA
  modified_base 1: mod_base = OTHER; note = 2'-O-methylguanosine-3'-phosphorothioate
  modified_base 2: mod_base = OTHER; note = 2'-O-methylcytidine-3'-phosphorothioate
  modified_base 3: mod_base = OTHER; note = 2'-O-methylcytidine-3'-phosphate
  modified_base 4: mod_base = OTHER; note = 2'-O-methyladenosine-3'-phosphate
  modified_base 5: mod_base = OTHER; note = 2'-O-methyladenosine-3'-phosphate
  modified_base 6: mod_base = OTHER; note = 2'-O-methylguanosine-3'-phosphate
  modified_base 7: mod_base = OTHER; note = 2'-fluoroguanosine-3'-phosphate
  modified_base 8: mod_base = OTHER; note = 2'-O-methyluridine-3'-phosphate
  modified_base 9: mod_base = OTHER; note = 2'-fluorouridine-3'-phosphate
  modified_base 10: mod_base = OTHER; note = 2'-fluoroguanosine-3'-phosphate
  modified_base 11: mod_base = OTHER; note = 2'-fluorouridine-3'-phosphate
  modified_base 12: mod_base = OTHER; note = 2'-O-methylcytidine-3'-phosphate
  modified_base 13: mod_base = OTHER; note = 2'-O-methyladenosine-3'-phosphate
  modified_base 14: mod_base = OTHER; note = 2'-O-methylguanosine-3'-phosphate
  modified_base 15: mod_base = OTHER; note = 2'-O-methyladenosine-3'-phosphate
  modified_base 16: mod_base = OTHER; note = 2'-O-methylguanosine-3'-phosphate
  modified_base 17: mod_base = OTHER; note = 2'-O-methyladenosine-3'-phosphate
  modified_base 18: mod_base = OTHER; note = 2'-O-methyladenosine-3'-phosphate
  modified_base 19: mod_base = OTHER; note = 2'-O-methylguanosine-3'-phosphate
  modified_base 20: mod_base = OTHER; note = 2'-O-methyluridine-3'-phosphate
  modified_base 21: mod_base = OTHER; note = 2'-O-methyladenosine
gccaaggttgtcagagaagta

SEQ ID NO: 960 - RNA, 21 nt, synthetic construct
  source 1..21: mol_type = other RNA
  modified_base 1: mod_base = OTHER; note = 2'-O-methylcytidine-3'-phosphorothioate
  modified_base 2: mod_base = OTHER; note = 2'-O-methyladenosine-3'-phosphorothioate
  modified_base 3: mod_base = OTHER; note = 2'-O-methyladenosine-3'-phosphate
  modified_base 4: mod_base = OTHER; note = 2'-O-methylguanosine-3'-phosphate
  modified_base 5: mod_base = OTHER; note = 2'-O-methylguanosine-3'-phosphate
  modified_base 6: mod_base = OTHER; note = 2'-O-methyluridine-3'-phosphate
  modified_base 7: mod_base = OTHER; note = 2'-fluorouridine-3'-phosphate
  modified_base 8: mod_base = OTHER; note = 2'-O-methylguanosine-3'-phosphate
  modified_base 9: mod_base = OTHER; note = 2'-fluorouridine-3'-phosphate
  modified_base 10: mod_base = OTHER; note = 2'-fluorocytidine-3'-phosphate
  modified_base 11: mod_base = OTHER; note = 2'-fluoroadenosine-3'-phosphate
  modified_base 12: mod_base = OTHER; note = 2'-O-methylguanosine-3'-phosphate
  modified_base 13: mod_base = OTHER; note = 2'-O-methyladenosine-3'-phosphate
  modified_base 14: mod_base = OTHER; note = 2'-O-methylguanosine-3'-phosphate
  modified_base 15: mod_base = OTHER; note = 2'-O-methyladenosine-3'-phosphate
  modified_base 16: mod_base = OTHER; note = 2'-O-methyladenosine-3'-phosphate
  modified_base 17: mod_base = OTHER; note = 2'-O-methylguanosine-3'-phosphate
  modified_base 18: mod_base = OTHER; note = 2'-O-methyluridine-3'-phosphate
  modified_base 19: mod_base = OTHER; note = 2'-O-methyladenosine-3'-phosphate
  modified_base 20: mod_base = OTHER; note = 2'-O-methyluridine-3'-phosphate
  modified_base 21: mod_base = OTHER; note = 2'-O-methyluridine
caaggttgtcagagaagtatt

SEQ ID NO: 961 - RNA, 21 nt, synthetic construct
  source 1..21: mol_type = other RNA
  modified_base 1: mod_base = OTHER; note = 2'-O-methylguanosine-3'-phosphorothioate
  modified_base 2: mod_base = OTHER; note = 2'-O-methylguanosine-3'-phosphorothioate
  modified_base 3: mod_base = OTHER; note = 2'-O-methyluridine-3'-phosphate
  modified_base 4: mod_base = OTHER; note = 2'-O-methyluridine-3'-phosphate
  modified_base 5: mod_base = OTHER; note = 2'-O-methylguanosine-3'-phosphate
  modified_base 6: mod_base = OTHER; note = 2'-O-methyluridine-3'-phosphate
  modified_base 7: mod_base = OTHER; note = 2'-fluorocytidine-3'-phosphate
  modified_base 8: mod_base = OTHER; note = 2'-O-methyladenosine-3'-phosphate
  modified_base 9: mod_base = OTHER; note = 2'-fluoroguanosine-3'-phosphate
  modified_base 10: mod_base = OTHER; note = 2'-fluoroadenosine-3'-phosphate
  modified_base 11: mod_base = OTHER; note = 2'-fluoroguanosine-3'-phosphate
  modified_base 12: mod_base = OTHER; note = 2'-O-methyladenosine-3'-phosphate
  modified_base 13: mod_base = OTHER; note = 2'-O-methyladenosine-3'-phosphate
  modified_base 14: mod_base = OTHER; note = 2'-O-methylguanosine-3'-phosphate
  modified_base 15: mod_base = OTHER; note = 2'-O-methyluridine-3'-phosphate
  modified_base 16: mod_base = OTHER; note = 2'-O-methyladenosine-3'-phosphate
  modified_base 17: mod_base = OTHER; note = 2'-O-methyluridine-3'-phosphate
  modified_base 18: mod_base = OTHER; note = 2'-O-methyluridine-3'-phosphate
  modified_base 19: mod_base = OTHER; note = 2'-O-methyladenosine-3'-phosphate
  modified_base 20: mod_base = OTHER; note = 2'-O-methyladenosine-3'-phosphate
  modified_base 21: mod_base = OTHER; note = 2'-O-methyladenosine
ggttgtcagagaagtattaaa

SEQ ID NO: 962 - RNA, 21 nt, synthetic construct
  source 1..21: mol_type = other RNA
  modified_base 1: mod_base = OTHER; note = 2'-O-methyluridine-3'-phosphorothioate
  modified_base 2: mod_base = OTHER; note = 2'-O-methylcytidine-3'-phosphorothioate
  modified_base 3: mod_base = OTHER; note = 2'-O-methyladenosine-3'-phosphate
  modified_base 4: mod_base = OTHER; note = 2'-O-methylguanosine-3'-phosphate
  modified_base 5: mod_base = OTHER; note = 2'-O-methyladenosine-3'-phosphate
  modified_base 6: mod_base = OTHER; note = 2'-O-methylguanosine-3'-phosphate
  modified_base 7: mod_base = OTHER; note = 2'-fluoroadenosine-3'-phosphate
  modified_base 8: mod_base = OTHER; note = 2'-O-methyladenosine-3'-phosphate
  modified_base 9: mod_base = OTHER; note = 2'-fluoroguanosine-3'-phosphate
  modified_base 10: mod_base = OTHER; note = 2'-fluorouridine-3'-phosphate
  modified_base 11: mod_base = OTHER; note = 2'-fluoroadenosine-3'-phosphate
  modified_base 12: mod_base = OTHER; note = 2'-O-methyluridine-3'-phosphate
  modified_base 13: mod_base = OTHER; note = 2'-O-methyluridine-3'-phosphate
  modified_base 14: mod_base = OTHER; note = 2'-O-methyladenosine-3'-phosphate
  modified_base 15: mod_base = OTHER; note = 2'-O-methyladenosine-3'-phosphate
  modified_base 16: mod_base = OTHER; note = 2'-O-methyladenosine-3'-phosphate
  modified_base 17: mod_base = OTHER; note = 2'-O-methylguanosine-3'-phosphate
  modified_base 18: mod_base = OTHER; note = 2'-O-methyladenosine-3'-phosphate
  modified_base 19: mod_base = OTHER; note = 2'-O-methylcytidine-3'-phosphate
  modified_base 20: mod_base = OTHER; note = 2'-O-methyluridine-3'-phosphate
  modified_base 21: mod_base = OTHER; note = 2'-O-methyladenosine
tcagagaagtattaaagacta

SEQ ID NO: 963 - RNA, 21 nt, synthetic construct
  source 1..21: mol_type = other RNA
  modified_base 1: mod_base = OTHER; note = 2'-O-methyladenosine-3'-phosphorothioate
  modified_base 2: mod_base = OTHER; note = 2'-O-methylguanosine-3'-phosphorothioate
  modified_base 3: mod_base = OTHER; note = 2'-O-methyladenosine-3'-phosphate
  modified_base 4: mod_base = OTHER; note = 2'-O-methylguanosine-3'-phosphate
  modified_base 5: mod_base = OTHER; note = 2'-O-methyladenosine-3'-phosphate
  modified_base 6: mod_base = OTHER; note = 2'-O-methyladenosine-3'-phosphate
  modified_base 7: mod_base = OTHER; note = 2'-fluoroguanosine-3'-phosphate
  modified_base 8: mod_base = OTHER; note = 2'-O-methyluridine-3'-phosphate
  modified_base 9: mod_base = OTHER; note = 2'-fluoroadenosine-3'-phosphate
  modified_base 10: mod_base = OTHER; note = 2'-fluorouridine-3'-phosphate
  modified_base 11: mod_base = OTHER; note = 2'-fluorouridine-3'-phosphate
  modified_base 12: mod_base = OTHER; note = 2'-O-methyladenosine-3'-phosphate
  modified_base 13: mod_base = OTHER; note = 2'-O-methyladenosine-3'-phosphate
  modified_base 14: mod_base = OTHER; note = 2'-O-methyladenosine-3'-phosphate
  modified_base 15: mod_base = OTHER; note = 2'-O-methylguanosine-3'-phosphate
  modified_base 16: mod_base = OTHER; note = 2'-O-methyladenosine-3'-phosphate
  modified_base 17: mod_base = OTHER; note = 2'-O-methylcytidine-3'-phosphate
  modified_base 18: mod_base = OTHER; note = 2'-O-methyluridine-3'-phosphate
  modified_base 19: mod_base = OTHER; note = 2'-O-methyladenosine-3'-phosphate
  modified_base 20: mod_base = OTHER; note = 2'-O-methylcytidine-3'-phosphate
  modified_base 21: mod_base = OTHER; note = 2'-O-methyladenosine
agagaagtattaaagactaca

SEQ ID NO: 964 - RNA, 21 nt, synthetic construct
  source 1..21: mol_type = other RNA
  modified_base 1: mod_base = OTHER; note = 2'-O-methylguanosine-3'-phosphorothioate
  modified_base 2: mod_base = OTHER; note = 2'-O-methyladenosine-3'-phosphorothioate
  modified_base 3: mod_base = OTHER; note = 2'-O-methylguanosine-3'-phosphate
  modified_base 4: mod_base = OTHER; note = 2'-O-methyladenosine-3'-phosphate
  modified_base 5: mod_base = OTHER; note = 2'-O-methyladenosine-3'-phosphate
  modified_base 6: mod_base = OTHER; note = 2'-O-methylguanosine-3'-phosphate
  modified_base 7: mod_base = OTHER; note = 2'-fluorouridine-3'-phosphate
  modified_base 8: mod_base = OTHER; note = 2'-O-methyladenosine-3'-phosphate
  modified_base 9: mod_base = OTHER; note = 2'-fluorouridine-3'-phosphate
  modified_base 10: mod_base = OTHER; note = 2'-fluorouridine-3'-phosphate
  modified_base 11: mod_base = OTHER; note = 2'-fluoroadenosine-3'-phosphate
  modified_base 12: mod_base = OTHER; note = 2'-O-methyladenosine-3'-phosphate
  modified_base 13: mod_base = OTHER; note = 2'-O-methyladenosine-3'-phosphate
  modified_base 14: mod_base = OTHER; note = 2'-O-methylguanosine-3'-phosphate
  modified_base 15: mod_base = OTHER; note = 2'-O-methyladenosine-3'-phosphate
  modified_base 16: mod_base = OTHER; note = 2'-O-methylcytidine-3'-phosphate
  modified_base 17: mod_base = OTHER; note = 2'-O-methyluridine-3'-phosphate
  modified_base 18: mod_base = OTHER; note = 2'-O-methyladenosine-3'-phosphate
  modified_base 19: mod_base = OTHER; note = 2'-O-methylcytidine-3'-phosphate
  modified_base 20: mod_base = OTHER; note = 2'-O-methylcytidine-3'-phosphate
  modified_base 21: mod_base = OTHER; note = 2'-O-methyladenosine
gagaagtattaaagactacca

SEQ ID NO: 965 - RNA, 21 nt, synthetic construct
  source 1..21: mol_type = other RNA
  modified_base 1: mod_base = OTHER; note = 2'-O-methyladenosine-3'-phosphorothioate
  modified_base 2: mod_base = OTHER; note = 2'-O-methylguanosine-3'-phosphorothioate
  modified_base 3: mod_base = OTHER; note = 2'-O-methyladenosine-3'-phosphate
  modified_base 4: mod_base = OTHER; note = 2'-O-methyladenosine-3'-phosphate
  modified_base 5: mod_base = OTHER; note = 2'-O-methylguanosine-3'-phosphate
  modified_base 6: mod_base = OTHER; note = 2'-O-methyluridine-3'-phosphate
  modified_base 7: mod_base = OTHER; note = 2'-fluoroadenosine-3'-phosphate
  modified_base 8: mod_base = OTHER; note = 2'-O-methyluridine-3'-phosphate
  modified_base 9: mod_base = OTHER; note = 2'-fluorouridine-3'-phosphate
  modified_base 10: mod_base = OTHER; note = 2'-fluoroadenosine-3'-phosphate
  modified_base 11: mod_base = OTHER; note = 2'-fluoroadenosine-3'-phosphate
  modified_base 12: mod_base = OTHER; note = 2'-O-methyladenosine-3'-phosphate
  modified_base 13: mod_base = OTHER; note = 2'-O-methylguanosine-3'-phosphate
  modified_base 14: mod_base = OTHER; note = 2'-O-methyladenosine-3'-phosphate
  modified_base 15: mod_base = OTHER; note = 2'-O-methylcytidine-3'-phosphate
  modified_base 16: mod_base = OTHER; note = 2'-O-methyluridine-3'-phosphate
  modified_base 17: mod_base = OTHER; note = 2'-O-methyladenosine-3'-phosphate
  modified_base 18: mod_base = OTHER; note = 2'-O-methylcytidine-3'-phosphate
  modified_base 19: mod_base = OTHER; note = 2'-O-methylcytidine-3'-phosphate
  modified_base 20: mod_base = OTHER; note = 2'-O-methyladenosine-3'-phosphate
  modified_base 21: mod_base = OTHER; note = 2'-O-methyladenosine
agaagtattaaagactaccaa

SEQ ID NO: 966 - RNA, 21 nt, synthetic construct
  source 1..21: mol_type = other RNA
  modified_base 1: mod_base = OTHER; note = 2'-O-methylguanosine-3'-phosphorothioate
  modified_base 2: mod_base = OTHER; note = 2'-O-methyladenosine-3'-phosphorothioate
  modified_base 3: mod_base = OTHER; note = 2'-O-methylguanosine-3'-phosphate
  modified_base 4: mod_base = OTHER; note = 2'-O-methylguanosine-3'-phosphate
  modified_base 5: mod_base = OTHER; note = 2'-O-methylcytidine-3'-phosphate
  modified_base 6: mod_base = OTHER; note = 2'-O-methyluridine-3'-phosphate
  modified_base 7: mod_base = OTHER; note = 2'-fluoroadenosine-3'-phosphate
  modified_base 8: mod_base = OTHER; note = 2'-O-methyluridine-3'-phosphate
  modified_base 9: mod_base = OTHER; note = 2'-fluoroguanosine-3'-phosphate
  modified_base 10: mod_base = OTHER; note = 2'-fluoroadenosine-3'-phosphate
  modified_base 11: mod_base = OTHER; note = 2'-fluorouridine-3'-phosphate
  modified_base 12: mod_base = OTHER; note = 2'-O-methyluridine-3'-phosphate
  modified_base 13: mod_base = OTHER; note = 2'-O-methylguanosine-3'-phosphate
  modified_base 14: mod_base = OTHER; note = 2'-O-methyladenosine-3'-phosphate
  modified_base 15: mod_base = OTHER; note = 2'-O-methylguanosine-3'-phosphate
  modified_base 16: mod_base = OTHER; note = 2'-O-methylguanosine-3'-phosphate
  modified_base 17: mod_base = OTHER; note = 2'-O-methyluridine-3'-phosphate
  modified_base 18: mod_base = OTHER; note = 2'-O-methylcytidine-3'-phosphate
  modified_base 19: mod_base = OTHER; note = 2'-O-methyladenosine-3'-phosphate
  modified_base 20: mod_base = OTHER; note = 2'-O-methyladenosine-3'-phosphate
  modified_base 21: mod_base = OTHER; note = 2'-O-methyladenosine
gaggctatgattgaggtcaaa

SEQ ID NO: 967 - RNA, 21 nt, synthetic construct
  source 1..21: mol_type = other RNA
  modified_base 1: mod_base = OTHER; note = 2'-O-methyladenosine-3'-phosphorothioate
  modified_base 2: mod_base = OTHER; note = 2'-O-methylguanosine-3'-phosphorothioate
  modified_base 3: mod_base = OTHER; note = 2'-O-methylguanosine-3'-phosphate
  modified_base 4: mod_base = OTHER; note = 2'-O-methylcytidine-3'-phosphate
  modified_base 5: mod_base = OTHER; note = 2'-O-methyluridine-3'-phosphate
  modified_base 6: mod_base = OTHER; note = 2'-O-methyladenosine-3'-phosphate
  modified_base 7: mod_base = OTHER; note = 2'-fluorouridine-3'-phosphate
  modified_base 8: mod_base = OTHER; note = 2'-O-methylguanosine-3'-phosphate
  modified_base 9: mod_base = OTHER; note = 2'-fluoroadenosine-3'-phosphate
  modified_base 10: mod_base = OTHER; note = 2'-fluorouridine-3'-phosphate
  modified_base 11: mod_base = OTHER; note = 2'-fluorouridine-3'-phosphate
  modified_base 12: mod_base = OTHER; note = 2'-O-methylguanosine-3'-phosphate
  modified_base 13: mod_base = OTHER; note = 2'-O-methyladenosine-3'-phosphate
  modified_base 14: mod_base = OTHER; note = 2'-O-methylguanosine-3'-phosphate
  modified_base 15: mod_base = OTHER; note = 2'-O-methylguanosine-3'-phosphate
  modified_base 16: mod_base = OTHER; note = 2'-O-methyluridine-3'-phosphate
  modified_base 17: mod_base = OTHER; note = 2'-O-methylcytidine-3'-phosphate
  modified_base 18: mod_base = OTHER; note = 2'-O-methyladenosine-3'-phosphate
  modified_base 19: mod_base = OTHER; note = 2'-O-methyladenosine-3'-phosphate
  modified_base 20: mod_base = OTHER; note = 2'-O-methylcytidine-3'-phosphate
  modified_base 21: mod_base = OTHER; note = 2'-O-methyladenosine
aggctatgattgaggtcaaca

SEQ ID NO: 968 - RNA, 21 nt, synthetic construct
  source 1..21: mol_type = other RNA
  modified_base 1: mod_base = OTHER; note = 2'-O-methyluridine-3'-phosphorothioate
  modified_base 2: mod_base = OTHER; note = 2'-O-methyladenosine-3'-phosphorothioate
  modified_base 3: mod_base = OTHER; note = 2'-O-methyluridine-3'-phosphate
  modified_base 4: mod_base = OTHER; note = 2'-O-methylguanosine-3'-phosphate
  modified_base 5: mod_base = OTHER; note = 2'-O-methyladenosine-3'-phosphate
  modified_base 6: mod_base = OTHER; note = 2'-O-methyluridine-3'-phosphate
  modified_base 7: mod_base = OTHER; note = 2'-fluorouridine-3'-phosphate
  modified_base 8: mod_base = OTHER; note = 2'-O-methylguanosine-3'-phosphate
  modified_base 9: mod_base = OTHER; note = 2'-fluoroadenosine-3'-phosphate
  modified_base 10: mod_base = OTHER; note = 2'-fluoroguanosine-3'-phosphate
  modified_base 11: mod_base = OTHER; note = 2'-fluoroguanosine-3'-phosphate
  modified_base 12: mod_base = OTHER; note = 2'-O-methyluridine-3'-phosphate
  modified_base 13: mod_base = OTHER; note = 2'-O-methylcytidine-3'-phosphate
  modified_base 14: mod_base = OTHER; note = 2'-O-methyladenosine-3'-phosphate
  modified_base 15: mod_base = OTHER; note = 2'-O-methyladenosine-3'-phosphate
  modified_base 16: mod_base = OTHER; note = 2'-O-methylcytidine-3'-phosphate
  modified_base 17: mod_base = OTHER; note = 2'-O-methyladenosine-3'-phosphate
  modified_base 18: mod_base = OTHER; note = 2'-O-methyluridine-3'-phosphate
  modified_base 19: mod_base = OTHER; note = 2'-O-methyluridine-3'-phosphate
  modified_base 20: mod_base = OTHER; note = 2'-O-methyladenosine-3'-phosphate
  modified_base 21: mod_base = OTHER; note = 2'-O-methyladenosine
tatgattgaggtcaacattaa

SEQ ID NO: 969 - RNA, 21 nt, synthetic construct
  source 1..21: mol_type = other RNA
  modified_base 1: mod_base = OTHER; note = 2'-O-methyladenosine-3'-phosphorothioate
  modified_base 2: mod_base = OTHER; note = 2'-O-methyluridine-3'-phosphorothioate
  modified_base 3: mod_base = OTHER; note = 2'-O-methylguanosine-3'-phosphate
  modified_base 4: mod_base = OTHER; note = 2'-O-methyladenosine-3'-phosphate
  modified_base 5: mod_base = OTHER; note = 2'-O-methyluridine-3'-phosphate
  modified_base 6: mod_base = OTHER; note = 2'-O-methyluridine-3'-phosphate
  modified_base 7: mod_base = OTHER; note = 2'-fluoroguanosine-3'-phosphate
  modified_base 8: mod_base = OTHER; note = 2'-O-methyladenosine-3'-phosphate
  modified_base 9: mod_base = OTHER; note = 2'-fluoroguanosine-3'-phosphate
  modified_base 10: mod_base = OTHER; note = 2'-fluoroguanosine-3'-phosphate
  modified_base 11: mod_base = OTHER; note = 2'-fluorouridine-3'-phosphate
  modified_base 12: mod_base = OTHER; note = 2'-O-methylcytidine-3'-phosphate
  modified_base 13: mod_base = OTHER; note = 2'-O-methyladenosine-3'-phosphate
  modified_base 14: mod_base = OTHER; note = 2'-O-methyladenosine-3'-phosphate
  modified_base 15: mod_base = OTHER; note = 2'-O-methylcytidine-3'-phosphate
  modified_base 16: mod_base = OTHER; note = 2'-O-methyladenosine-3'-phosphate
  modified_base 17: mod_base = OTHER; note = 2'-O-methyluridine-3'-phosphate
  modified_base 18: mod_base = OTHER; note = 2'-O-methyluridine-3'-phosphate
  modified_base 19: mod_base = OTHER; note = 2'-O-methyladenosine-3'-phosphate
  modified_base 20: mod_base = OTHER; note = 2'-O-methyladenosine-3'-phosphate
  modified_base 21: mod_base = OTHER; note = 2'-O-methyladenosine
atgattgaggtcaacattaaa

SEQ ID NO: 970 - RNA, 21 nt, synthetic construct
  source 1..21: mol_type = other RNA
  modified_base 1: mod_base = OTHER; note = 2'-O-methylcytidine-3'-phosphorothioate
  modified_base 2: mod_base = OTHER; note = 2'-O-methyladenosine-3'-phosphorothioate
  modified_base 3: mod_base = OTHER; note = 2'-O-methyluridine-3'-phosphate
  modified_base 4: mod_base = OTHER; note = 2'-O-methyluridine-3'-phosphate
  modified_base 5: mod_base = OTHER; note = 2'-O-methyladenosine-3'-phosphate
  modified_base 6: mod_base = OTHER; note = 2'-O-methyladenosine-3'-phosphate
  modified_base 7: mod_base = OTHER; note = 2'-fluorocytidine-3'-phosphate
  modified_base 8: mod_base = OTHER; note = 2'-O-methyladenosine-3'-phosphate
  modified_base 9: mod_base = OTHER; note = 2'-fluoroadenosine-3'-phosphate
  modified_base 10: mod_base = OTHER; note = 2'-fluoroguanosine-3'-phosphate
  modified_base 11: mod_base = OTHER; note = 2'-fluoroadenosine-3'-phosphate
  modified_base 12: mod_base = OTHER; note = 2'-O-methyladenosine-3'-phosphate
  modified_base 13: mod_base = OTHER; note = 2'-O-methyluridine-3'-phosphate
  modified_base 14: mod_base = OTHER; note = 2'-O-methyluridine-3'-phosphate
  modified_base 15: mod_base = OTHER; note = 2'-O-methyluridine-3'-phosphate
  modified_base 16: mod_base = OTHER; note = 2'-O-methyladenosine-3'-phosphate
  modified_base 17: mod_base = OTHER; note = 2'-O-methylguanosine-3'-phosphate
  modified_base 18: mod_base = OTHER; note = 2'-O-methyluridine-3'-phosphate
  modified_base 19: mod_base = OTHER; note = 2'-O-methylguanosine-3'-phosphate
  modified_base 20: mod_base = OTHER; note = 2'-O-methylguanosine-3'-phosphate
  modified_base 21: mod_base = OTHER; note = 2'-O-methyladenosine
cattaacaagaatttagtgga

SEQ ID NO: 971 - RNA, 21 nt, synthetic construct
  source 1..21: mol_type = other RNA
  modified_base 1: mod_base = OTHER; note = 2'-O-methyluridine-3'-phosphorothioate
  modified_base 2: mod_base = OTHER; note = 2'-O-methyladenosine-3'-phosphorothioate
  modified_base 3: mod_base = OTHER; note = 2'-O-methyladenosine-3'-phosphate
  modified_base 4: mod_base = OTHER; note = 2'-O-methylcytidine-3'-phosphate
  modified_base 5: mod_base = OTHER; note = 2'-O-methyladenosine-3'-phosphate
  modified_base 6: mod_base = OTHER; note = 2'-O-methyladenosine-3'-phosphate
  modified_base 7: mod_base = OTHER; note = 2'-fluoroguanosine-3'-phosphate
  modified_base 8: mod_base = OTHER; note = 2'-O-methyladenosine-3'-phosphate
  modified_base 9: mod_base = OTHER; note = 2'-fluoroadenosine-3'-phosphate
  modified_base 10: mod_base = OTHER; note = 2'-fluorouridine-3'-phosphate
  modified_base 11: mod_base = OTHER; note = 2'-fluorouridine-3'-phosphate
  modified_base 12: mod_base = OTHER; note = 2'-O-methyluridine-3'-phosphate
  modified_base 13: mod_base = OTHER; note = 2'-O-methyladenosine-3'-phosphate
  modified_base 14: mod_base = OTHER; note = 2'-O-methylguanosine-3'-phosphate
  modified_base 15: mod_base = OTHER; note = 2'-O-methyluridine-3'-phosphate
  modified_base 16: mod_base = OTHER; note = 2'-O-methylguanosine-3'-phosphate
  modified_base 17: mod_base = OTHER; note = 2'-O-methylguanosine-3'-phosphate
  modified_base 18: mod_base = OTHER; note = 2'-O-methylguanosine-3'-phosphate
  modified_base 19: mod_base = OTHER; note = 2'-O-methylcytidine-3'-phosphate
  modified_base 20: mod_base = OTHER; note = 2'-O-methyluridine-3'-phosphate
  modified_base 21: mod_base = OTHER; note = 2'-O-methyladenosine
taacaagaatttagtgggcta

SEQ ID NO: 972 - RNA, 21 nt, synthetic construct
  source 1..21: mol_type = other RNA
  modified_base 1: mod_base = OTHER; note = 2'-O-methyladenosine-3'-phosphorothioate
  modified_base 2: mod_base = OTHER; note = 2'-O-methylguanosine-3'-phosphorothioate
  modified_base 3: mod_base = OTHER; note = 2'-O-methyladenosine-3'-phosphate
  modified_base 4: mod_base = OTHER; note = 2'-O-methyladenosine-3'-phosphate
  modified_base 5: mod_base = OTHER; note = 2'-O-methyluridine-3'-phosphate
  modified_base 6: mod_base = OTHER; note = 2'-O-methyluridine-3'-phosphate
  modified_base 7: mod_base = OTHER; note = 2'-fluorouridine-3'-phosphate
  modified_base 8: mod_base = OTHER; note = 2'-O-methyladenosine-3'-phosphate
  modified_base 9: mod_base = OTHER; note = 2'-fluoroguanosine-3'-phosphate
  modified_base 10: mod_base = OTHER; note = 2'-fluorouridine-3'-phosphate
  modified_base 11: mod_base = OTHER; note = 2'-fluoroguanosine-3'-phosphate
  modified_base 12: mod_base = OTHER; note = 2'-O-methylguanosine-3'-phosphate
  modified_base 13: mod_base = OTHER; note = 2'-O-methylguanosine-3'-phosphate
  modified_base 14: mod_base = OTHER; note = 2'-O-methylcytidine-3'-phosphate
  modified_base 15: mod_base = OTHER; note = 2'-O-methyluridine-3'-phosphate
  modified_base 16: mod_base = OTHER; note = 2'-O-methylcytidine-3'-phosphate
  modified_base 17: mod_base = OTHER; note = 2'-O-methyluridine-3'-phosphate
  modified_base 18: mod_base = OTHER; note = 2'-O-methylguanosine-3'-phosphate
  modified_base 19: mod_base = OTHER; note = 2'-O-methylcytidine-3'-phosphate
  modified_base 20: mod_base = OTHER; note = 2'-O-methylcytidine-3'-phosphate
  modified_base 21: mod_base = OTHER; note = 2'-O-methyladenosine
agaatttagtgggctctgcca

SEQ ID NO: 973 - RNA, 21 nt, synthetic construct
  source 1..21: mol_type = other RNA
  modified_base 1: mod_base = OTHER; note = 2'-O-methyluridine-3'-phosphorothioate
  modified_base 2: mod_base = OTHER; note = 2'-O-methylguanosine-3'-phosphorothioate
  modified_base 3: mod_base = OTHER; note = 2'-O-methylcytidine-3'-phosphate
  modified_base 4: mod_base = OTHER; note = 2'-O-methylcytidine-3'-phosphate
  modified_base 5: mod_base = OTHER; note = 2'-O-methyladenosine-3'-phosphate
  modified_base 6: mod_base = OTHER; note = 2'-O-methyluridine-3'-phosphate
  modified_base 7: mod_base = OTHER; note = 2'-fluoroguanosine-3'-phosphate
  modified_base 8: mod_base = OTHER; note = 2'-O-methylguanosine-3'-phosphate
  modified_base 9: mod_base = OTHER; note = 2'-fluorocytidine-3'-phosphate
  modified_base 10: mod_base = OTHER; note = 2'-fluorouridine-3'-phosphate
  modified_base 11: mod_base = OTHER; note = 2'-fluoroguanosine-3'-phosphate
  modified_base 12: mod_base = OTHER; note = 2'-O-methylguanosine-3'-phosphate
  modified_base 13: mod_base = OTHER; note = 2'-O-methylguanosine-3'-phosphate
  modified_base 14: mod_base = OTHER; note = 2'-O-methyladenosine-3'-phosphate
  modified_base 15: mod_base = OTHER; note = 2'-O-methylguanosine-3'-phosphate
  modified_base 16: mod_base = OTHER; note = 2'-O-methylcytidine-3'-phosphate
  modified_base 17: mod_base = OTHER; note = 2'-O-methyladenosine-3'-phosphate
  modified_base 18: mod_base = OTHER; note = 2'-O-methyluridine-3'-phosphate
  modified_base 19: mod_base = OTHER; note = 2'-O-methyladenosine-3'-phosphate
  modified_base 20: mod_base = OTHER; note = 2'-O-methylguanosine-3'-phosphate
  modified_base 21: mod_base = OTHER; note = 2'-O-methyladenosine
tgccatggctgggagcataga

SEQ ID NO: 974 - RNA, 21 nt, synthetic construct
  source 1..21: mol_type = other RNA
  modified_base 1: mod_base = OTHER; note = 2'-O-methylguanosine-3'-phosphorothioate
  modified_base 2: mod_base = OTHER; note = 2'-O-methylcytidine-3'-phosphorothioate
  modified_base 3: mod_base = OTHER; note = 2'-O-methylcytidine-3'-phosphate
  modified_base 4: mod_base = OTHER; note = 2'-O-methyladenosine-3'-phosphate
  modified_base 5: mod_base = OTHER; note = 2'-O-methyluridine-3'-phosphate
  modified_base 6: mod_base = OTHER; note = 2'-O-methylguanosine-3'-phosphate
  modified_base 7: mod_base = OTHER; note = 2'-fluoroguanosine-3'-phosphate
  modified_base 8: mod_base = OTHER; note = 2'-O-methylcytidine-3'-phosphate
  modified_base 9: mod_base = OTHER; note = 2'-fluorouridine-3'-phosphate
  modified_base 10: mod_base = OTHER; note = 2'-fluoroguanosine-3'-phosphate
  modified_base 11: mod_base = OTHER; note = 2'-fluoroguanosine-3'-phosphate
  modified_base 12: mod_base = OTHER; note = 2'-O-methylguanosine-3'-phosphate
  modified_base 13: mod_base = OTHER; note = 2'-O-methyladenosine-3'-phosphate
  modified_base 14: mod_base = OTHER; note = 2'-O-methylguanosine-3'-phosphate
  modified_base 15: mod_base = OTHER; note = 2'-O-methylcytidine-3'-phosphate
  modified_base 16: mod_base = OTHER; note = 2'-O-methyladenosine-3'-phosphate
  modified_base 17: mod_base = OTHER; note = 2'-O-methyluridine-3'-phosphate
  modified_base 18: mod_base = OTHER; note = 2'-O-methyladenosine-3'-phosphate
  modified_base 19: mod_base = OTHER; note = 2'-O-methylguanosine-3'-phosphate
  modified_base 20: mod_base = OTHER; note = 2'-O-methylguanosine-3'-phosphate
  modified_base 21: mod_base = OTHER; note = 2'-O-methyladenosine
gccatggctgggagcatagga

SEQ ID NO: 975 - RNA, 21 nt, synthetic construct
  source 1..21: mol_type = other RNA
  modified_base 1: mod_base = OTHER; note = 2'-O-methyladenosine-3'-phosphorothioate
  modified_base 2: mod_base = OTHER; note = 2'-O-methylguanosine-3'-phosphorothioate
  modified_base 3: mod_base = OTHER; note = 2'-O-methylcytidine-3'-phosphate
  modified_base 4: mod_base = OTHER; note = 2'-O-methyladenosine-3'-phosphate
  modified_base 5: mod_base = OTHER; note = 2'-O-methyluridine-3'-phosphate
  modified_base 6: mod_base = OTHER; note = 2'-O-methyladenosine-3'-phosphate
  modified_base 7: mod_base = OTHER; note = 2'-fluoroguanosine-3'-phosphate
  modified_base 8: mod_base = OTHER; note = 2'-O-methylguanosine-3'-phosphate
  modified_base 9: mod_base = OTHER; note = 2'-fluoroadenosine-3'-phosphate
  modified_base 10: mod_base = OTHER; note = 2'-fluoroguanosine-3'-phosphate
  modified_base 11: mod_base = OTHER; note = 2'-fluoroguanosine-3'-phosphate
  modified_base 12: mod_base = OTHER; note = 2'-O-methylcytidine-3'-phosphate
  modified_base 13: mod_base = OTHER; note = 2'-O-methyluridine-3'-phosphate
  modified_base 14: mod_base = OTHER; note = 2'-O-methyladenosine-3'-phosphate
  modified_base 15: mod_base = OTHER; note = 2'-O-methylcytidine-3'-phosphate
  modified_base 16: mod_base = OTHER; note = 2'-O-methyladenosine-3'-phosphate
  modified_base 17: mod_base = OTHER; note = 2'-O-methyladenosine-3'-phosphate
  modified_base 18: mod_base = OTHER; note = 2'-O-methylcytidine-3'-phosphate
  modified_base 19: mod_base = OTHER; note = 2'-O-methylguanosine-3'-phosphate
  modified_base 20: mod_base = OTHER; note = 2'-O-methylcytidine-3'-phosphate
  modified_base 21: mod_base = OTHER; note = 2'-O-methyladenosine
agcataggaggctacaacgca

SEQ ID NO: 976 - RNA, 21 nt, synthetic construct
  source 1..21: mol_type = other RNA
  modified_base 1: mod_base = OTHER; note = 2'-O-methylguanosine-3'-phosphorothioate
  modified_base 2: mod_base = OTHER; note = 2'-O-methylcytidine-3'-phosphorothioate
  modified_base 3: mod_base = OTHER; note = 2'-O-methyladenosine-3'-phosphate
  modified_base 4: mod_base = OTHER; note = 2'-O-methyluridine-3'-phosphate
  modified_base 5: mod_base = OTHER; note = 2'-O-methyladenosine-3'-phosphate
  modified_base 6: mod_base = OTHER; note = 2'-O-methylguanosine-3'-phosphate
  modified_base 7: mod_base = OTHER; note = 2'-fluoroguanosine-3'-phosphate
  modified_base 8: mod_base = OTHER; note = 2'-O-methyladenosine-3'-phosphate
  modified_base 9: mod_base = OTHER; note = 2'-fluoroguanosine-3'-phosphate
  modified_base 10: mod_base = OTHER; note = 2'-fluoroguanosine-3'-phosphate
  modified_base 11: mod_base = OTHER; note = 2'-fluorocytidine-3'-phosphate
  modified_base 12: mod_base = OTHER; note = 2'-O-methyluridine-3'-phosphate
  modified_base 13: mod_base = OTHER; note = 2'-O-methyladenosine-3'-phosphate
  modified_base 14: mod_base = OTHER; note = 2'-O-methylcytidine-3'-phosphate
  modified_base 15: mod_base = OTHER; note = 2'-O-methyladenosine-3'-phosphate
  modified_base 16: mod_base = OTHER; note = 2'-O-methyladenosine-3'-phosphate
  modified_base 17: mod_base = OTHER; note = 2'-O-methylcytidine-3'-phosphate
  modified_base 18: mod_base = OTHER; note = 2'-O-methylguanosine-3'-phosphate
  modified_base 19: mod_base = OTHER; note = 2'-O-methylcytidine-3'-phosphate
  modified_base 20: mod_base = OTHER; note = 2'-O-methylcytidine-3'-phosphate
  modified_base 21: mod_base = OTHER; note = 2'-O-methyladenosine
gcataggaggctacaacgcca

SEQ ID NO: 977 - RNA, 21 nt, synthetic construct
  source 1..21: mol_type = other RNA
  modified_base 1: mod_base = OTHER; note = 2'-O-methyladenosine-3'-phosphorothioate
  modified_base 2: mod_base = OTHER; note = 2'-O-methylguanosine-3'-phosphorothioate
  modified_base 3: mod_base = OTHER; note = 2'-O-methylguanosine-3'-phosphate
  modified_base 4: mod_base = OTHER; note = 2'-O-methyladenosine-3'-phosphate
  modified_base 5: mod_base = OTHER; note = 2'-O-methylguanosine-3'-phosphate
  modified_base 6: mod_base = OTHER; note = 2'-O-methylguanosine-3'-phosphate
  modified_base 7: mod_base = OTHER; note = 2'-fluorocytidine-3'-phosphate
  modified_base 8: mod_base = OTHER; note = 2'-O-methyluridine-3'-phosphate
  modified_base 9: mod_base = OTHER; note = 2'-fluoroadenosine-3'-phosphate
  modified_base 10: mod_base = OTHER; note = 2'-fluorocytidine-3'-phosphate
  modified_base 11: mod_base = OTHER; note = 2'-fluoroadenosine-3'-phosphate
  modified_base 12: mod_base = OTHER; note = 2'-O-methyladenosine-3'-phosphate
  modified_base 13: mod_base = OTHER; note = 2'-O-methylcytidine-3'-phosphate
  modified_base 14: mod_base = OTHER; note = 2'-O-methylguanosine-3'-phosphate
  modified_base 15: mod_base = OTHER; note = 2'-O-methylcytidine-3'-phosphate
  modified_base 16: mod_base = OTHER; note = 2'-O-methylcytidine-3'-phosphate
  modified_base 17: mod_base = OTHER; note = 2'-O-methylcytidine-3'-phosphate
  modified_base 18: mod_base = OTHER; note = 2'-O-methyladenosine-3'-phosphate
  modified_base 19: mod_base = OTHER; note = 2'-O-methyluridine-3'-phosphate
  modified_base 20: mod_base = OTHER; note = 2'-O-methylguanosine-3'-phosphate
  modified_base 21: mod_base = OTHER; note = 2'-O-methyladenosine
aggaggctacaacgcccatga

SEQ ID NO: 978 - RNA, 21 nt, synthetic construct
  source 1..21: mol_type = other RNA
  modified_base 1: mod_base = OTHER; note = 2'-O-methylcytidine-3'-phosphorothioate
  modified_base 2: mod_base = OTHER; note = 2'-O-methyluridine-3'-phosphorothioate
  modified_base 3: mod_base = OTHER; note = 2'-O-methyladenosine-3'-phosphate
  modified_base 4: mod_base = OTHER; note = 2'-O-methylcytidine-3'-phosphate
  modified_base 5: mod_base = OTHER; note = 2'-O-methyladenosine-3'-phosphate
  modified_base 6: mod_base = OTHER; note = 2'-O-methyladenosine-3'-phosphate
  modified_base 7: mod_base = OTHER; note = 2'-fluorocytidine-3'-phosphate
  modified_base 8: mod_base = OTHER; note = 2'-O-methylguanosine-3'-phosphate
  modified_base 9: mod_base = OTHER; note = 2'-fluorocytidine-3'-phosphate
  modified_base 10: mod_base = OTHER; note = 2'-fluorocytidine-3'-phosphate
  modified_base 11: mod_base = OTHER; note = 2'-fluorocytidine-3'-phosphate
  modified_base 12: mod_base = OTHER; note = 2'-O-methyladenosine-3'-phosphate
  modified_base 13: mod_base = OTHER; note = 2'-O-methyluridine-3'-phosphate
  modified_base 14: mod_base = OTHER; note = 2'-O-methylguanosine-3'-phosphate
  modified_base 15: mod_base = OTHER; note = 2'-O-methylcytidine-3'-phosphate
  modified_base 16: mod_base = OTHER; note = 2'-O-methyladenosine-3'-phosphate
  modified_base 17: mod_base = OTHER; note = 2'-O-methylguanosine-3'-phosphate
  modified_base 18: mod_base = OTHER; note = 2'-O-methylcytidine-3'-phosphate
  modified_base 19: mod_base = OTHER; note = 2'-O-methyladenosine-3'-phosphate
  modified_base 20: mod_base = OTHER; note = 2'-O-methyladenosine-3'-phosphate
  modified_base 21: mod_base = OTHER; note = 2'-O-methyladenosine
ctacaacgcccatgcagcaaa

SEQ ID NO: 979 - RNA, 21 nt, synthetic construct
  source 1..21: mol_type = other RNA
  modified_base 1: mod_base = OTHER; note = 2'-O-methyladenosine-3'-phosphorothioate
  modified_base 2: mod_base = OTHER; note = 2'-O-methylcytidine-3'-phosphorothioate
  modified_base 3: mod_base = OTHER; note = 2'-O-methyladenosine-3'-phosphate
  modified_base 4: mod_base = OTHER; note = 2'-O-methyladenosine-3'-phosphate
  modified_base 5: mod_base = OTHER; note = 2'-O-methylcytidine-3'-phosphate
  modified_base 6: mod_base = OTHER; note = 2'-O-methylguanosine-3'-phosphate
  modified_base 7: mod_base = OTHER; note = 2'-fluorocytidine-3'-phosphate
  modified_base 8: mod_base = OTHER; note = 2'-O-methylcytidine-3'-phosphate
  modified_base 9: mod_base = OTHER; note = 2'-fluorocytidine-3'-phosphate
  modified_base 10: mod_base = OTHER; note = 2'-fluoroadenosine-3'-phosphate
  modified_base 11: mod_base = OTHER; note = 2'-fluorouridine-3'-phosphate
  modified_base 12: mod_base = OTHER; note = 2'-O-methylguanosine-3'-phosphate
  modified_base 13: mod_base = OTHER; note = 2'-O-methylcytidine-3'-phosphate
  modified_base 14: mod_base = OTHER; note = 2'-O-methyladenosine-3'-phosphate
  modified_base 15: mod_base = OTHER; note = 2'-O-methylguanosine-3'-phosphate
  modified_base 16: mod_base = OTHER; note = 2'-O-methylcytidine-3'-phosphate
  modified_base 17: mod_base = OTHER; note = 2'-O-methyladenosine-3'-phosphate
  modified_base 18: mod_base = OTHER; note = 2'-O-methyladenosine-3'-phosphate
  modified_base 19: mod_base = OTHER; note = 2'-O-methyladenosine-3'-phosphate
  modified_base 20: mod_base = OTHER; note = 2'-O-methylcytidine-3'-phosphate
  modified_base 21: mod_base = OTHER; note = 2'-O-methyladenosine
acaacgcccatgcagcaaaca

SEQ ID NO: 980 - RNA, 21 nt, synthetic construct
  source 1..21: mol_type = other RNA
  modified_base 1: mod_base = OTHER; note = 2'-O-methylcytidine-3'-phosphorothioate
  modified_base 2: mod_base = OTHER; note = 2'-O-methylcytidine-3'-phosphorothioate
  modified_base 3: mod_base = OTHER; note = 2'-O-methylcytidine-3'-phosphate
  modified_base 4: mod_base = OTHER; note = 2'-O-methyladenosine-3'-phosphate
  modified_base 5: mod_base = OTHER; note = 2'-O-methyluridine-3'-phosphate
  modified_base 6: mod_base = OTHER; note = 2'-O-methylguanosine-3'-phosphate
  modified_base 7: mod_base = OTHER; note = 2'-fluorocytidine-3'-phosphate
  modified_base 8: mod_base = OTHER; note = 2'-O-methyladenosine-3'-phosphate
  modified_base 9: mod_base = OTHER; note = 2'-fluoroguanosine-3'-phosphate
  modified_base 10: mod_base = OTHER; note = 2'-fluorocytidine-3'-phosphate
  modified_base 11: mod_base = OTHER; note = 2'-fluoroadenosine-3'-phosphate
  modified_base 12: mod_base = OTHER; note = 2'-O-methyladenosine-3'-phosphate
  modified_base 13: mod_base = OTHER; note = 2'-O-methyladenosine-3'-phosphate
  modified_base 14: mod_base = OTHER; note = 2'-O-methylcytidine-3'-phosphate
  modified_base 15: mod_base = OTHER; note = 2'-O-methyladenosine-3'-phosphate
  modified_base 16: mod_base = OTHER; note = 2'-O-methyluridine-3'-phosphate
  modified_base 17: mod_base = OTHER; note = 2'-O-methyluridine-3'-phosphate
  modified_base 18: mod_base = OTHER; note = 2'-O-methylguanosine-3'-phosphate
  modified_base 19: mod_base = OTHER; note = 2'-O-methyluridine-3'-phosphate
  modified_base 20: mod_base = OTHER; note = 2'-O-methylcytidine-3'-phosphate
  modified_base 21: mod_base = OTHER; note = 2'-O-methyladenosine
cccatgcagcaaacattgtca

SEQ ID NO: 981 - RNA, 21 nt, synthetic construct
  source 1..21: mol_type = other RNA
  modified_base 1: mod_base = OTHER; note = 2'-O-methylcytidine-3'-phosphorothioate
  modified_base 2: mod_base = OTHER; note = 2'-O-methylcytidine-3'-phosphorothioate
  modified_base 3: mod_base = OTHER; note = 2'-O-methyladenosine-3'-phosphate
  modified_base 4: mod_base = OTHER; note = 2'-O-methyluridine-3'-phosphate
  modified_base 5: mod_base = OTHER; note = 2'-O-methylguanosine-3'-phosphate
  modified_base 6: mod_base = OTHER; note = 2'-O-methylcytidine-3'-phosphate
  modified_base 7: mod_base = OTHER; note = 2'-fluoroadenosine-3'-phosphate
  modified_base 8: mod_base = OTHER; note = 2'-O-methylguanosine-3'-phosphate
  modified_base 9: mod_base = OTHER; note = 2'-fluorocytidine-3'-phosphate
  modified_base 10: mod_base = OTHER; note = 2'-fluoroadenosine-3'-phosphate
  modified_base 11: mod_base = OTHER; note = 2'-fluoroadenosine-3'-phosphate
  modified_base 12: mod_base = OTHER; note = 2'-O-methyladenosine-3'-phosphate
  modified_base 13: mod_base = OTHER; note = 2'-O-methylcytidine-3'-phosphate
  modified_base 14: mod_base = OTHER; note = 2'-O-methyladenosine-3'-phosphate
  modified_base 15: mod_base = OTHER; note = 2'-O-methyluridine-3'-phosphate
  modified_base 16: mod_base = OTHER; note = 2'-O-methyluridine-3'-phosphate
  modified_base 17: mod_base = OTHER; note = 2'-O-methylguanosine-3'-phosphate
  modified_base 18: mod_base = OTHER; note = 2'-O-methyluridine-3'-phosphate
  modified_base 19: mod_base = OTHER; note = 2'-O-methylcytidine-3'-phosphate
  modified_base 20: mod_base = OTHER; note = 2'-O-methyladenosine-3'-phosphate
  modified_base 21: mod_base = OTHER; note = 2'-O-methyladenosine
ccatgcagcaaacattgtcaa

SEQ ID NO: 982 - RNA, 21 nt, synthetic construct
  source 1..21: mol_type = other RNA
  modified_base 1: mod_base = OTHER; note = 2'-O-methylguanosine-3'-phosphorothioate
  modified_base 2: mod_base = OTHER; note = 2'-O-methylcytidine-3'-phosphorothioate
  modified_base 3: mod_base = OTHER; note = 2'-O-methylcytidine-3'-phosphate
  modified_base 4: mod_base = OTHER; note = 2'-O-methyladenosine-3'-phosphate
  modified_base 5: mod_base = OTHER; note = 2'-O-methyluridine-3'-phosphate
  modified_base 6: mod_base = OTHER; note = 2'-O-methylcytidine-3'-phosphate
  modified_base 7: mod_base = OTHER; note = 2'-fluorouridine-3'-phosphate
  modified_base 8: mod_base = OTHER; note = 2'-O-methyladenosine-3'-phosphate
  modified_base 9: mod_base = OTHER; note = 2'-fluorocytidine-3'-phosphate
  modified_base 10: mod_base = OTHER; note = 2'-fluoroadenosine-3'-phosphate
  modified_base 11: mod_base = OTHER; note = 2'-fluorouridine-3'-phosphate
  modified_base 12: mod_base = OTHER; note = 2'-O-methyluridine-3'-phosphate
  modified_base 13: mod_base = OTHER; note = 2'-O-methylguanosine-3'-phosphate
  modified_base 14: mod_base = OTHER; note = 2'-O-methylcytidine-3'-phosphate
  modified_base 15: mod_base = OTHER; note = 2'-O-methylcytidine-3'-phosphate
  modified_base 16: mod_base = OTHER; note = 2'-O-methyluridine-3'-phosphate
  modified_base 17: mod_base = OTHER; note = 2'-O-methylguanosine-3'-phosphate
  modified_base 18: mod_base = OTHER; note = 2'-O-methyluridine-3'-phosphate
  modified_base 19: mod_base = OTHER; note = 2'-O-methylguanosine-3'-phosphate
  modified_base 20: mod_base = OTHER; note = 2'-O-methylguanosine-3'-phosphate
  modified_base 21: mod_base = OTHER; note = 2'-O-methyladenosine
gccatctacattgcctgtgga

SEQ ID NO: 983 - RNA, 21 nt, synthetic construct
  source 1..21: mol_type = other RNA
  modified_base 1: mod_base = OTHER; note = 2'-O-methyladenosine-3'-phosphorothioate
  modified_base 2: mod_base = OTHER; note = 2'-O-methyluridine-3'-phosphorothioate
  modified_base 3: mod_base = OTHER; note = 2'-O-methylguanosine-3'-phosphate
  modified_base 4: mod_base = OTHER; note = 2'-O-methylcytidine-3'-phosphate
  modified_base 5: mod_base = OTHER; note = 2'-O-methyladenosine-3'-phosphate
  modified_base 6: mod_base = OTHER; note = 2'-O-methylguanosine-3'-phosphate
  modified_base 7: mod_base = OTHER; note = 2'-fluorocytidine-3'-phosphate
  modified_base 8: mod_base = OTHER; note = 2'-O-methyladenosine-3'-phosphate
  modified_base 9: mod_base = OTHER; note = 2'-fluorocytidine-3'-phosphate
  modified_base 10: mod_base = OTHER; note = 2'-fluoroadenosine-3'-phosphate
  modified_base 11: mod_base = OTHER; note = 2'-fluoroguanosine-3'-phosphate
  modified_base 12: mod_base = OTHER; note = 2'-O-methyladenosine-3'-phosphate
  modified_base 13: mod_base = OTHER; note = 2'-O-methyladenosine-3'-phosphate
  modified_base 14: mod_base = OTHER; note = 2'-O-methyluridine-3'-phosphate
  modified_base 15: mod_base = OTHER; note = 2'-O-methylguanosine-3'-phosphate
  modified_base 16: mod_base = OTHER; note = 2'-O-methyluridine-3'-phosphate
  modified_base 17: mod_base = OTHER; note = 2'-O-methyluridine-3'-phosphate
  modified_base 18: mod_base = OTHER; note = 2'-O-methylguanosine-3'-phosphate
  modified_base 19: mod_base = OTHER; note = 2'-O-methylguanosine-3'-phosphate
  modified_base 20: mod_base = OTHER; note = 2'-O-methyluridine-3'-phosphate
  modified_base 21: mod_base = OTHER; note = 2'-O-methyladenosine
atgcagcacagaatgttggta

SEQ ID NO: 984 - RNA, 21 nt, synthetic construct
  source 1..21: mol_type = other RNA
  modified_base 1: mod_base = OTHER; note = 2'-O-methylguanosine-3'-phosphorothioate
  modified_base 2: mod_base = OTHER; note = 2'-O-methylcytidine-3'-phosphorothioate
  modified_base 3: mod_base = OTHER; note = 2'-O-methyladenosine-3'-phosphate
  modified_base 4: mod_base = OTHER; note = 2'-O-methylguanosine-3'-phosphate
  modified_base 5: mod_base = OTHER; note = 2'-O-methylcytidine-3'-phosphate
  modified_base 6: mod_base = OTHER; note = 2'-O-methyladenosine-3'-phosphate
  modified_base 7: mod_base = OTHER; note = 2'-fluorocytidine-3'-phosphate
  modified_base 8: mod_base = OTHER; note = 2'-O-methyladenosine-3'-phosphate
  modified_base 9: mod_base = OTHER; note = 2'-fluoroguanosine-3'-phosphate
  modified_base 10: mod_base = OTHER; note = 2'-fluoroadenosine-3'-phosphate
  modified_base 11: mod_base = OTHER; note = 2'-fluoroadenosine-3'-phosphate
  modified_base 12: mod_base = OTHER; note = 2'-O-methyluridine-3'-phosphate
  modified_base 13: mod_base = OTHER; note = 2'-O-methylguanosine-3'-phosphate
  modified_base 14: mod_base = OTHER; note = 2'-O-methyluridine-3'-phosphate
  modified_base 15: mod_base = OTHER; note = 2'-O-methyluridine-3'-phosphate
  modified_base 16: mod_base = OTHER; note = 2'-O-methylguanosine-3'-phosphate
  modified_base 17: mod_base = OTHER; note = 2'-O-methylguanosine-3'-phosphate
  modified_base 18: mod_base = OTHER; note = 2'-O-methyluridine-3'-phosphate
  modified_base 19: mod_base = OTHER; note = 2'-O-methyladenosine-3'-phosphate
  modified_base 20: mod_base = OTHER; note = 2'-O-methylguanosine-3'-phosphate
  modified_base 21: mod_base = OTHER; note = 2'-O-methyluridine
gcagcacagaatgttggtagt

SEQ ID NO: 985 - RNA, 21 nt, synthetic construct
  source 1..21: mol_type = other RNA
  modified_base 1: mod_base = OTHER; note = 2'-O-methylguanosine-3'-phosphorothioate
  modified_base 2: mod_base = OTHER; note = 2'-O-methylcytidine-3'-phosphorothioate
  modified_base 3: mod_base = OTHER; note = 2'-O-methyladenosine-3'-phosphate
  modified_base 4: mod_base = OTHER; note = 2'-O-methylcytidine-3'-phosphate
  modified_base 5: mod_base = OTHER; note = 2'-O-methyladenosine-3'-phosphate
  modified_base 6: mod_base = OTHER; note = 2'-O-methylguanosine-3'-phosphate
  modified_base 7: mod_base = OTHER; note = 2'-fluoroadenosine-3'-phosphate
  modified_base 8: mod_base = OTHER; note = 2'-O-methyladenosine-3'-phosphate
  modified_base 9: mod_base = OTHER; note = 2'-fluorouridine-3'-phosphate
  modified_base 10: mod_base = OTHER; note = 2'-fluoroguanosine-3'-phosphate
  modified_base 11: mod_base = OTHER; note = 2'-fluorouridine-3'-phosphate
  modified_base 12: mod_base = OTHER; note = 2'-O-methyluridine-3'-phosphate
  modified_base 13: mod_base = OTHER; note = 2'-O-methylguanosine-3'-phosphate
  modified_base 14: mod_base = OTHER; note = 2'-O-methylguanosine-3'-phosphate
  modified_base 15: mod_base = OTHER; note = 2'-O-methyluridine-3'-phosphate
  modified_base 16: mod_base = OTHER; note = 2'-O-methyladenosine-3'-phosphate
  modified_base 17: mod_base = OTHER; note = 2'-O-methylguanosine-3'-phosphate
  modified_base 18: mod_base = OTHER; note = 2'-O-methyluridine-3'-phosphate
  modified_base 19: mod_base = OTHER; note = 2'-O-methyluridine-3'-phosphate
  modified_base 20: mod_base = OTHER; note = 2'-O-methylcytidine-3'-phosphate
  modified_base 21: mod_base = OTHER; note = 2'-O-methyladenosine
gcacagaatgttggtagttca

SEQ ID NO: 986 - RNA, 21 nt, synthetic construct
  source 1..21: mol_type = other RNA
  modified_base 1: mod_base = OTHER; note = 2'-O-methyluridine-3'-phosphorothioate
  modified_base 2: mod_base = OTHER; note = 2'-O-methylcytidine-3'-phosphorothioate
  modified_base 3: mod_base = OTHER; note = 2'-O-methylcytidine-3'-phosphate
  modified_base 4: mod_base = OTHER; note = 2'-O-methylcytidine-3'-phosphate
  modified_base 5: mod_base = OTHER; note = 2'-O-methyladenosine-3'-phosphate
  modified_base 6: mod_base = OTHER; note = 2'-O-methylcytidine-3'-phosphate
  modified_base 7: mod_base = OTHER; note = 2'-fluoroadenosine-3'-phosphate
  modified_base 8: mod_base = OTHER; note = 2'-O-methyladenosine-3'-phosphate
  modified_base 9: mod_base = OTHER; note = 2'-fluoroadenosine-3'-phosphate
  modified_base 10: mod_base = OTHER; note = 2'-fluorouridine-3'-phosphate
  modified_base 11: mod_base = OTHER; note = 2'-fluoroguanosine-3'-phosphate
  modified_base 12: mod_base = OTHER; note = 2'-O-methyladenosine-3'-phosphate
  modified_base 13: mod_base = OTHER; note = 2'-O-methyladenosine-3'-phosphate
  modified_base 14: mod_base = OTHER; note = 2'-O-methylguanosine-3'-phosphate
  modified_base 15: mod_base = OTHER; note = 2'-O-methyladenosine-3'-phosphate
  modified_base 16: mod_base = OTHER; note = 2'-O-methyluridine-3'-phosphate
  modified_base 17: mod_base = OTHER; note = 2'-O-methyluridine-3'-phosphate
  modified_base 18: mod_base = OTHER; note = 2'-O-methyluridine-3'-phosphate
  modified_base 19: mod_base = OTHER; note = 2'-O-methyladenosine-3'-phosphate
  modified_base 20: mod_base = OTHER; note = 2'-O-methyluridine-3'-phosphate
  modified_base 21: mod_base = OTHER; note = 2'-O-methyladenosine
tcccacaaatgaagatttata

SEQ ID NO: 987 - RNA, 21 nt, synthetic construct
  source 1..21: mol_type = other RNA
  modified_base 1: mod_base = OTHER; note = 2'-O-methylcytidine-3'-phosphorothioate
  modified_base 2: mod_base = OTHER; note = 2'-O-methyladenosine-3'-phosphorothioate
  modified_base 3: mod_base = OTHER; note = 2'-O-methylcytidine-3'-phosphate
  modified_base 4: mod_base = OTHER; note = 2'-O-methyladenosine-3'-phosphate
  modified_base 5: mod_base = OTHER; note = 2'-O-methyladenosine-3'-phosphate
  modified_base 6: mod_base = OTHER; note = 2'-O-methyladenosine-3'-phosphate
  modified_base 7: mod_base = OTHER; note = 2'-fluorouridine-3'-phosphate
  modified_base 8: mod_base = OTHER; note = 2'-O-methylguanosine-3'-phosphate
  modified_base 9: mod_base = OTHER; note = 2'-fluoroadenosine-3'-phosphate
  modified_base 10: mod_base = OTHER; note = 2'-fluoroadenosine-3'-phosphate
  modified_base 11: mod_base = OTHER; note = 2'-fluoroguanosine-3'-phosphate
  modified_base 12: mod_base = OTHER; note = 2'-O-methyladenosine-3'-phosphate
  modified_base 13: mod_base = OTHER; note = 2'-O-methyluridine-3'-phosphate
  modified_base 14: mod_base = OTHER; note = 2'-O-methyluridine-3'-phosphate
  modified_base 15: mod_base = OTHER; note = 2'-O-methyluridine-3'-phosphate
  modified_base 16: mod_base = OTHER; note = 2'-O-methyladenosine-3'-phosphate
  modified_base 17: mod_base = OTHER; note = 2'-O-methyluridine-3'-phosphate
  modified_base 18: mod_base = OTHER; note = 2'-O-methyladenosine-3'-phosphate
  modified_base 19: mod_base = OTHER; note = 2'-O-methyluridine-3'-phosphate
  modified_base 20: mod_base = OTHER; note = 2'-O-methyladenosine-3'-phosphate
  modified_base 21: mod_base = OTHER; note = 2'-O-methyluridine
cacaaatgaagatttatatat

SEQ ID NO: 988 - RNA, 21 nt, synthetic construct
  source 1..21: mol_type = other RNA
  modified_base 1: mod_base = OTHER; note = 2'-O-methylcytidine-3'-phosphorothioate
  modified_base 2: mod_base = OTHER; note = 2'-O-methyladenosine-3'-phosphorothioate
  modified_base 3: mod_base = OTHER; note = 2'-O-methyladenosine-3'-phosphate
  modified_base 4: mod_base = OTHER; note = 2'-O-methyladenosine-3'-phosphate
  modified_base 5: mod_base = OTHER; note = 2'-O-methyluridine-3'-phosphate
  modified_base 6: mod_base = OTHER; note = 2'-O-methylguanosine-3'-phosphate
  modified_base 7: mod_base = OTHER; note = 2'-fluoroadenosine-3'-phosphate
  modified_base 8: mod_base = OTHER; note = 2'-O-methyladenosine-3'-phosphate
  modified_base 9: mod_base = OTHER; note = 2'-fluoroguanosine-3'-phosphate
  modified_base 10: mod_base = OTHER; note = 2'-fluoroadenosine-3'-phosphate
  modified_base 11: mod_base = OTHER; note = 2'-fluorouridine-3'-phosphate
  modified_base 12: mod_base = OTHER; note = 2'-O-methyluridine-3'-phosphate
  modified_base 13: mod_base = OTHER; note = 2'-O-methyluridine-3'-phosphate
  modified_base 14: mod_base = OTHER; note = 2'-O-methyladenosine-3'-phosphate
  modified_base 15: mod_base = OTHER; note = 2'-O-methyluridine-3'-phosphate
  modified_base 16: mod_base = OTHER; note = 2'-O-methyladenosine-3'-phosphate
  modified_base 17: mod_base = OTHER; note = 2'-O-methyluridine-3'-phosphate
  modified_base 18: mod_base = OTHER; note = 2'-O-methyladenosine-3'-phosphate
  modified_base 19: mod_base = OTHER; note = 2'-O-methyluridine-3'-phosphate
  modified_base 20: mod_base = OTHER; note = 2'-O-methylcytidine-3'-phosphate
  modified_base 21: mod_base = OTHER; note = 2'-O-methyladenosine
caaatgaagatttatatatca

SEQ ID NO: 989 - RNA, 21 nt, synthetic construct
  source 1..21: mol_type = other RNA
  modified_base 1: mod_base = OTHER; note = 2'-O-methyluridine-3'-phosphorothioate
  modified_base 2: mod_base = OTHER; note = 2'-O-methylcytidine-3'-phosphorothioate
  modified_base 3: mod_base = OTHER; note = 2'-O-methyladenosine-3'-phosphate
  modified_base 4: mod_base = OTHER; note = 2'-O-methylguanosine-3'-phosphate
  modified_base 5: mod_base = OTHER; note = 2'-O-methylcytidine-3'-phosphate
  modified_base 6: mod_base = OTHER; note = 2'-O-methyluridine-3'-phosphate
  modified_base 7: mod_base = OTHER; note = 2'-fluoroguanosine-3'-phosphate
  modified_base 8: mod_base = OTHER; note = 2'-O-methylcytidine-3'-phosphate
  modified_base 9: mod_base = OTHER; note = 2'-fluoroadenosine-3'-phosphate
  modified_base 10: mod_base = OTHER; note = 2'-fluorocytidine-3'-phosphate
  modified_base 11: mod_base = OTHER; note = 2'-fluorocytidine-3'-phosphate
  modified_base 12: mod_base = OTHER; note = 2'-O-methyladenosine-3'-phosphate
  modified_base 13: mod_base = OTHER; note = 2'-O-methyluridine-3'-phosphate
  modified_base 14: mod_base = OTHER; note = 2'-O-methylguanosine-3'-phosphate
  modified_base 15: mod_base = OTHER; note = 2'-O-methylcytidine-3'-phosphate
  modified_base 16: mod_base = OTHER; note = 2'-O-methylcytidine-3'-phosphate
  modified_base 17: mod_base = OTHER; note = 2'-O-methyladenosine-3'-phosphate
  modified_base 18: mod_base = OTHER; note = 2'-O-methyluridine-3'-phosphate
  modified_base 19: mod_base = OTHER; note = 2'-O-methylcytidine-3'-phosphate
  modified_base 20: mod_base = OTHER; note = 2'-O-methyluridine-3'-phosphate
  modified_base 21: mod_base = OTHER; note = 2'-O-methyladenosine
tcagctgcaccatgccatcta

SEQ ID NO: 990 - RNA, 21 nt, synthetic construct
  source 1..21: mol_type = other RNA
  modified_base 1: mod_base = OTHER; note = 2'-O-methyluridine-3'-phosphorothioate
  modified_base 2: mod_base = OTHER; note = 2'-O-methyluridine-3'-phosphorothioate
  modified_base 3: mod_base = OTHER; note = 2'-O-methyluridine-3'-phosphate
  modified_base 4: mod_base = OTHER; note = 2'-O-methylguanosine-3'-phosphate
  modified_base 5: mod_base = OTHER; note = 2'-O-methylcytidine-3'-phosphate
  modified_base 6: mod_base = OTHER; note = 2'-O-methyladenosine-3'-phosphate
  modified_base 7: mod_base = OTHER; note = 2'-fluoroguanosine-3'-phosphate
  modified_base 8: mod_base = OTHER; note = 2'-O-methyladenosine-3'-phosphate
  modified_base 9: mod_base = OTHER; note = 2'-fluorouridine-3'-phosphate
  modified_base 10: mod_base = OTHER; note = 2'-fluoroguanosine-3'-phosphate
  modified_base 11: mod_base = OTHER; note = 2'-fluorocytidine-3'-phosphate
  modified_base 12: mod_base = OTHER; note = 2'-O-methyluridine-3'-phosphate
  modified_base 13: mod_base = OTHER; note = 2'-O-methyladenosine-3'-phosphate
  modified_base 14: mod_base = OTHER; note = 2'-O-methylguanosine-3'-phosphate
  modified_base 15: mod_base = OTHER; note = 2'-O-methylguanosine-3'-phosphate
  modified_base 16: mod_base = OTHER; note = 2'-O-methyluridine-3'-phosphate
  modified_base 17: mod_base = OTHER; note = 2'-O-methylguanosine-3'-phosphate
  modified_base 18: mod_base = OTHER; note = 2'-O-methyluridine-3'-phosphate
  modified_base 19: mod_base = OTHER; note = 2'-O-methyluridine-3'-phosphate
  modified_base 20: mod_base = OTHER; note = 2'-O-methylcytidine-3'-phosphate
  modified_base 21: mod_base = OTHER; note = 2'-O-methyladenosine
tttgcagatgctaggtgttca

SEQ ID NO: 991 - RNA, 21 nt, synthetic construct
  source 1..21: mol_type = other RNA
  modified_base 1: mod_base = OTHER; note = 2'-O-methyluridine-3'-phosphorothioate
  modified_base 2: mod_base = OTHER; note = 2'-O-methyluridine-3'-phosphorothioate
  modified_base 3: mod_base = OTHER; note = 2'-O-methylguanosine-3'-phosphate
  modified_base 4: mod_base = OTHER; note = 2'-O-methylcytidine-3'-phosphate
  modified_base 5: mod_base = OTHER; note = 2'-O-methyladenosine-3'-phosphate
  modified_base 6: mod_base = OTHER; note = 2'-O-methylguanosine-3'-phosphate
  modified_base 7: mod_base = OTHER; note = 2'-fluoroadenosine-3'-phosphate
  modified_base 8: mod_base = OTHER; note = 2'-O-methyluridine-3'-phosphate
  modified_base 9: mod_base = OTHER; note = 2'-fluoroguanosine-3'-phosphate
  modified_base 10: mod_base = OTHER; note = 2'-fluorocytidine-3'-phosphate
  modified_base 11: mod_base = OTHER; note = 2'-fluorouridine-3'-phosphate
  modified_base 12: mod_base = OTHER; note = 2'-O-methyladenosine-3'-phosphate
  modified_base 13: mod_base = OTHER; note = 2'-O-methylguanosine-3'-phosphate
  modified_base 14: mod_base = OTHER; note = 2'-O-methylguanosine-3'-phosphate
  modified_base 15: mod_base = OTHER; note = 2'-O-methyluridine-3'-phosphate
  modified_base 16: mod_base = OTHER; note = 2'-O-methylguanosine-3'-phosphate
  modified_base 17: mod_base = OTHER; note = 2'-O-methyluridine-3'-phosphate
  modified_base 18: mod_base = OTHER; note = 2'-O-methyluridine-3'-phosphate
  modified_base 19: mod_base = OTHER; note = 2'-O-methylcytidine-3'-phosphate
  modified_base 20: mod_base = OTHER; note = 2'-O-methyladenosine-3'-phosphate
  modified_base 21: mod_base = OTHER; note = 2'-O-methyladenosine
ttgcagatgctaggtgttcaa

SEQ ID NO: 992 - RNA, 21 nt, synthetic construct
  source 1..21: mol_type = other RNA
  modified_base 1: mod_base = OTHER; note = 2'-O-methylcytidine-3'-phosphorothioate
  modified_base 2: mod_base = OTHER; note = 2'-O-methyladenosine-3'-phosphorothioate
  modified_base 3: mod_base = OTHER; note = 2'-O-methylguanosine-3'-phosphate
  modified_base 4: mod_base = OTHER; note = 2'-O-methyladenosine-3'-phosphate
  modified_base 5: mod_base = OTHER; note = 2'-O-methyluridine-3'-phosphate
  modified_base 6: mod_base = OTHER; note = 2'-O-methylguanosine-3'-phosphate
  modified_base 7: mod_base = OTHER; note = 2'-fluorocytidine-3'-phosphate
  modified_base 8: mod_base = OTHER; note = 2'-O-methyluridine-3'-phosphate
  modified_base 9: mod_base = OTHER; note = 2'-fluoroadenosine-3'-phosphate
  modified_base 10: mod_base = OTHER; note = 2'-fluoroguanosine-3'-phosphate
  modified_base 11: mod_base = OTHER; note = 2'-fluoroguanosine-3'-phosphate
  modified_base 12: mod_base = OTHER; note = 2'-O-methyluridine-3'-phosphate
  modified_base 13: mod_base = OTHER; note = 2'-O-methylguanosine-3'-phosphate
  modified_base 14: mod_base = OTHER; note = 2'-O-methyluridine-3'-phosphate
  modified_base 15: mod_base = OTHER; note = 2'-O-methyluridine-3'-phosphate
  modified_base 16: mod_base = OTHER; note = 2'-O-methylcytidine-3'-phosphate
  modified_base 17: mod_base = OTHER; note = 2'-O-methyladenosine-3'-phosphate
  modified_base 18: mod_base = OTHER; note = 2'-O-methyladenosine-3'-phosphate
  modified_base 19: mod_base = OTHER; note = 2'-O-methylguanosine-3'-phosphate
  modified_base 20: mod_base = OTHER; note = 2'-O-methylguanosine-3'-phosphate
  modified_base 21: mod_base = OTHER; note = 2'-O-methyladenosine
cagatgctaggtgttcaagga

SEQ ID NO: 993 - RNA, 21 nt, synthetic construct
  source 1..21: mol_type = other RNA
  modified_base 1: mod_base = OTHER; note = 2'-O-methyluridine-3'-phosphorothioate
  modified_base 2: mod_base = OTHER; note = 2'-O-methyluridine-3'-phosphorothioate
  modified_base 3: mod_base = OTHER; note = 2'-O-methylcytidine-3'-phosphate
  modified_base 4: mod_base = OTHER; note = 2'-O-methyladenosine-3'-phosphate
  modified_base 5: mod_base = OTHER; note = 2'-O-methyladenosine-3'-phosphate
  modified_base 6: mod_base = OTHER; note = 2'-O-methylguanosine-3'-phosphate
  modified_base 7: mod_base = OTHER; note = 2'-fluoroguanosine-3'-phosphate
  modified_base 8: mod_base = OTHER; note = 2'-O-methyladenosine-3'-phosphate
  modified_base 9: mod_base = OTHER; note = 2'-fluoroguanosine-3'-phosphate
  modified_base 10: mod_base = OTHER; note = 2'-fluorocytidine-3'-phosphate
  modified_base 11: mod_base = OTHER; note = 2'-fluoroadenosine-3'-phosphate
  modified_base 12: mod_base = OTHER; note = 2'-O-methyluridine-3'-phosphate
  modified_base 13: mod_base = OTHER; note = 2'-O-methylguanosine-3'-phosphate
  modified_base 14: mod_base = OTHER; note = 2'-O-methylcytidine-3'-phosphate
  modified_base 15: mod_base = OTHER; note = 2'-O-methyladenosine-3'-phosphate
  modified_base 16: mod_base = OTHER; note = 2'-O-methyladenosine-3'-phosphate
  modified_base 17: mod_base = OTHER; note = 2'-O-methyladenosine-3'-phosphate
  modified_base 18: mod_base = OTHER; note = 2'-O-methylguanosine-3'-phosphate
  modified_base 19: mod_base = OTHER; note = 2'-O-methyladenosine-3'-phosphate
  modified_base 20: mod_base = OTHER; note = 2'-O-methyluridine-3'-phosphate
  modified_base 21: mod_base = OTHER; note = 2'-O-methyladenosine
ttcaaggagcatgcaaagata

SEQ ID NO: 994 - RNA, 21 nt, synthetic construct
  source 1..21: mol_type = other RNA
  modified_base 1: mod_base = OTHER; note = 2'-O-methyladenosine-3'-phosphorothioate
  modified_base 2: mod_base = OTHER; note = 2'-O-methyladenosine-3'-phosphorothioate
  modified_base 3: mod_base = OTHER; note = 2'-O-methyladenosine-3'-phosphate
  modified_base 4: mod_base = OTHER; note = 2'-O-methylguanosine-3'-phosphate
  modified_base 5: mod_base = OTHER; note = 2'-O-methyladenosine-3'-phosphate
  modified_base 6: mod_base = OTHER; note = 2'-O-methyluridine-3'-phosphate
  modified_base 7: mod_base = OTHER; note = 2'-fluoroadenosine-3'-phosphate
  modified_base 8: mod_base = OTHER; note = 2'-O-methyladenosine-3'-phosphate
  modified_base 9: mod_base = OTHER; note = 2'-fluorouridine-3'-phosphate
  modified_base 10: mod_base = OTHER; note = 2'-fluorocytidine-3'-phosphate
  modified_base 11: mod_base = OTHER; note = 2'-fluorocytidine-3'-phosphate
  modified_base 12: mod_base = OTHER; note = 2'-O-methyluridine-3'-phosphate
  modified_base 13: mod_base = OTHER; note = 2'-O-methylguanosine-3'-phosphate
  modified_base 14: mod_base = OTHER; note = 2'-O-methylguanosine-3'-phosphate
  modified_base 15: mod_base = OTHER; note = 2'-O-methylguanosine-3'-phosphate
  modified_base 16: mod_base = OTHER; note = 2'-O-methylguanosine-3'-phosphate
  modified_base 17: mod_base = OTHER; note = 2'-O-methyladenosine-3'-phosphate
  modified_base 18: mod_base = OTHER; note = 2'-O-methyladenosine-3'-phosphate
  modified_base 19: mod_base = OTHER; note = 2'-O-methyladenosine-3'-phosphate
  modified_base 20: mod_base = OTHER; note = 2'-O-methyladenosine-3'-phosphate
  modified_base 21: mod_base = OTHER; note = 2'-O-methyluridine
aaagataatcctggggaaaat

SEQ ID NO: 995 - RNA, 21 nt, synthetic construct
  source 1..21: mol_type = other RNA
  modified_base 1: mod_base = OTHER; note = 2'-O-methylguanosine-3'-phosphorothioate
  modified_base 2: mod_base = OTHER; note = 2'-O-methylguanosine-3'-phosphorothioate
  modified_base 3: mod_base = OTHER; note = 2'-O-methyladenosine-3'-phosphate
  modified_base 4: mod_base = OTHER; note = 2'-O-methyladenosine-3'-phosphate
  modified_base 5: mod_base = OTHER; note = 2'-O-methyladenosine-3'-phosphate
  modified_base 6: mod_base = OTHER; note = 2'-O-methyladenosine-3'-phosphate
  modified_base 7: mod_base = OTHER; note = 2'-fluorouridine-3'-phosphate
  modified_base 8: mod_base = OTHER; note = 2'-O-methylguanosine-3'-phosphate
  modified_base 9: mod_base = OTHER; note = 2'-fluorocytidine-3'-phosphate
  modified_base 10: mod_base = OTHER; note = 2'-fluorocytidine-3'-phosphate
  modified_base 11: mod_base = OTHER; note = 2'-fluorocytidine-3'-phosphate
  modified_base 12: mod_base = OTHER; note = 2'-O-methylguanosine-3'-phosphate
  modified_base 13: mod_base = OTHER; note = 2'-O-methylguanosine-3'-phosphate
  modified_base 14: mod_base = OTHER; note = 2'-O-methylcytidine-3'-phosphate
  modified_base 15: mod_base = OTHER; note = 2'-O-methyladenosine-3'-phosphate
  modified_base 16: mod_base = OTHER; note = 2'-O-methylguanosine-3'-phosphate
  modified_base 17: mod_base = OTHER; note = 2'-O-methylcytidine-3'-phosphate
  modified_base 18: mod_base = OTHER; note = 2'-O-methyluridine-3'-phosphate
  modified_base 19: mod_base = OTHER; note = 2'-O-methyluridine-3'-phosphate
  modified_base 20: mod_base = OTHER; note = 2'-O-methylguanosine-3'-phosphate
  modified_base 21: mod_base = OTHER; note = 2'-O-methyladenosine
ggaaaatgcccggcagcttga

SEQ ID NO: 996 - RNA, 21 nt, synthetic construct
  source 1..21: mol_type = other RNA
  modified_base 1: mod_base = OTHER; note = 2'-O-methylguanosine-3'-phosphorothioate
  modified_base 2: mod_base = OTHER; note = 2'-O-methylcytidine-3'-phosphorothioate
  modified_base 3: mod_base = OTHER; note = 2'-O-methylcytidine-3'-phosphate
  modified_base 4: mod_base = OTHER; note = 2'-O-methylcytidine-3'-phosphate
  modified_base 5: mod_base = OTHER; note = 2'-O-methylguanosine-3'-phosphate
  modified_base 6: mod_base = OTHER; note = 2'-O-methylguanosine-3'-phosphate
  modified_base 7: mod_base = OTHER; note = 2'-fluorocytidine-3'-phosphate
  modified_base 8: mod_base = OTHER; note = 2'-O-methyladenosine-3'-phosphate
  modified_base 9: mod_base = OTHER; note = 2'-fluoroguanosine-3'-phosphate
  modified_base 10: mod_base = OTHER; note = 2'-fluorocytidine-3'-phosphate
  modified_base 11: mod_base = OTHER; note = 2'-fluorouridine-3'-phosphate
  modified_base 12: mod_base = OTHER; note = 2'-O-methyluridine-3'-phosphate
  modified_base 13: mod_base = OTHER; note = 2'-O-methylguanosine-3'-phosphate
  modified_base 14: mod_base = OTHER; note = 2'-O-methylcytidine-3'-phosphate
  modified_base 15: mod_base = OTHER; note = 2'-O-methylcytidine-3'-phosphate
  modified_base 16: mod_base = OTHER; note = 2'-O-methylcytidine-3'-phosphate
  modified_base 17: mod_base = OTHER; note = 2'-O-methylguanosine-3'-phosphate
  modified_base 18: mod_base = OTHER; note = 2'-O-methyladenosine-3'-phosphate
  modified_base 19: mod_base = OTHER; note = 2'-O-methyladenosine-3'-phosphate
  modified_base 20: mod_base = OTHER; note = 2'-O-methyluridine-3'-phosphate
  modified_base 21: mod_base = OTHER; note = 2'-O-methyluridine
gcccggcagcttgcccgaatt

SEQ ID NO: 997 - RNA, 21 nt, synthetic construct
  source 1..21: mol_type = other RNA
  modified_base 1: mod_base = OTHER; note = 2'-O-methylcytidine-3'-phosphorothioate
  modified_base 2: mod_base = OTHER; note = 2'-O-methyladenosine-3'-phosphorothioate
  modified_base 3: mod_base = OTHER; note = 2'-O-methylguanosine-3'-phosphate
  modified_base 4: mod_base = OTHER; note = 2'-O-methylcytidine-3'-phosphate
  modified_base 5: mod_base = OTHER; note = 2'-O-methyluridine-3'-phosphate
  modified_base 6: mod_base = OTHER; note = 2'-O-methyluridine-3'-phosphate
  modified_base 7: mod_base = OTHER; note = 2'-fluoroguanosine-3'-phosphate
  modified_base 8: mod_base = OTHER; note = 2'-O-methylcytidine-3'-phosphate
  modified_base 9: mod_base = OTHER; note = 2'-fluorocytidine-3'-phosphate
  modified_base 10: mod_base = OTHER; note = 2'-fluorocytidine-3'-phosphate
  modified_base 11: mod_base = OTHER; note = 2'-fluoroguanosine-3'-phosphate
  modified_base 12: mod_base = OTHER; note = 2'-O-methyladenosine-3'-phosphate
  modified_base 13: mod_base = OTHER; note = 2'-O-methyladenosine-3'-phosphate
  modified_base 14: mod_base = OTHER; note = 2'-O-methyluridine-3'-phosphate
  modified_base 15: mod_base = OTHER; note = 2'-O-methyluridine-3'-phosphate
  modified_base 16: mod_base = OTHER; note = 2'-O-methylguanosine-3'-phosphate
  modified_base 17: mod_base = OTHER; note = 2'-O-methyluridine-3'-phosphate
  modified_base 18: mod_base = OTHER; note = 2'-O-methylguanosine-3'-phosphate
  modified_base 19: mod_base = OTHER; note = 2'-O-methyluridine-3'-phosphate
  modified_base 20: mod_base = OTHER; note = 2'-O-methylguanosine-3'-phosphate
  modified_base 21: mod_base = OTHER; note = 2'-O-methyluridine
cagcttgcccgaattgtgtgt

SEQ ID NO: 998 - RNA, 21 nt, synthetic construct
  source 1..21: mol_type = other RNA
  modified_base 1: mod_base = OTHER; note = 2'-O-methylcytidine-3'-phosphorothioate
  modified_base 2: mod_base = OTHER; note = 2'-O-methylcytidine-3'-phosphorothioate
  modified_base 3: mod_base = OTHER; note = 2'-O-methylguanosine-3'-phosphate
  modified_base 4: mod_base = OTHER; note = 2'-O-methyluridine-3'-phosphate
  modified_base 5: mod_base = OTHER; note = 2'-O-methyladenosine-3'-phosphate
  modified_base 6: mod_base = OTHER; note = 2'-O-methyladenosine-3'-phosphate
  modified_base 7: mod_base = OTHER; note = 2'-fluorouridine-3'-phosphate
  modified_base 8: mod_base = OTHER; note = 2'-O-methylguanosine-3'-phosphate
  modified_base 9: mod_base = OTHER; note = 2'-fluoroguanosine-3'-phosphate
  modified_base 10: mod_base = OTHER; note = 2'-fluorocytidine-3'-phosphate
  modified_base 11: mod_base = OTHER; note = 2'-fluorouridine-3'-phosphate
  modified_base 12: mod_base = OTHER; note = 2'-O-methylguanosine-3'-phosphate
  modified_base 13: mod_base = OTHER; note = 2'-O-methylguanosine-3'-phosphate
  modified_base 14: mod_base = OTHER; note = 2'-O-methylguanosine-3'-phosphate
  modified_base 15: mod_base = OTHER; note = 2'-O-methylguanosine-3'-phosphate
  modified_base 16: mod_base = OTHER; note = 2'-O-methyladenosine-3'-phosphate
  modified_base 17: mod_base = OTHER; note = 2'-O-methyladenosine-3'-phosphate
  modified_base 18: mod_base = OTHER; note = 2'-O-methyluridine-3'-phosphate
  modified_base 19: mod_base = OTHER; note = 2'-O-methyluridine-3'-phosphate
  modified_base 20: mod_base = OTHER; note = 2'-O-methylguanosine-3'-phosphate
  modified_base 21: mod_base = OTHER; note = 2'-O-methyluridine
ccgtaatggctggggaattgt

SEQ ID NO: 999 - RNA, 21 nt, synthetic construct
  source 1..21: mol_type = other RNA
  modified_base 1: mod_base = OTHER; note = 2'-O-methylguanosine-3'-phosphorothioate
  modified_base 2: mod_base = OTHER; note = 2'-O-methyluridine-3'-phosphorothioate
  modified_base 3: mod_base = OTHER; note = 2'-O-methylcytidine-3'-phosphate
  modified_base 4: mod_base = OTHER; note = 2'-O-methyladenosine-3'-phosphate
  modified_base 5: mod_base = OTHER; note = 2'-O-methylcytidine-3'-phosphate
  modified_base 6: mod_base = OTHER; note = 2'-O-methyluridine-3'-phosphate
  modified_base 7: mod_base = OTHER; note = 2'-fluorouridine-3'-phosphate
  modified_base 8: mod_base = OTHER; note = 2'-O-methyladenosine-3'-phosphate
  modified_base 9: mod_base = OTHER; note = 2'-fluorouridine-3'-phosphate
  modified_base 10: mod_base = OTHER; note = 2'-fluoroguanosine-3'-phosphate
  modified_base 11: mod_base = OTHER; note = 2'-fluoroguanosine-3'-phosphate
  modified_base 12: mod_base = OTHER; note = 2'-O-methylcytidine-3'-phosphate
  modified_base 13: mod_base = OTHER; note = 2'-O-methyladenosine-3'-phosphate
  modified_base 14: mod_base = OTHER; note = 2'-O-methylguanosine-3'-phosphate
  modified_base 15: mod_base = OTHER; note = 2'-O-methylcytidine-3'-phosphate
  modified_base 16: mod_base = OTHER; note = 2'-O-methyladenosine-3'-phosphate
  modified_base 17: mod_base = OTHER; note = 2'-O-methyluridine-3'-phosphate
  modified_base 18: mod_base = OTHER; note = 2'-O-methyluridine-3'-phosphate
  modified_base 19: mod_base = OTHER; note = 2'-O-methylguanosine-3'-phosphate
  modified_base 20: mod_base = OTHER; note = 2'-O-methylguanosine-3'-phosphate
  modified_base 21: mod_base = OTHER; note = 2'-O-methyladenosine
gtcacttatggcagcattgga

SEQ ID NO: 1000 - RNA, 21 nt, synthetic construct
  source 1..21: mol_type = other RNA
  modified_base 1: mod_base = OTHER; note = 2'-O-methyladenosine-3'-phosphorothioate
  modified_base 2: mod_base = OTHER; note = 2'-O-methylcytidine-3'-phosphorothioate
  modified_base 3: mod_base = OTHER; note = 2'-O-methyladenosine-3'-phosphate
  modified_base 4: mod_base = OTHER; note = 2'-O-methyluridine-3'-phosphate
  modified_base 5: mod_base = OTHER; note = 2'-O-methylguanosine-3'-phosphate
  modified_base 6: mod_base = OTHER; note = 2'-O-methyladenosine-3'-phosphate
  modified_base 7: mod_base = OTHER; note = 2'-fluorouridine-3'-phosphate
  modified_base 8: mod_base = OTHER; note = 2'-O-methyluridine-3'-phosphate
  modified_base 9: mod_base = OTHER; note = 2'-fluorocytidine-3'-phosphate
  modified_base 10: mod_base = OTHER; note = 2'-fluoroadenosine-3'-phosphate
  modified_base 11: mod_base = OTHER; note = 2'-fluorocytidine-3'-phosphate
  modified_base 12: mod_base = OTHER; note = 2'-O-methyladenosine-3'-phosphate
  modified_base 13: mod_base = OTHER; note = 2'-O-methyladenosine-3'-phosphate
  modified_base 14: mod_base = OTHER; note = 2'-O-methylcytidine-3'-phosphate
  modified_base 15: mod_base = OTHER; note = 2'-O-methyladenosine-3'-phosphate
  modified_base 16: mod_base = OTHER; note = 2'-O-methylguanosine-3'-phosphate
  modified_base 17: mod_base = OTHER; note = 2'-O-methylguanosine-3'-phosphate
  modified_base 18: mod_base = OTHER; note = 2'-O-methyluridine-3'-phosphate
  modified_base 19: mod_base = OTHER; note = 2'-O-methylcytidine-3'-phosphate
  modified_base 20: mod_base = OTHER; note = 2'-O-methylguanosine-3'-phosphate
  modified_base 21: mod_base = OTHER; note = 2'-O-methyladenosine
acatgattcacaacaggtcga

SEQ ID NO: 1001 - RNA, 21 nt, synthetic construct
  source 1..21: mol_type = other RNA
  modified_base 1: mod_base = OTHER; note = 2'-O-methylcytidine-3'-phosphorothioate
  modified_base 2: mod_base = OTHER; note = 2'-O-methyladenosine-3'-phosphorothioate
  modified_base 3: mod_base = OTHER; note = 2'-O-methyluridine-3'-phosphate
  modified_base 4: mod_base = OTHER; note = 2'-O-methylguanosine-3'-phosphate
  modified_base 5: mod_base = OTHER; note = 2'-O-methyladenosine-3'-phosphate
  modified_base 6: mod_base = OTHER; note = 2'-O-methyluridine-3'-phosphate
  modified_base 7: mod_base = OTHER; note = 2'-fluorouridine-3'-phosphate
  modified_base 8: mod_base = OTHER; note = 2'-O-methylcytidine-3'-phosphate
  modified_base 9: mod_base = OTHER; note = 2'-fluoroadenosine-3'-phosphate
  modified_base 10: mod_base = OTHER; note = 2'-fluorocytidine-3'-phosphate
  modified_base 11: mod_base = OTHER; note = 2'-fluoroadenosine-3'-phosphate
  modified_base 12: mod_base = OTHER; note = 2'-O-methyladenosine-3'-phosphate
  modified_base 13: mod_base = OTHER; note = 2'-O-methylcytidine-3'-phosphate
  modified_base 14: mod_base = OTHER; note = 2'-O-methyladenosine-3'-phosphate
  modified_base 15: mod_base = OTHER; note = 2'-O-methylguanosine-3'-phosphate
  modified_base 16: mod_base = OTHER; note = 2'-O-methylguanosine-3'-phosphate
  modified_base 17: mod_base = OTHER; note = 2'-O-methyluridine-3'-phosphate
  modified_base 18: mod_base = OTHER; note = 2'-O-methylcytidine-3'-phosphate
  modified_base 19: mod_base = OTHER; note = 2'-O-methylguanosine-3'-phosphate
  modified_base 20: mod_base = OTHER; note = 2'-O-methyladenosine-3'-phosphate
  modified_base 21: mod_base = OTHER; note = 2'-O-methyladenosine
catgattcacaacaggtcgaa

SEQ ID NO: 1002 - RNA, 21 nt, synthetic construct
  source 1..21: mol_type = other RNA
  modified_base 1: mod_base = OTHER; note = 2'-O-methyladenosine-3'-phosphorothioate
  modified_base 2: mod_base = OTHER; note = 2'-O-methyluridine-3'-phosphorothioate
  modified_base 3: mod_base = OTHER; note = 2'-O-methylguanosine-3'-phosphate
  modified_base 4: mod_base = OTHER; note = 2'-O-methyladenosine-3'-phosphate
  modified_base 5: mod_base = OTHER; note = 2'-O-methyluridine-3'-phosphate
  modified_base 6: mod_base = OTHER; note = 2'-O-methyluridine-3'-phosphate
  modified_base 7: mod_base = OTHER; note = 2'-fluorocytidine-3'-phosphate
  modified_base 8: mod_base = OTHER; note = 2'-O-methyladenosine-3'-phosphate
  modified_base 9: mod_base = OTHER; note = 2'-fluorocytidine-3'-phosphate
  modified_base 10: mod_base = OTHER; note = 2'-fluoroadenosine-3'-phosphate
  modified_base 11: mod_base = OTHER; note = 2'-fluoroadenosine-3'-phosphate
  modified_base 12: mod_base = OTHER; note = 2'-O-methylcytidine-3'-phosphate
  modified_base 13: mod_base = OTHER; note = 2'-O-methyladenosine-3'-phosphate
  modified_base 14: mod_base = OTHER; note = 2'-O-methylguanosine-3'-phosphate
  modified_base 15: mod_base = OTHER; note = 2'-O-methylguanosine-3'-phosphate
  modified_base 16: mod_base = OTHER; note = 2'-O-methyluridine-3'-phosphate
  modified_base 17: mod_base = OTHER; note = 2'-O-methylcytidine-3'-phosphate
  modified_base 18: mod_base = OTHER; note = 2'-O-methylguanosine-3'-phosphate
  modified_base 19: mod_base = OTHER; note = 2'-O-methyladenosine-3'-phosphate
  modified_base 20: mod_base = OTHER; note = 2'-O-methyladenosine-3'-phosphate
  modified_base 21: mod_base = OTHER; note = 2'-O-methyladenosine
atgattcacaacaggtcgaaa

SEQ ID NO: 1003 - RNA, 21 nt, synthetic construct
  source 1..21: mol_type = other RNA
  modified_base 1: mod_base = OTHER; note = 2'-O-methyluridine-3'-phosphorothioate
  modified_base 2: mod_base = OTHER; note = 2'-O-methylguanosine-3'-phosphorothioate
  modified_base 3: mod_base = OTHER; note = 2'-O-methyladenosine-3'-phosphate
  modified_base 4: mod_base = OTHER; note = 2'-O-methyluridine-3'-phosphate
  modified_base 5: mod_base = OTHER; note = 2'-O-methyluridine-3'-phosphate
  modified_base 6: mod_base = OTHER; note = 2'-O-methylcytidine-3'-phosphate
  modified_base 7: mod_base = OTHER; note = 2'-fluoroadenosine-3'-phosphate
  modified_base 8: mod_base = OTHER; note = 2'-O-methylcytidine-3'-phosphate
  modified_base 9: mod_base = OTHER; note = 2'-fluoroadenosine-3'-phosphate
  modified_base 10: mod_base = OTHER; note = 2'-fluoroadenosine-3'-phosphate
  modified_base 11: mod_base = OTHER; note = 2'-fluorocytidine-3'-phosphate
  modified_base 12: mod_base = OTHER; note = 2'-O-methyladenosine-3'-phosphate
  modified_base 13: mod_base = OTHER; note = 2'-O-methylguanosine-3'-phosphate
  modified_base 14: mod_base = OTHER; note = 2'-O-methylguanosine-3'-phosphate
  modified_base 15: mod_base = OTHER; note = 2'-O-methyluridine-3'-phosphate
  modified_base 16: mod_base = OTHER; note = 2'-O-methylcytidine-3'-phosphate
  modified_base 17: mod_base = OTHER; note = 2'-O-methylguanosine-3'-phosphate
  modified_base 18: mod_base = OTHER; note = 2'-O-methyladenosine-3'-phosphate
  modified_base 19: mod_base = OTHER; note = 2'-O-methyladenosine-3'-phosphate
  modified_base 20: mod_base = OTHER; note = 2'-O-methylguanosine-3'-phosphate
  modified_base 21: mod_base = OTHER; note = 2'-O-methyladenosine
tgattcacaacaggtcgaaga

SEQ ID NO: 1004 - RNA, 21 nt, synthetic construct
  source 1..21: mol_type = other RNA
  modified_base 1: mod_base = OTHER; note = 2'-O-methylguanosine-3'-phosphorothioate
  modified_base 2: mod_base = OTHER; note = 2'-O-methyladenosine-3'-phosphorothioate
  modified_base 3: mod_base = OTHER; note = 2'-O-methyluridine-3'-phosphate
  modified_base 4: mod_base = OTHER; note = 2'-O-methyluridine-3'-phosphate
  modified_base 5: mod_base = OTHER; note = 2'-O-methylcytidine-3'-phosphate
  modified_base 6: mod_base = OTHER; note = 2'-O-methyladenosine-3'-phosphate
  modified_base 7: mod_base = OTHER; note = 2'-fluorocytidine-3'-phosphate
  modified_base 8: mod_base = OTHER; note = 2'-O-methyladenosine-3'-phosphate
  modified_base 9: mod_base = OTHER; note = 2'-fluoroadenosine-3'-phosphate
  modified_base 10: mod_base = OTHER; note = 2'-fluorocytidine-3'-phosphate
  modified_base 11: mod_base = OTHER; note = 2'-fluoroadenosine-3'-phosphate
  modified_base 12: mod_base = OTHER; note = 2'-O-methylguanosine-3'-phosphate
  modified_base 13: mod_base = OTHER; note = 2'-O-methylguanosine-3'-phosphate
  modified_base 14: mod_base = OTHER; note = 2'-O-methyluridine-3'-phosphate
  modified_base 15: mod_base = OTHER; note = 2'-O-methylcytidine-3'-phosphate
  modified_base 16: mod_base = OTHER; note = 2'-O-methylguanosine-3'-phosphate
  modified_base 17: mod_base = OTHER; note = 2'-O-methyladenosine-3'-phosphate
  modified_base 18: mod_base = OTHER; note = 2'-O-methyladenosine-3'-phosphate
  modified_base 19: mod_base = OTHER; note = 2'-O-methylguanosine-3'-phosphate
  modified_base 20: mod_base = OTHER; note = 2'-O-methyladenosine-3'-phosphate
  modified_base 21: mod_base = OTHER; note = 2'-O-methyluridine
gattcacaacaggtcgaagat

SEQ ID NO: 1005 - RNA, 21 nt, synthetic construct
  source 1..21: mol_type = other RNA
  modified_base 1: mod_base = OTHER; note = 2'-O-methyluridine-3'-phosphorothioate
  modified_base 2: mod_base = OTHER; note = 2'-O-methylcytidine-3'-phosphorothioate
  modified_base 3: mod_base = OTHER; note = 2'-O-methyladenosine-3'-phosphate
  modified_base 4: mod_base = OTHER; note = 2'-O-methylcytidine-3'-phosphate
  modified_base 5: mod_base = OTHER; note = 2'-O-methyladenosine-3'-phosphate
  modified_base 6: mod_base = OTHER; note = 2'-O-methyladenosine-3'-phosphate
  modified_base 7: mod_base = OTHER; note = 2'-fluorocytidine-3'-phosphate
  modified_base 8: mod_base = OTHER; note = 2'-O-methyladenosine-3'-phosphate
  modified_base 9: mod_base = OTHER; note = 2'-fluoroguanosine-3'-phosphate
  modified_base 10: mod_base = OTHER; note = 2'-fluoroguanosine-3'-phosphate
  modified_base 11: mod_base = OTHER; note = 2'-fluorouridine-3'-phosphate
  modified_base 12: mod_base = OTHER; note = 2'-O-methylcytidine-3'-phosphate
  modified_base 13: mod_base = OTHER; note = 2'-O-methylguanosine-3'-phosphate
  modified_base 14: mod_base = OTHER; note = 2'-O-methyladenosine-3'-phosphate
  modified_base 15: mod_base = OTHER; note = 2'-O-methyladenosine-3'-phosphate
  modified_base 16: mod_base = OTHER; note = 2'-O-methylguanosine-3'-phosphate
  modified_base 17: mod_base = OTHER; note = 2'-O-methyladenosine-3'-phosphate
  modified_base 18: mod_base = OTHER; note = 2'-O-methyluridine-3'-phosphate
  modified_base 19: mod_base = OTHER; note = 2'-O-methylcytidine-3'-phosphate
  modified_base 20: mod_base = OTHER; note = 2'-O-methyladenosine-3'-phosphate
  modified_base 21: mod_base = OTHER; note = 2'-O-methyladenosine
tcacaacaggtcgaagatcaa

SEQ ID NO: 1006 - RNA, 21 nt, synthetic construct
  source 1..21: mol_type = other RNA
  modified_base 1: mod_base = OTHER; note = 2'-O-methylcytidine-3'-phosphorothioate
  modified_base 2: mod_base = OTHER; note = 2'-O-methyladenosine-3'-phosphorothioate
  modified_base 3: mod_base = OTHER; note = 2'-O-methyladenosine-3'-phosphate
  modified_base 4: mod_base = OTHER; note = 2'-O-methylcytidine-3'-phosphate
  modified_base 5: mod_base = OTHER; note = 2'-O-methyladenosine-3'-phosphate
  modified_base 6: mod_base = OTHER; note = 2'-O-methylguanosine-3'-phosphate
  modified_base 7: mod_base = OTHER; note = 2'-fluoroguanosine-3'-phosphate
  modified_base 8: mod_base = OTHER; note = 2'-O-methyluridine-3'-phosphate
  modified_base 9: mod_base = OTHER; note = 2'-fluorocytidine-3'-phosphate
  modified_base 10: mod_base = OTHER; note = 2'-fluoroguanosine-3'-phosphate
  modified_base 11: mod_base = OTHER; note = 2'-fluoroadenosine-3'-phosphate
  modified_base 12: mod_base = OTHER; note = 2'-O-methyladenosine-3'-phosphate
  modified_base 13: mod_base = OTHER; note = 2'-O-methylguanosine-3'-phosphate
  modified_base 14: mod_base = OTHER; note = 2'-O-methyladenosine-3'-phosphate
  modified_base 15: mod_base = OTHER; note = 2'-O-methyluridine-3'-phosphate
  modified_base 16: mod_base = OTHER; note = 2'-O-methylcytidine-3'-phosphate
  modified_base 17: mod_base = OTHER; note = 2'-O-methyladenosine-3'-phosphate
  modified_base 18: mod_base = OTHER; note = 2'-O-methyladenosine-3'-phosphate
  modified_base 19: mod_base = OTHER; note = 2'-O-methyluridine-3'-phosphate
  modified_base 20: mod_base = OTHER; note = 2'-O-methyluridine-3'-phosphate
  modified_base 21: mod_base = OTHER; note = 2'-O-methyluridine
caacaggtcgaagatcaattt

SEQ ID NO: 1007 - RNA, 21 nt, synthetic construct
  source 1..21: mol_type = other RNA
  modified_base 1: mod_base = OTHER; note = 2'-O-methyladenosine-3'-phosphorothioate
  modified_base 2: mod_base = OTHER; note = 2'-O-methyladenosine-3'-phosphorothioate
  modified_base 3: mod_base = OTHER; note = 2'-O-methylcytidine-3'-phosphate
  modified_base 4: mod_base = OTHER; note = 2'-O-methyladenosine-3'-phosphate
  modified_base 5: mod_base = OTHER; note = 2'-O-methylguanosine-3'-phosphate
  modified_base 6: mod_base = OTHER; note = 2'-O-methylguanosine-3'-phosphate
  modified_base 7: mod_base = OTHER; note = 2'-fluorouridine-3'-phosphate
  modified_base 8: mod_base = OTHER; note = 2'-O-methylcytidine-3'-phosphate
  modified_base 9: mod_base = OTHER; note = 2'-fluoroguanosine-3'-phosphate
  modified_base 10: mod_base = OTHER; note = 2'-fluoroadenosine-3'-phosphate
  modified_base 11: mod_base = OTHER; note = 2'-fluoroadenosine-3'-phosphate
  modified_base 12: mod_base = OTHER; note = 2'-O-methylguanosine-3'-phosphate
  modified_base 13: mod_base = OTHER; note = 2'-O-methyladenosine-3'-phosphate
  modified_base 14: mod_base = OTHER; note = 2'-O-methyluridine-3'-phosphate
  modified_base 15: mod_base = OTHER; note = 2'-O-methylcytidine-3'-phosphate
  modified_base 16: mod_base = OTHER; note = 2'-O-methyladenosine-3'-phosphate
  modified_base 17: mod_base = OTHER; note = 2'-O-methyladenosine-3'-phosphate
  modified_base 18: mod_base = OTHER; note = 2'-O-methyluridine-3'-phosphate
  modified_base 19: mod_base = OTHER; note = 2'-O-methyluridine-3'-phosphate
  modified_base 20: mod_base = OTHER; note = 2'-O-methyluridine-3'-phosphate
  modified_base 21: mod_base = OTHER; note = 2'-O-methyladenosine
aacaggtcgaagatcaattta

SEQ ID NO: 1008 - RNA, 21 nt, synthetic construct
  source 1..21: mol_type = other RNA
  modified_base 1: mod_base = OTHER; note = 2'-O-methylcytidine-3'-phosphorothioate
  modified_base 2: mod_base = OTHER; note = 2'-O-methyladenosine-3'-phosphorothioate
  modified_base 3: mod_base = OTHER; note = 2'-O-methylguanosine-3'-phosphate
  modified_base 4: mod_base = OTHER; note = 2'-O-methylguanosine-3'-phosphate
  modified_base 5: mod_base = OTHER; note = 2'-O-methyluridine-3'-phosphate
  modified_base 6: mod_base = OTHER; note = 2'-O-methylcytidine-3'-phosphate
  modified_base 7: mod_base = OTHER; note = 2'-fluoroguanosine-3'-phosphate
  modified_base 8: mod_base = OTHER; note = 2'-O-methyladenosine-3'-phosphate
  modified_base 9: mod_base = OTHER; note = 2'-fluoroadenosine-3'-phosphate
  modified_base 10: mod_base = OTHER; note = 2'-fluoroguanosine-3'-phosphate
  modified_base 11: mod_base = OTHER; note = 2'-fluoroadenosine-3'-phosphate
  modified_base 12: mod_base = OTHER; note = 2'-O-methyluridine-3'-phosphate
  modified_base 13: mod_base = OTHER; note = 2'-O-methylcytidine-3'-phosphate
  modified_base 14: mod_base = OTHER; note = 2'-O-methyladenosine-3'-phosphate
  modified_base 15: mod_base = OTHER; note = 2'-O-methyladenosine-3'-phosphate
  modified_base 16: mod_base = OTHER; note = 2'-O-methyluridine-3'-phosphate
  modified_base 17: mod_base = OTHER; note = 2'-O-methyluridine-3'-phosphate
  modified_base 18: mod_base = OTHER; note = 2'-O-methyluridine-3'-phosphate
  modified_base 19: mod_base = OTHER; note = 2'-O-methyladenosine-3'-phosphate
  modified_base 20: mod_base = OTHER; note = 2'-O-methylcytidine-3'-phosphate
  modified_base 21: mod_base = OTHER; note = 2'-O-methyladenosine
caggtcgaagatcaatttaca

SEQ ID NO: 1009 - RNA, 21 nt, synthetic construct
  source 1..21: mol_type = other RNA
  modified_base 1: mod_base = OTHER; note = 2'-O-methyladenosine-3'-phosphorothioate
  modified_base 2: mod_base = OTHER; note = 2'-O-methylguanosine-3'-phosphorothioate
  modified_base 3: mod_base = OTHER; note = 2'-O-methylguanosine-3'-phosphate
  modified_base 4: mod_base = OTHER; note = 2'-O-methyluridine-3'-phosphate
  modified_base 5: mod_base = OTHER; note = 2'-O-methylcytidine-3'-phosphate
  modified_base 6: mod_base = OTHER; note = 2'-O-methylguanosine-3'-phosphate
  modified_base 7: mod_base = OTHER; note = 2'-fluoroadenosine-3'-phosphate
  modified_base 8: mod_base = OTHER; note = 2'-O-methyladenosine-3'-phosphate
  modified_base 9: mod_base = OTHER; note = 2'-fluoroguanosine-3'-phosphate
  modified_base 10: mod_base = OTHER; note = 2'-fluoroadenosine-3'-phosphate
  modified_base 11: mod_base = OTHER; note = 2'-fluorouridine-3'-phosphate
  modified_base 12: mod_base = OTHER; note = 2'-O-methylcytidine-3'-phosphate
  modified_base 13: mod_base = OTHER; note = 2'-O-methyladenosine-3'-phosphate
  modified_base 14: mod_base = OTHER; note = 2'-O-methyladenosine-3'-phosphate
  modified_base 15: mod_base = OTHER; note = 2'-O-methyluridine-3'-phosphate
  modified_base 16: mod_base = OTHER; note = 2'-O-methyluridine-3'-phosphate
  modified_base 17: mod_base = OTHER; note = 2'-O-methyluridine-3'-phosphate
  modified_base 18: mod_base = OTHER; note = 2'-O-methyladenosine-3'-phosphate
  modified_base 19: mod_base = OTHER; note = 2'-O-methylcytidine-3'-phosphate
  modified_base 20: mod_base = OTHER; note = 2'-O-methyladenosine-3'-phosphate
  modified_base 21: mod_base = OTHER; note = 2'-O-methyladenosine
aggtcgaagatcaatttacaa

SEQ ID NO: 1010 - RNA, 21 nt, synthetic construct
  source 1..21: mol_type = other RNA
  modified_base 1: mod_base = OTHER; note = 2'-O-methylguanosine-3'-phosphorothioate
  modified_base 2: mod_base = OTHER; note = 2'-O-methylguanosine-3'-phosphorothioate
  modified_base 3: mod_base = OTHER; note = 2'-O-methyluridine-3'-phosphate
  modified_base 4: mod_base = OTHER; note = 2'-O-methylcytidine-3'-phosphate
  modified_base 5: mod_base = OTHER; note = 2'-O-methylguanosine-3'-phosphate
  modified_base 6: mod_base = OTHER; note = 2'-O-methyladenosine-3'-phosphate
  modified_base 7: mod_base = OTHER; note = 2'-fluoroadenosine-3'-phosphate
  modified_base 8: mod_base = OTHER; note = 2'-O-methylguanosine-3'-phosphate
  modified_base 9: mod_base = OTHER; note = 2'-fluoroadenosine-3'-phosphate
  modified_base 10: mod_base = OTHER; note = 2'-fluorouridine-3'-phosphate
  modified_base 11: mod_base = OTHER; note = 2'-fluorocytidine-3'-phosphate
  modified_base 12: mod_base = OTHER; note = 2'-O-methyladenosine-3'-phosphate
  modified_base 13: mod_base = OTHER; note = 2'-O-methyladenosine-3'-phosphate
  modified_base 14: mod_base = OTHER; note = 2'-O-methyluridine-3'-phosphate
  modified_base 15: mod_base = OTHER; note = 2'-O-methyluridine-3'-phosphate
  modified_base 16: mod_base = OTHER; note = 2'-O-methyluridine-3'-phosphate
  modified_base 17: mod_base = OTHER; note = 2'-O-methyladenosine-3'-phosphate
  modified_base 18: mod_base = OTHER; note = 2'-O-methylcytidine-3'-phosphate
  modified_base 19: mod_base = OTHER; note = 2'-O-methyladenosine-3'-phosphate
  modified_base 20: mod_base = OTHER; note = 2'-O-methyladenosine-3'-phosphate
  modified_base 21: mod_base = OTHER; note = 2'-O-methyladenosine
ggtcgaagatcaatttacaaa

SEQ ID NO: 1011 - RNA, 21 nt, synthetic construct
  source 1..21: mol_type = other RNA
  modified_base 1: mod_base = OTHER; note = 2'-O-methyladenosine-3'-phosphorothioate
  modified_base 2: mod_base = OTHER; note = 2'-O-methyladenosine-3'-phosphorothioate
  modified_base 3: mod_base = OTHER; note = 2'-O-methylguanosine-3'-phosphate
  modified_base 4: mod_base = OTHER; note = 2'-O-methyladenosine-3'-phosphate
  modified_base 5: mod_base = OTHER; note = 2'-O-methyluridine-3'-phosphate
  modified_base 6: mod_base = OTHER; note = 2'-O-methylcytidine-3'-phosphate
  modified_base 7: mod_base = OTHER; note = 2'-fluoroadenosine-3'-phosphate
  modified_base 8: mod_base = OTHER; note = 2'-O-methyladenosine-3'-phosphate
  modified_base 9: mod_base = OTHER; note = 2'-fluorouridine-3'-phosphate
  modified_base 10: mod_base = OTHER; note = 2'-fluorouridine-3'-phosphate
  modified_base 11: mod_base = OTHER; note = 2'-fluorouridine-3'-phosphate
  modified_base 12: mod_base = OTHER; note = 2'-O-methyladenosine-3'-phosphate
  modified_base 13: mod_base = OTHER; note = 2'-O-methylcytidine-3'-phosphate
  modified_base 14: mod_base = OTHER; note = 2'-O-methyladenosine-3'-phosphate
  modified_base 15: mod_base = OTHER; note = 2'-O-methyladenosine-3'-phosphate
  modified_base 16: mod_base = OTHER; note = 2'-O-methylguanosine-3'-phosphate
  modified_base 17: mod_base = OTHER; note = 2'-O-methyladenosine-3'-phosphate
  modified_base 18: mod_base = OTHER; note = 2'-O-methylcytidine-3'-phosphate
  modified_base 19: mod_base = OTHER; note = 2'-O-methylcytidine-3'-phosphate
  modified_base 20: mod_base = OTHER; note = 2'-O-methyluridine-3'-phosphate
  modified_base 21: mod_base = OTHER; note = 2'-O-methyladenosine
aagatcaatttacaagaccta

SEQ ID NO: 1012 - RNA, 21 nt, synthetic construct
  source 1..21: mol_type = other RNA
  modified_base 1: mod_base = OTHER; note = 2'-O-methyladenosine-3'-phosphorothioate
  modified_base 2: mod_base = OTHER; note = 2'-O-methylguanosine-3'-phosphorothioate
  modified_base 3: mod_base = OTHER; note = 2'-O-methyladenosine-3'-phosphate
  modified_base 4: mod_base = OTHER; note = 2'-O-methyluridine-3'-phosphate
  modified_base 5: mod_base = OTHER; note = 2'-O-methylcytidine-3'-phosphate
  modified_base 6: mod_base = OTHER; note = 2'-O-methyladenosine-3'-phosphate
  modified_base 7: mod_base = OTHER; note = 2'-fluoroadenosine-3'-phosphate
  modified_base 8: mod_base = OTHER; note = 2'-O-methyluridine-3'-phosphate
  modified_base 9: mod_base = OTHER; note = 2'-fluorouridine-3'-phosphate
  modified_base 10: mod_base = OTHER; note = 2'-fluorouridine-3'-phosphate
  modified_base 11: mod_base = OTHER; note = 2'-fluoroadenosine-3'-phosphate
  modified_base 12: mod_base = OTHER; note = 2'-O-methylcytidine-3'-phosphate
  modified_base 13: mod_base = OTHER; note = 2'-O-methyladenosine-3'-phosphate
  modified_base 14: mod_base = OTHER; note = 2'-O-methyladenosine-3'-phosphate
  modified_base 15: mod_base = OTHER; note = 2'-O-methylguanosine-3'-phosphate
  modified_base 16: mod_base = OTHER; note = 2'-O-methyladenosine-3'-phosphate
  modified_base 17: mod_base = OTHER; note = 2'-O-methylcytidine-3'-phosphate
  modified_base 18: mod_base = OTHER; note = 2'-O-methylcytidine-3'-phosphate
  modified_base 19: mod_base = OTHER; note = 2'-O-methyluridine-3'-phosphate
  modified_base 20: mod_base = OTHER; note = 2'-O-methylcytidine-3'-phosphate
  modified_base 21: mod_base = OTHER; note = 2'-O-methyladenosine
agatcaatttacaagacctca

SEQ ID NO: 1013 - RNA, 21 nt, synthetic construct
  source 1..21: mol_type = other RNA
  modified_base 1: mod_base = OTHER; note = 2'-O-methyluridine-3'-phosphorothioate
  modified_base 2: mod_base = OTHER; note = 2'-O-methyladenosine-3'-phosphorothioate
  modified_base 3: mod_base = OTHER; note = 2'-O-methyladenosine-3'-phosphate
  modified_base 4: mod_base = OTHER; note = 2'-O-methyladenosine-3'-phosphate
  modified_base 5: mod_base = OTHER; note = 2'-O-methylguanosine-3'-phosphate
  modified_base 6: mod_base = OTHER; note = 2'-O-methylguanosine-3'-phosphate
  modified_base 7: mod_base = OTHER; note = 2'-fluoroadenosine-3'-phosphate
  modified_base 8: mod_base = OTHER; note = 2'-O-methylcytidine-3'-phosphate
  modified_base 9: mod_base = OTHER; note = 2'-fluorouridine-3'-phosphate
  modified_base 10: mod_base = OTHER; note = 2'-fluoroadenosine-3'-phosphate
  modified_base 11: mod_base = OTHER; note = 2'-fluoroadenosine-3'-phosphate
  modified_base 12: mod_base = OTHER; note = 2'-O-methylcytidine-3'-phosphate
  modified_base 13: mod_base = OTHER; note = 2'-O-methyladenosine-3'-phosphate
  modified_base 14: mod_base = OTHER; note = 2'-O-methyluridine-3'-phosphate
  modified_base 15: mod_base = OTHER; note = 2'-O-methyladenosine-3'-phosphate
  modified_base 16: mod_base = OTHER; note = 2'-O-methyladenosine-3'-phosphate
  modified_base 17: mod_base = OTHER; note = 2'-O-methyladenosine-3'-phosphate
  modified_base 18: mod_base = OTHER; note = 2'-O-methyladenosine-3'-phosphate
  modified_base 19: mod_base = OTHER; note = 2'-O-methyluridine-3'-phosphate
  modified_base 20: mod_base = OTHER; note = 2'-O-methylcytidine-3'-phosphate
  modified_base 21: mod_base = OTHER; note = 2'-O-methyluridine
taaaggactaacataaaatct

SEQ ID NO: 1014 - RNA, 21 nt, synthetic construct
  source 1..21: mol_type = other RNA
  modified_base 1: mod_base = OTHER; note = 2'-O-methyladenosine-3'-phosphorothioate
  modified_base 2: mod_base = OTHER; note = 2'-O-methyladenosine-3'-phosphorothioate
  modified_base 3: mod_base = OTHER; note = 2'-O-methyladenosine-3'-phosphate
  modified_base 4: mod_base = OTHER; note = 2'-O-methylguanosine-3'-phosphate
  modified_base 5: mod_base = OTHER; note = 2'-O-methylguanosine-3'-phosphate
  modified_base 6: mod_base = OTHER; note = 2'-O-methyladenosine-3'-phosphate
  modified_base 7: mod_base = OTHER; note = 2'-fluorocytidine-3'-phosphate
  modified_base 8: mod_base = OTHER; note = 2'-O-methyluridine-3'-phosphate
  modified_base 9: mod_base = OTHER; note = 2'-fluoroadenosine-3'-phosphate
  modified_base 10: mod_base = OTHER; note = 2'-fluoroadenosine-3'-phosphate
  modified_base 11: mod_base = OTHER; note = 2'-fluorocytidine-3'-phosphate
  modified_base 12: mod_base = OTHER; note = 2'-O-methyladenosine-3'-phosphate
  modified_base 13: mod_base = OTHER; note = 2'-O-methyluridine-3'-phosphate
  modified_base 14: mod_base = OTHER; note = 2'-O-methyladenosine-3'-phosphate
  modified_base 15: mod_base = OTHER; note = 2'-O-methyladenosine-3'-phosphate
  modified_base 16: mod_base = OTHER; note = 2'-O-methyladenosine-3'-phosphate
  modified_base 17: mod_base = OTHER; note = 2'-O-methyladenosine-3'-phosphate
  modified_base 18: mod_base = OTHER; note = 2'-O-methyluridine-3'-phosphate
  modified_base 19: mod_base = OTHER; note = 2'-O-methylcytidine-3'-phosphate
  modified_base 20: mod_base = OTHER; note = 2'-O-methyluridine-3'-phosphate
  modified_base 21: mod_base = OTHER; note = 2'-O-methyladenosine
aaaggactaacataaaatcta

SEQ ID NO: 1015 - RNA, 21 nt, synthetic construct
  source 1..21: mol_type = other RNA
  modified_base 1: mod_base = OTHER; note = 2'-O-methyladenosine-3'-phosphorothioate
  modified_base 2: mod_base = OTHER; note = 2'-O-methylguanosine-3'-phosphorothioate
  modified_base 3: mod_base = OTHER; note = 2'-O-methyladenosine-3'-phosphate
  modified_base 4: mod_base = OTHER; note = 2'-O-methylguanosine-3'-phosphate
  modified_base 5: mod_base = OTHER; note = 2'-O-methylguanosine-3'-phosphate
  modified_base 6: mod_base = OTHER; note = 2'-O-methyluridine-3'-phosphate
  modified_base 7: mod_base = OTHER; note = 2'-fluorocytidine-3'-phosphate
  modified_base 8: mod_base = OTHER; note = 2'-O-methyluridine-3'-phosphate
  modified_base 9: mod_base = OTHER; note = 2'-fluorocytidine-3'-phosphate
  modified_base 10: mod_base = OTHER; note = 2'-fluoroadenosine-3'-phosphate
  modified_base 11: mod_base = OTHER; note = 2'-fluoroguanosine-3'-phosphate
  modified_base 12: mod_base = OTHER; note = 2'-O-methylguanosine-3'-phosphate
  modified_base 13: mod_base = OTHER; note = 2'-O-methyluridine-3'-phosphate
  modified_base 14: mod_base = OTHER; note = 2'-O-methyluridine-3'-phosphate
  modified_base 15: mod_base = OTHER; note = 2'-O-methylcytidine-3'-phosphate
  modified_base 16: mod_base = OTHER; note = 2'-O-methyluridine-3'-phosphate
  modified_base 17: mod_base = OTHER; note = 2'-O-methyluridine-3'-phosphate
  modified_base 18: mod_base = OTHER; note = 2'-O-methyluridine-3'-phosphate
  modified_base 19: mod_base = OTHER; note = 2'-O-methylcytidine-3'-phosphate
  modified_base 20: mod_base = OTHER; note = 2'-O-methylcytidine-3'-phosphate
  modified_base 21: mod_base = OTHER; note = 2'-O-methyladenosine
agaggtctcaggttctttcca

SEQ ID NO: 1016 - RNA, 21 nt, synthetic construct
  source 1..21: mol_type = other RNA
  modified_base 1: mod_base = OTHER; note = 2'-O-methylguanosine-3'-phosphorothioate
  modified_base 2: mod_base = OTHER; note = 2'-O-methylcytidine-3'-phosphorothioate
  modified_base 3: mod_base = OTHER; note = 2'-O-methyluridine-3'-phosphate
  modified_base 4: mod_base = OTHER; note = 2'-O-methyluridine-3'-phosphate
  modified_base 5: mod_base = OTHER; note = 2'-O-methyluridine-3'-phosphate
  modified_base 6: mod_base = OTHER; note = 2'-O-methyladenosine-3'-phosphate
  modified_base 7: mod_base = OTHER; note = 2'-fluorocytidine-3'-phosphate
  modified_base 8: mod_base = OTHER; note = 2'-O-methyladenosine-3'-phosphate
  modified_base 9: mod_base = OTHER; note = 2'-fluorouridine-3'-phosphate
  modified_base 10: mod_base = OTHER; note = 2'-fluoroguanosine-3'-phosphate
  modified_base 11: mod_base = OTHER; note = 2'-fluorocytidine-3'-phosphate
  modified_base 12: mod_base = OTHER; note = 2'-O-methyluridine-3'-phosphate
  modified_base 13: mod_base = OTHER; note = 2'-O-methylguanosine-3'-phosphate
  modified_base 14: mod_base = OTHER; note = 2'-O-methyluridine-3'-phosphate
  modified_base 15: mod_base = OTHER; note = 2'-O-methylguanosine-3'-phosphate
  modified_base 16: mod_base = OTHER; note = 2'-O-methylcytidine-3'-phosphate
  modified_base 17: mod_base = OTHER; note = 2'-O-methyluridine-3'-phosphate
  modified_base 18: mod_base = OTHER; note = 2'-O-methylcytidine-3'-phosphate
  modified_base 19: mod_base = OTHER; note = 2'-O-methyluridine-3'-phosphate
  modified_base 20: mod_base = OTHER; note = 2'-O-methyluridine-3'-phosphate
  modified_base 21: mod_base = OTHER; note = 2'-O-methyluridine
gctttacatgctgtgctcttt

SEQ ID NO: 1017 - RNA, 21 nt, synthetic construct
  source 1..21: mol_type = other RNA
  modified_base 1: mod_base = OTHER; note = 2'-O-methyluridine-3'-phosphorothioate
  modified_base 2: mod_base = OTHER; note = 2'-O-methylguanosine-3'-phosphorothioate
  modified_base 3: mod_base = OTHER; note = 2'-O-methylguanosine-3'-phosphate
  modified_base 4: mod_base = OTHER; note = 2'-O-methyluridine-3'-phosphate
  modified_base 5: mod_base = OTHER; note = 2'-O-methyladenosine-3'-phosphate
  modified_base 6: mod_base = OTHER; note = 2'-O-methyladenosine-3'-phosphate
  modified_base 7: mod_base = OTHER; note = 2'-fluorouridine-3'-phosphate
  modified_base 8: mod_base = OTHER; note = 2'-O-methylcytidine-3'-phosphate
  modified_base 9: mod_base = OTHER; note = 2'-fluorouridine-3'-phosphate
  modified_base 10: mod_base = OTHER; note = 2'-fluoroadenosine-3'-phosphate
  modified_base 11: mod_base = OTHER; note = 2'-fluorocytidine-3'-phosphate
  modified_base 12: mod_base = OTHER; note = 2'-O-methyladenosine-3'-phosphate
  modified_base 13: mod_base = OTHER; note = 2'-O-methylguanosine-3'-phosphate
  modified_base 14: mod_base = OTHER; note = 2'-O-methylcytidine-3'-phosphate
  modified_base 15: mod_base = OTHER; note = 2'-O-methyluridine-3'-phosphate
  modified_base 16: mod_base = OTHER; note = 2'-O-methylcytidine-3'-phosphate
  modified_base 17: mod_base = OTHER; note = 2'-O-methyladenosine-3'-phosphate
  modified_base 18: mod_base = OTHER; note = 2'-O-methylcytidine-3'-phosphate
  modified_base 19: mod_base = OTHER; note = 2'-O-methylcytidine-3'-phosphate
  modified_base 20: mod_base = OTHER; note = 2'-O-methyluridine-3'-phosphate
  modified_base 21: mod_base = OTHER; note = 2'-O-methyladenosine
tggtaatctacagctcaccta

SEQ ID NO: 1018 - RNA, 21 nt, synthetic construct
  source 1..21: mol_type = other RNA
  modified_base 1: mod_base = OTHER; note = 2'-O-methylcytidine-3'-phosphorothioate
  modified_base 2: mod_base = OTHER; note = 2'-O-methyluridine-3'-phosphorothioate
  modified_base 3: mod_base = OTHER; note = 2'-O-methylcytidine-3'-phosphate
  modified_base 4: mod_base = OTHER; note = 2'-O-methyladenosine-3'-phosphate
  modified_base 5: mod_base = OTHER; note = 2'-O-methylcytidine-3'-phosphate
  modified_base 6: mod_base = OTHER; note = 2'-O-methylcytidine-3'-phosphate
  modified_base 7: mod_base = OTHER; note = 2'-fluorouridine-3'-phosphate
  modified_base 8: mod_base = OTHER; note = 2'-O-methylcytidine-3'-phosphate
  modified_base 9: mod_base = OTHER; note = 2'-fluorouridine-3'-phosphate
  modified_base 10: mod_base = OTHER; note = 2'-fluoroguanosine-3'-phosphate
  modified_base 11: mod_base = OTHER; note = 2'-fluoroadenosine-3'-phosphate
  modified_base 12: mod_base = OTHER; note = 2'-O-methyladenosine-3'-phosphate
  modified_base 13: mod_base = OTHER; note = 2'-O-methylguanosine-3'-phosphate
  modified_base 14: mod_base = OTHER; note = 2'-O-methylguanosine-3'-phosphate
  modified_base 15: mod_base = OTHER; note = 2'-O-methylcytidine-3'-phosphate
  modified_base 16: mod_base = OTHER; note = 2'-O-methyladenosine-3'-phosphate
  modified_base 17: mod_base = OTHER; note = 2'-O-methyladenosine-3'-phosphate
  modified_base 18: mod_base = OTHER; note = 2'-O-methyladenosine-3'-phosphate
  modified_base 19: mod_base = OTHER; note = 2'-O-methyluridine-3'-phosphate
  modified_base 20: mod_base = OTHER; note = 2'-O-methyladenosine-3'-phosphate
  modified_base 21: mod_base = OTHER; note = 2'-O-methyluridine
ctcacctctgaaggcaaatat

SEQ ID NO: 1019 - RNA, 21 nt, synthetic construct
  source 1..21: mol_type = other RNA
  modified_base 1: mod_base = OTHER; note = 2'-O-methyladenosine-3'-phosphorothioate
  modified_base 2: mod_base = OTHER; note = 2'-O-methyladenosine-3'-phosphorothioate
  modified_base 3: mod_base = OTHER; note = 2'-O-methyladenosine-3'-phosphate
  modified_base 4: mod_base = OTHER; note = 2'-O-methyladenosine-3'-phosphate
  modified_base 5: mod_base = OTHER; note = 2'-O-methylguanosine-3'-phosphate
  modified_base 6: mod_base = OTHER; note = 2'-O-methyluridine-3'-phosphate
  modified_base 7: mod_base = OTHER; note = 2'-fluorouridine-3'-phosphate
  modified_base 8: mod_base = OTHER; note = 2'-O-methyluridine-3'-phosphate
  modified_base 9: mod_base = OTHER; note = 2'-fluorouridine-3'-phosphate
  modified_base 10: mod_base = OTHER; note = 2'-fluoroguanosine-3'-phosphate
  modified_base 11: mod_base = OTHER; note = 2'-fluoroadenosine-3'-phosphate
  modified_base 12: mod_base = OTHER; note = 2'-O-methyluridine-3'-phosphate
  modified_base 13: mod_base = OTHER; note = 2'-O-methylguanosine-3'-phosphate
  modified_base 14: mod_base = OTHER; note = 2'-O-methyladenosine-3'-phosphate
  modified_base 15: mod_base = OTHER; note = 2'-O-methyladenosine-3'-phosphate
  modified_base 16: mod_base = OTHER; note = 2'-O-methyladenosine-3'-phosphate
  modified_base 17: mod_base = OTHER; note = 2'-O-methyluridine-3'-phosphate
  modified_base 18: mod_base = OTHER; note = 2'-O-methyluridine-3'-phosphate
  modified_base 19: mod_base = OTHER; note = 2'-O-methylcytidine-3'-phosphate
  modified_base 20: mod_base = OTHER; note = 2'-O-methyluridine-3'-phosphate
  modified_base 21: mod_base = OTHER; note = 2'-O-methyluridine
aaaagttttgatgaaattctt

SEQ ID NO: 1020 - RNA, 21 nt, synthetic construct
  source 1..21: mol_type = other RNA
  modified_base 1: mod_base = OTHER; note = 2'-O-methyladenosine-3'-phosphorothioate
  modified_base 2: mod_base = OTHER; note = 2'-O-methylguanosine-3'-phosphorothioate
  modified_base 3: mod_base = OTHER; note = 2'-O-methyluridine-3'-phosphate
  modified_base 4: mod_base = OTHER; note = 2'-O-methyluridine-3'-phosphate
  modified_base 5: mod_base = OTHER; note = 2'-O-methyluridine-3'-phosphate
  modified_base 6: mod_base = OTHER; note = 2'-O-methyluridine-3'-phosphate
  modified_base 7: mod_base = OTHER; note = 2'-fluoroguanosine-3'-phosphate
  modified_base 8: mod_base = OTHER; note = 2'-O-methyladenosine-3'-phosphate
  modified_base 9: mod_base = OTHER; note = 2'-fluorouridine-3'-phosphate
  modified_base 10: mod_base = OTHER; note = 2'-fluoroguanosine-3'-phosphate
  modified_base 11: mod_base = OTHER; note = 2'-fluoroadenosine-3'-phosphate
  modified_base 12: mod_base = OTHER; note = 2'-O-methyladenosine-3'-phosphate
  modified_base 13: mod_base = OTHER; note = 2'-O-methyladenosine-3'-phosphate
  modified_base 14: mod_base = OTHER; note = 2'-O-methyluridine-3'-phosphate
  modified_base 15: mod_base = OTHER; note = 2'-O-methyluridine-3'-phosphate
  modified_base 16: mod_base = OTHER; note = 2'-O-methylcytidine-3'-phosphate
  modified_base 17: mod_base = OTHER; note = 2'-O-methyluridine-3'-phosphate
  modified_base 18: mod_base = OTHER; note = 2'-O-methyluridine-3'-phosphate
  modified_base 19: mod_base = OTHER; note = 2'-O-methylguanosine-3'-phosphate
  modified_base 20: mod_base = OTHER; note = 2'-O-methyladenosine-3'-phosphate
  modified_base 21: mod_base = OTHER; note = 2'-O-methyladenosine
agttttgatgaaattcttgaa

SEQ ID NO: 1021 - RNA, 21 nt, synthetic construct
  source 1..21: mol_type = other RNA
  modified_base 1: mod_base = OTHER; note = 2'-O-methyluridine-3'-phosphorothioate
  modified_base 2: mod_base = OTHER; note = 2'-O-methyluridine-3'-phosphorothioate
  modified_base 3: mod_base = OTHER; note = 2'-O-methyluridine-3'-phosphate
  modified_base 4: mod_base = OTHER; note = 2'-O-methylguanosine-3'-phosphate
  modified_base 5: mod_base = OTHER; note = 2'-O-methyladenosine-3'-phosphate
  modified_base 6: mod_base = OTHER; note = 2'-O-methyluridine-3'-phosphate
  modified_base 7: mod_base = OTHER; note = 2'-fluoroguanosine-3'-phosphate
  modified_base 8: mod_base = OTHER; note = 2'-O-methyladenosine-3'-phosphate
  modified_base 9: mod_base = OTHER; note = 2'-fluoroadenosine-3'-phosphate
  modified_base 10: mod_base = OTHER; note = 2'-fluoroadenosine-3'-phosphate
  modified_base 11: mod_base = OTHER; note = 2'-fluorouridine-3'-phosphate
  modified_base 12: mod_base = OTHER; note = 2'-O-methyluridine-3'-phosphate
  modified_base 13: mod_base = OTHER; note = 2'-O-methylcytidine-3'-phosphate
  modified_base 14: mod_base = OTHER; note = 2'-O-methyluridine-3'-phosphate
  modified_base 15: mod_base = OTHER; note = 2'-O-methyluridine-3'-phosphate
  modified_base 16: mod_base = OTHER; note = 2'-O-methylguanosine-3'-phosphate
  modified_base 17: mod_base = OTHER; note = 2'-O-methyladenosine-3'-phosphate
  modified_base 18: mod_base = OTHER; note = 2'-O-methyladenosine-3'-phosphate
  modified_base 19: mod_base = OTHER; note = 2'-O-methylguanosine-3'-phosphate
  modified_base 20: mod_base = OTHER; note = 2'-O-methyluridine-3'-phosphate
  modified_base 21: mod_base = OTHER; note = 2'-O-methyluridine
tttgatgaaattcttgaagtt

SEQ ID NO: 1022 - RNA, 21 nt, synthetic construct
  source 1..21: mol_type = other RNA
  modified_base 1: mod_base = OTHER; note = 2'-O-methylguanosine-3'-phosphorothioate
  modified_base 2: mod_base = OTHER; note = 2'-O-methyladenosine-3'-phosphorothioate
  modified_base 3: mod_base = OTHER; note = 2'-O-methyluridine-3'-phosphate
  modified_base 4: mod_base = OTHER; note = 2'-O-methylguanosine-3'-phosphate
  modified_base 5: mod_base = OTHER; note = 2'-O-methyladenosine-3'-phosphate
  modified_base 6: mod_base = OTHER; note = 2'-O-methyladenosine-3'-phosphate
  modified_base 7: mod_base = OTHER; note = 2'-fluoroadenosine-3'-phosphate
  modified_base 8: mod_base = OTHER; note = 2'-O-methyluridine-3'-phosphate
  modified_base 9: mod_base = OTHER; note = 2'-fluorouridine-3'-phosphate
  modified_base 10: mod_base = OTHER; note = 2'-fluorocytidine-3'-phosphate
  modified_base 11: mod_base = OTHER; note = 2'-fluorouridine-3'-phosphate
  modified_base 12: mod_base = OTHER; note = 2'-O-methyluridine-3'-phosphate
  modified_base 13: mod_base = OTHER; note = 2'-O-methylguanosine-3'-phosphate
  modified_base 14: mod_base = OTHER; note = 2'-O-methyladenosine-3'-phosphate
  modified_base 15: mod_base = OTHER; note = 2'-O-methyladenosine-3'-phosphate
  modified_base 16: mod_base = OTHER; note = 2'-O-methylguanosine-3'-phosphate
  modified_base 17: mod_base = OTHER; note = 2'-O-methyluridine-3'-phosphate
  modified_base 18: mod_base = OTHER; note = 2'-O-methyluridine-3'-phosphate
  modified_base 19: mod_base = OTHER; note = 2'-O-methylcytidine-3'-phosphate
  modified_base 20: mod_base = OTHER; note = 2'-O-methyladenosine-3'-phosphate
  modified_base 21: mod_base = OTHER; note = 2'-O-methyluridine
gatgaaattcttgaagttcat

SEQ ID NO: 1023 - RNA, 21 nt, synthetic construct
  source 1..21: mol_type = other RNA
  modified_base 1: mod_base = OTHER; note = 2'-O-methyladenosine-3'-phosphorothioate
  modified_base 2: mod_base = OTHER; note = 2'-O-methyluridine-3'-phosphorothioate
  modified_base 3: mod_base = OTHER; note = 2'-O-methyluridine-3'-phosphate
  modified_base 4: mod_base = OTHER; note = 2'-O-methylcytidine-3'-phosphate
  modified_base 5: mod_base = OTHER; note = 2'-O-methyluridine-3'-phosphate
  modified_base 6: mod_base = OTHER; note = 2'-O-methyluridine-3'-phosphate
  modified_base 7: mod_base = OTHER; note = 2'-fluoroguanosine-3'-phosphate
  modified_base 8: mod_base = OTHER; note = 2'-O-methyladenosine-3'-phosphate
  modified_base 9: mod_base = OTHER; note = 2'-fluoroadenosine-3'-phosphate
  modified_base 10: mod_base = OTHER; note = 2'-fluoroguanosine-3'-phosphate
  modified_base 11: mod_base = OTHER; note = 2'-fluorouridine-3'-phosphate
  modified_base 12: mod_base = OTHER; note = 2'-O-methyluridine-3'-phosphate
  modified_base 13: mod_base = OTHER; note = 2'-O-methylcytidine-3'-phosphate
  modified_base 14: mod_base = OTHER; note = 2'-O-methyladenosine-3'-phosphate
  modified_base 15: mod_base = OTHER; note = 2'-O-methyluridine-3'-phosphate
  modified_base 16: mod_base = OTHER; note = 2'-O-methylguanosine-3'-phosphate
  modified_base 17: mod_base = OTHER; note = 2'-O-methylguanosine-3'-phosphate
  modified_base 18: mod_base = OTHER; note = 2'-O-methyluridine-3'-phosphate
  modified_base 19: mod_base = OTHER; note = 2'-O-methylguanosine-3'-phosphate
  modified_base 20: mod_base = OTHER; note = 2'-O-methyladenosine-3'-phosphate
  modified_base 21: mod_base = OTHER; note = 2'-O-methyluridine
attcttgaagttcatggtgat

SEQ ID NO: 1024 - RNA, 21 nt, synthetic construct
  source 1..21: mol_type = other RNA
  modified_base 1: mod_base = OTHER; note = 2'-O-methylguanosine-3'-phosphorothioate
  modified_base 2: mod_base = OTHER; note = 2'-O-methyluridine-3'-phosphorothioate
  modified_base 3: mod_base = OTHER; note = 2'-O-methyluridine-3'-phosphate
  modified_base 4: mod_base = OTHER; note = 2'-O-methylcytidine-3'-phosphate
  modified_base 5: mod_base = OTHER; note = 2'-O-methyladenosine-3'-phosphate
  modified_base 6: mod_base = OTHER; note = 2'-O-methyluridine-3'-phosphate
  modified_base 7: mod_base = OTHER; note = 2'-fluoroguanosine-3'-phosphate
  modified_base 8: mod_base = OTHER; note = 2'-O-methylguanosine-3'-phosphate
  modified_base 9: mod_base = OTHER; note = 2'-fluorouridine-3'-phosphate
  modified_base 10: mod_base = OTHER; note = 2'-fluoroguanosine-3'-phosphate
  modified_base 11: mod_base = OTHER; note = 2'-fluoroadenosine-3'-phosphate
  modified_base 12: mod_base = OTHER; note = 2'-O-methyluridine-3'-phosphate
  modified_base 13: mod_base = OTHER; note = 2'-O-methylcytidine-3'-phosphate
  modified_base 14: mod_base = OTHER; note = 2'-O-methyladenosine-3'-phosphate
  modified_base 15: mod_base = OTHER; note = 2'-O-methylguanosine-3'-phosphate
  modified_base 16: mod_base = OTHER; note = 2'-O-methyluridine-3'-phosphate
  modified_base 17: mod_base = OTHER; note = 2'-O-methylguanosine-3'-phosphate
  modified_base 18: mod_base = OTHER; note = 2'-O-methylcytidine-3'-phosphate
  modified_base 19: mod_base = OTHER; note = 2'-O-methyladenosine-3'-phosphate
  modified_base 20: mod_base = OTHER; note = 2'-O-methyladenosine-3'-phosphate
  modified_base 21: mod_base = OTHER; note = 2'-O-methyluridine
gttcatggtgatcagtgcaat

SEQ ID NO: 1025 - RNA, 21 nt, synthetic construct
  source 1..21: mol_type = other RNA
  modified_base 1: mod_base = OTHER; note = 2'-O-methylcytidine-3'-phosphorothioate
  modified_base 2: mod_base = OTHER; note = 2'-O-methyladenosine-3'-phosphorothioate
  modified_base 3: mod_base = OTHER; note = 2'-O-methyluridine-3'-phosphate
  modified_base 4: mod_base = OTHER; note = 2'-O-methylguanosine-3'-phosphate
  modified_base 5: mod_base = OTHER; note = 2'-O-methylguanosine-3'-phosphate
  modified_base 6: mod_base = OTHER; note = 2'-O-methyluridine-3'-phosphate
  modified_base 7: mod_base = OTHER; note = 2'-fluoroguanosine-3'-phosphate
  modified_base 8: mod_base = OTHER; note = 2'-O-methyladenosine-3'-phosphate
  modified_base 9: mod_base = OTHER; note = 2'-fluorouridine-3'-phosphate
  modified_base 10: mod_base = OTHER; note = 2'-fluorocytidine-3'-phosphate
  modified_base 11: mod_base = OTHER; note = 2'-fluoroadenosine-3'-phosphate
  modified_base 12: mod_base = OTHER; note = 2'-O-methylguanosine-3'-phosphate
  modified_base 13: mod_base = OTHER; note = 2'-O-methyluridine-3'-phosphate
  modified_base 14: mod_base = OTHER; note = 2'-O-methylguanosine-3'-phosphate
  modified_base 15: mod_base = OTHER; note = 2'-O-methylcytidine-3'-phosphate
  modified_base 16: mod_base = OTHER; note = 2'-O-methyladenosine-3'-phosphate
  modified_base 17: mod_base = OTHER; note = 2'-O-methyladenosine-3'-phosphate
  modified_base 18: mod_base = OTHER; note = 2'-O-methyluridine-3'-phosphate
  modified_base 19: mod_base = OTHER; note = 2'-O-methyluridine-3'-phosphate
  modified_base 20: mod_base = OTHER; note = 2'-O-methylguanosine-3'-phosphate
  modified_base 21: mod_base = OTHER; note = 2'-O-methyladenosine
catggtgatcagtgcaattga

SEQ ID NO: 1026 - RNA, 21 nt, synthetic construct
  source 1..21: mol_type = other RNA
  modified_base 1: mod_base = OTHER; note = 2'-O-methyladenosine-3'-phosphorothioate
  modified_base 2: mod_base = OTHER; note = 2'-O-methyluridine-3'-phosphorothioate
  modified_base 3: mod_base = OTHER; note = 2'-O-methylguanosine-3'-phosphate
  modified_base 4: mod_base = OTHER; note = 2'-O-methylguanosine-3'-phosphate
  modified_base 5: mod_base = OTHER; note = 2'-O-methyluridine-3'-phosphate
  modified_base 6: mod_base = OTHER; note = 2'-O-methylguanosine-3'-phosphate
  modified_base 7: mod_base = OTHER; note = 2'-fluoroadenosine-3'-phosphate
  modified_base 8: mod_base = OTHER; note = 2'-O-methyluridine-3'-phosphate
  modified_base 9: mod_base = OTHER; note = 2'-fluorocytidine-3'-phosphate
  modified_base 10: mod_base = OTHER; note = 2'-fluoroadenosine-3'-phosphate
  modified_base 11: mod_base = OTHER; note = 2'-fluoroguanosine-3'-phosphate
  modified_base 12: mod_base = OTHER; note = 2'-O-methyluridine-3'-phosphate
  modified_base 13: mod_base = OTHER; note = 2'-O-methylguanosine-3'-phosphate
  modified_base 14: mod_base = OTHER; note = 2'-O-methylcytidine-3'-phosphate
  modified_base 15: mod_base = OTHER; note = 2'-O-methyladenosine-3'-phosphate
  modified_base 16: mod_base = OTHER; note = 2'-O-methyladenosine-3'-phosphate
  modified_base 17: mod_base = OTHER; note = 2'-O-methyluridine-3'-phosphate
  modified_base 18: mod_base = OTHER; note = 2'-O-methyluridine-3'-phosphate
  modified_base 19: mod_base = OTHER; note = 2'-O-methylguanosine-3'-phosphate
  modified_base 20: mod_base = OTHER; note = 2'-O-methyladenosine-3'-phosphate
  modified_base 21: mod_base = OTHER; note = 2'-O-methyladenosine
atggtgatcagtgcaattgaa

SEQ ID NO: 1027 - RNA, 21 nt, synthetic construct
  source 1..21: mol_type = other RNA
  modified_base 1: mod_base = OTHER; note = 2'-O-methyladenosine-3'-phosphorothioate
  modified_base 2: mod_base = OTHER; note = 2'-O-methyladenosine-3'-phosphorothioate
  modified_base 3: mod_base = OTHER; note = 2'-O-methyladenosine-3'-phosphate
  modified_base 4: mod_base = OTHER; note = 2'-O-methylcytidine-3'-phosphate
  modified_base 5: mod_base = OTHER; note = 2'-O-methyluridine-3'-phosphate
  modified_base 6: mod_base = OTHER; note = 2'-O-methylcytidine-3'-phosphate
  modified_base 7: mod_base = OTHER; note = 2'-fluorocytidine-3'-phosphate
  modified_base 8: mod_base = OTHER; note = 2'-O-methyluridine-3'-phosphate
  modified_base 9: mod_base = OTHER; note = 2'-fluoroguanosine-3'-phosphate
  modified_base 10: mod_base = OTHER; note = 2'-fluoroadenosine-3'-phosphate
  modified_base 11: mod_base = OTHER; note = 2'-fluorouridine-3'-phosphate
  modified_base 12: mod_base = OTHER; note = 2'-O-methyluridine-3'-phosphate
  modified_base 13: mod_base = OTHER; note = 2'-O-methyluridine-3'-phosphate
  modified_base 14: mod_base = OTHER; note = 2'-O-methyluridine-3'-phosphate
  modified_base 15: mod_base = OTHER; note = 2'-O-methylguanosine-3'-phosphate
  modified_base 16: mod_base = OTHER; note = 2'-O-methyluridine-3'-phosphate
  modified_base 17: mod_base = OTHER; note = 2'-O-methyladenosine-3'-phosphate
  modified_base 18: mod_base = OTHER; note = 2'-O-methylguanosine-3'-phosphate
  modified_base 19: mod_base = OTHER; note = 2'-O-methyluridine-3'-phosphate
  modified_base 20: mod_base = OTHER; note = 2'-O-methyluridine-3'-phosphate
  modified_base 21: mod_base = OTHER; note = 2'-O-methyladenosine
aaactcctgattttgtagtta

SEQ ID NO: 1028 - RNA, 21 nt, synthetic construct
  source 1..21: mol_type = other RNA
  modified_base 1: mod_base = OTHER; note = 2'-O-methyluridine-3'-phosphorothioate
  modified_base 2: mod_base = OTHER; note = 2'-O-methylcytidine-3'-phosphorothioate
  modified_base 3: mod_base = OTHER; note = 2'-O-methylcytidine-3'-phosphate
  modified_base 4: mod_base = OTHER; note = 2'-O-methyluridine-3'-phosphate
  modified_base 5: mod_base = OTHER; note = 2'-O-methylguanosine-3'-phosphate
  modified_base 6: mod_base = OTHER; note = 2'-O-methyladenosine-3'-phosphate
  modified_base 7: mod_base = OTHER; note = 2'-fluorouridine-3'-phosphate
  modified_base 8: mod_base = OTHER; note = 2'-O-methyluridine-3'-phosphate
  modified_base 9: mod_base = OTHER; note = 2'-fluorouridine-3'-phosphate
  modified_base 10: mod_base = OTHER; note = 2'-fluorouridine-3'-phosphate
  modified_base 11: mod_base = OTHER; note = 2'-fluoroguanosine-3'-phosphate
  modified_base 12: mod_base = OTHER; note = 2'-O-methyluridine-3'-phosphate
  modified_base 13: mod_base = OTHER; note = 2'-O-methyladenosine-3'-phosphate
  modified_base 14: mod_base = OTHER; note = 2'-O-methylguanosine-3'-phosphate
  modified_base 15: mod_base = OTHER; note = 2'-O-methyluridine-3'-phosphate
  modified_base 16: mod_base = OTHER; note = 2'-O-methyluridine-3'-phosphate
  modified_base 17: mod_base = OTHER; note = 2'-O-methyladenosine-3'-phosphate
  modified_base 18: mod_base = OTHER; note = 2'-O-methyladenosine-3'-phosphate
  modified_base 19: mod_base = OTHER; note = 2'-O-methyluridine-3'-phosphate
  modified_base 20: mod_base = OTHER; note = 2'-O-methyluridine-3'-phosphate
  modified_base 21: mod_base = OTHER; note = 2'-O-methyluridine
tcctgattttgtagttaattt

SEQ ID NO: 1029 - RNA, 21 nt, synthetic construct
  source 1..21: mol_type = other RNA
  modified_base 1: mod_base = OTHER; note = 2'-O-methylcytidine-3'-phosphorothioate
  modified_base 2: mod_base = OTHER; note = 2'-O-methylcytidine-3'-phosphorothioate
  modified_base 3: mod_base = OTHER; note = 2'-O-methyluridine-3'-phosphate
  modified_base 4: mod_base = OTHER; note = 2'-O-methylguanosine-3'-phosphate
  modified_base 5: mod_base = OTHER; note = 2'-O-methyladenosine-3'-phosphate
  modified_base 6: mod_base = OTHER; note = 2'-O-methyluridine-3'-phosphate
  modified_base 7: mod_base = OTHER; note = 2'-fluorouridine-3'-phosphate
  modified_base 8: mod_base = OTHER; note = 2'-O-methyluridine-3'-phosphate
  modified_base 9: mod_base = OTHER; note = 2'-fluorouridine-3'-phosphate
  modified_base 10: mod_base = OTHER; note = 2'-fluoroguanosine-3'-phosphate
  modified_base 11: mod_base = OTHER; note = 2'-fluorouridine-3'-phosphate
  modified_base 12: mod_base = OTHER; note = 2'-O-methyladenosine-3'-phosphate
  modified_base 13: mod_base = OTHER; note = 2'-O-methylguanosine-3'-phosphate
  modified_base 14: mod_base = OTHER; note = 2'-O-methyluridine-3'-phosphate
  modified_base 15: mod_base = OTHER; note = 2'-O-methyluridine-3'-phosphate
  modified_base 16: mod_base = OTHER; note = 2'-O-methyladenosine-3'-phosphate
  modified_base 17: mod_base = OTHER; note = 2'-O-methyladenosine-3'-phosphate
  modified_base 18: mod_base = OTHER; note = 2'-O-methyluridine-3'-phosphate
  modified_base 19: mod_base = OTHER; note = 2'-O-methyluridine-3'-phosphate
  modified_base 20: mod_base = OTHER; note = 2'-O-methyluridine-3'-phosphate
  modified_base 21: mod_base = OTHER; note = 2'-O-methyladenosine
cctgattttgtagttaattta

SEQ ID NO: 1030 - RNA, 21 nt, synthetic construct
  source 1..21: mol_type = other RNA
  modified_base 1: mod_base = OTHER; note = 2'-O-methyladenosine-3'-phosphorothioate
  modified_base 2: mod_base = OTHER; note = 2'-O-methyluridine-3'-phosphorothioate
  modified_base 3: mod_base = OTHER; note = 2'-O-methyluridine-3'-phosphate
  modified_base 4: mod_base = OTHER; note = 2'-O-methyluridine-3'-phosphate
  modified_base 5: mod_base = OTHER; note = 2'-O-methyladenosine-3'-phosphate
  modified_base 6: mod_base = OTHER; note = 2'-O-methyluridine-3'-phosphate
  modified_base 7: mod_base = OTHER; note = 2'-fluorouridine-3'-phosphate
  modified_base 8: mod_base = OTHER; note = 2'-O-methyladenosine-3'-phosphate
  modified_base 9: mod_base = OTHER; note = 2'-fluoroadenosine-3'-phosphate
  modified_base 10: mod_base = OTHER; note = 2'-fluoroguanosine-3'-phosphate
  modified_base 11: mod_base = OTHER; note = 2'-fluorouridine-3'-phosphate
  modified_base 12: mod_base = OTHER; note = 2'-O-methylcytidine-3'-phosphate
  modified_base 13: mod_base = OTHER; note = 2'-O-methyluridine-3'-phosphate
  modified_base 14: mod_base = OTHER; note = 2'-O-methylguanosine-3'-phosphate
  modified_base 15: mod_base = OTHER; note = 2'-O-methylguanosine-3'-phosphate
  modified_base 16: mod_base = OTHER; note = 2'-O-methylguanosine-3'-phosphate
  modified_base 17: mod_base = OTHER; note = 2'-O-methyladenosine-3'-phosphate
  modified_base 18: mod_base = OTHER; note = 2'-O-methyluridine-3'-phosphate
  modified_base 19: mod_base = OTHER; note = 2'-O-methylguanosine-3'-phosphate
  modified_base 20: mod_base = OTHER; note = 2'-O-methyluridine-3'-phosphate
  modified_base 21: mod_base = OTHER; note = 2'-O-methyladenosine
atttattaagtctgggatgta

SEQ ID NO: 1031 - RNA, 21 nt, synthetic construct
  source 1..21: mol_type = other RNA
  modified_base 1: mod_base = OTHER; note = 2'-O-methyluridine-3'-phosphorothioate
  modified_base 2: mod_base = OTHER; note = 2'-O-methyluridine-3'-phosphorothioate
  modified_base 3: mod_base = OTHER; note = 2'-O-methyluridine-3'-phosphate
  modified_base 4: mod_base = OTHER; note = 2'-O-methyladenosine-3'-phosphate
  modified_base 5: mod_base = OTHER; note = 2'-O-methyluridine-3'-phosphate
  modified_base 6: mod_base = OTHER; note = 2'-O-methyluridine-3'-phosphate
  modified_base 7: mod_base = OTHER; note = 2'-fluoroadenosine-3'-phosphate
  modified_base 8: mod_base = OTHER; note = 2'-O-methyladenosine-3'-phosphate
  modified_base 9: mod_base = OTHER; note = 2'-fluoroguanosine-3'-phosphate
  modified_base 10: mod_base = OTHER; note = 2'-fluorouridine-3'-phosphate
  modified_base 11: mod_base = OTHER; note = 2'-fluorocytidine-3'-phosphate
  modified_base 12: mod_base = OTHER; note = 2'-O-methyluridine-3'-phosphate
  modified_base 13: mod_base = OTHER; note = 2'-O-methylguanosine-3'-phosphate
  modified_base 14: mod_base = OTHER; note = 2'-O-methylguanosine-3'-phosphate
  modified_base 15: mod_base = OTHER; note = 2'-O-methylguanosine-3'-phosphate
  modified_base 16: mod_base = OTHER; note = 2'-O-methyladenosine-3'-phosphate
  modified_base 17: mod_base = OTHER; note = 2'-O-methyluridine-3'-phosphate
  modified_base 18: mod_base = OTHER; note = 2'-O-methylguanosine-3'-phosphate
  modified_base 19: mod_base = OTHER; note = 2'-O-methyluridine-3'-phosphate
  modified_base 20: mod_base = OTHER; note = 2'-O-methyladenosine-3'-phosphate
  modified_base 21: mod_base = OTHER; note = 2'-O-methyladenosine
tttattaagtctgggatgtaa

SEQ ID NO: 1032 - RNA, 21 nt, synthetic construct
  source 1..21: mol_type = other RNA
  modified_base 1: mod_base = OTHER; note = 2'-O-methylcytidine-3'-phosphorothioate
  modified_base 2: mod_base = OTHER; note = 2'-O-methyladenosine-3'-phosphorothioate
  modified_base 3: mod_base = OTHER; note = 2'-O-methyladenosine-3'-phosphate
  modified_base 4: mod_base = OTHER; note = 2'-O-methylguanosine-3'-phosphate
  modified_base 5: mod_base = OTHER; note = 2'-O-methyladenosine-3'-phosphate
  modified_base 6: mod_base = OTHER; note = 2'-O-methyladenosine-3'-phosphate
  modified_base 7: mod_base = OTHER; note = 2'-fluoroguanosine-3'-phosphate
  modified_base 8: mod_base = OTHER; note = 2'-O-methyluridine-3'-phosphate
  modified_base 9: mod_base = OTHER; note = 2'-fluoroadenosine-3'-phosphate
  modified_base 10: mod_base = OTHER; note = 2'-fluoroadenosine-3'-phosphate
  modified_base 11: mod_base = OTHER; note = 2'-fluoroguanosine-3'-phosphate
  modified_base 12: mod_base = OTHER; note = 2'-O-methyladenosine-3'-phosphate
  modified_base 13: mod_base = OTHER; note = 2'-O-methylguanosine-3'-phosphate
  modified_base 14: mod_base = OTHER; note = 2'-O-methylcytidine-3'-phosphate
  modified_base 15: mod_base = OTHER; note = 2'-O-methyluridine-3'-phosphate
  modified_base 16: mod_base = OTHER; note = 2'-O-methyladenosine-3'-phosphate
  modified_base 17: mod_base = OTHER; note = 2'-O-methyladenosine-3'-phosphate
  modified_base 18: mod_base = OTHER; note = 2'-O-methylguanosine-3'-phosphate
  modified_base 19: mod_base = OTHER; note = 2'-O-methyluridine-3'-phosphate
  modified_base 20: mod_base = OTHER; note = 2'-O-methyluridine-3'-phosphate
  modified_base 21: mod_base = OTHER; note = 2'-O-methyladenosine
caagaagtaagagctaagtta

SEQ ID NO: 1033 - RNA, 21 nt, synthetic construct
  source 1..21: mol_type = other RNA
  modified_base 1: mod_base = OTHER; note = 2'-O-methyladenosine-3'-phosphorothioate
  modified_base 2: mod_base = OTHER; note = 2'-O-methyluridine-3'-phosphorothioate
  modified_base 3: mod_base = OTHER; note = 2'-O-methyluridine-3'-phosphate
  modified_base 4: mod_base = OTHER; note = 2'-O-methyluridine-3'-phosphate
  modified_base 5: mod_base = OTHER; note = 2'-O-methyladenosine-3'-phosphate
  modified_base 6: mod_base = OTHER; note = 2'-O-methyluridine-3'-phosphate
  modified_base 7: mod_base = OTHER; note = 2'-fluorocytidine-3'-phosphate
  modified_base 8: mod_base = OTHER; note = 2'-O-methyluridine-3'-phosphate
  modified_base 9: mod_base = OTHER; note = 2'-fluorocytidine-3'-phosphate
  modified_base 10: mod_base = OTHER; note = 2'-fluorocytidine-3'-phosphate
  modified_base 11: mod_base = OTHER; note = 2'-fluoroguanosine-3'-phosphate
  modified_base 12: mod_base = OTHER; note = 2'-O-methylcytidine-3'-phosphate
  modified_base 13: mod_base = OTHER; note = 2'-O-methyladenosine-3'-phosphate
  modified_base 14: mod_base = OTHER; note = 2'-O-methylguanosine-3'-phosphate
  modified_base 15: mod_base = OTHER; note = 2'-O-methylguanosine-3'-phosphate
  modified_base 16: mod_base = OTHER; note = 2'-O-methylcytidine-3'-phosphate
  modified_base 17: mod_base = OTHER; note = 2'-O-methyluridine-3'-phosphate
  modified_base 18: mod_base = OTHER; note = 2'-O-methyladenosine-3'-phosphate
  modified_base 19: mod_base = OTHER; note = 2'-O-methyluridine-3'-phosphate
  modified_base 20: mod_base = OTHER; note = 2'-O-methyluridine-3'-phosphate
  modified_base 21: mod_base = OTHER; note = 2'-O-methyluridine
atttatctccgcaggctattt

SEQ ID NO: 1034 - RNA, 21 nt, synthetic construct
  source 1..21: mol_type = other RNA
  modified_base 1: mod_base = OTHER; note = 2'-O-methyluridine-3'-phosphorothioate
  modified_base 2: mod_base = OTHER; note = 2'-O-methylcytidine-3'-phosphorothioate
  modified_base 3: mod_base = OTHER; note = 2'-O-methyluridine-3'-phosphate
  modified_base 4: mod_base = OTHER; note = 2'-O-methylcytidine-3'-phosphate
  modified_base 5: mod_base = OTHER; note = 2'-O-methylcytidine-3'-phosphate
  modified_base 6: mod_base = OTHER; note = 2'-O-methylguanosine-3'-phosphate
  modified_base 7: mod_base = OTHER; note = 2'-fluorocytidine-3'-phosphate
  modified_base 8: mod_base = OTHER; note = 2'-O-methyladenosine-3'-phosphate
  modified_base 9: mod_base = OTHER; note = 2'-fluoroguanosine-3'-phosphate
  modified_base 10: mod_base = OTHER; note = 2'-fluoroguanosine-3'-phosphate
  modified_base 11: mod_base = OTHER; note = 2'-fluorocytidine-3'-phosphate
  modified_base 12: mod_base = OTHER; note = 2'-O-methyluridine-3'-phosphate
  modified_base 13: mod_base = OTHER; note = 2'-O-methyladenosine-3'-phosphate
  modified_base 14: mod_base = OTHER; note = 2'-O-methyluridine-3'-phosphate
  modified_base 15: mod_base = OTHER; note = 2'-O-methyluridine-3'-phosphate
  modified_base 16: mod_base = OTHER; note = 2'-O-methyluridine-3'-phosphate
  modified_base 17: mod_base = OTHER; note = 2'-O-methylguanosine-3'-phosphate
  modified_base 18: mod_base = OTHER; note = 2'-O-methyluridine-3'-phosphate
  modified_base 19: mod_base = OTHER; note = 2'-O-methyluridine-3'-phosphate
  modified_base 20: mod_base = OTHER; note = 2'-O-methylcytidine-3'-phosphate
  modified_base 21: mod_base = OTHER; note = 2'-O-methyladenosine
tctccgcaggctatttgttca

SEQ ID NO: 1035 - RNA, 21 nt, synthetic construct
  source 1..21: mol_type = other RNA
  modified_base 1: mod_base = OTHER; note = 2'-O-methylcytidine-3'-phosphorothioate
  modified_base 2: mod_base = OTHER; note = 2'-O-methyluridine-3'-phosphorothioate
  modified_base 3: mod_base = OTHER; note = 2'-O-methylcytidine-3'-phosphate
  modified_base 4: mod_base = OTHER; note = 2'-O-methylcytidine-3'-phosphate
  modified_base 5: mod_base = OTHER; note = 2'-O-methylguanosine-3'-phosphate
  modified_base 6: mod_base = OTHER; note = 2'-O-methylcytidine-3'-phosphate
  modified_base 7: mod_base = OTHER; note = 2'-fluoroadenosine-3'-phosphate
  modified_base 8: mod_base = OTHER; note = 2'-O-methylguanosine-3'-phosphate
  modified_base 9: mod_base = OTHER; note = 2'-fluoroguanosine-3'-phosphate
  modified_base 10: mod_base = OTHER; note = 2'-fluorocytidine-3'-phosphate
  modified_base 11: mod_base = OTHER; note = 2'-fluorouridine-3'-phosphate
  modified_base 12: mod_base = OTHER; note = 2'-O-methyladenosine-3'-phosphate
  modified_base 13: mod_base = OTHER; note = 2'-O-methyluridine-3'-phosphate
  modified_base 14: mod_base = OTHER; note = 2'-O-methyluridine-3'-phosphate
  modified_base 15: mod_base = OTHER; note = 2'-O-methyluridine-3'-phosphate
  modified_base 16: mod_base = OTHER; note = 2'-O-methylguanosine-3'-phosphate
  modified_base 17: mod_base = OTHER; note = 2'-O-methyluridine-3'-phosphate
  modified_base 18: mod_base = OTHER; note = 2'-O-methyluridine-3'-phosphate
  modified_base 19: mod_base = OTHER; note = 2'-O-methylcytidine-3'-phosphate
  modified_base 20: mod_base = OTHER; note = 2'-O-methyladenosine-3'-phosphate
  modified_base 21: mod_base = OTHER; note = 2'-O-methyladenosine
ctccgcaggctatttgttcaa

SEQ ID NO: 1036 - RNA, 21 nt, synthetic construct
  source 1..21: mol_type = other RNA
  modified_base 1: mod_base = OTHER; note = 2'-O-methyluridine-3'-phosphorothioate
  modified_base 2: mod_base = OTHER; note = 2'-O-methyluridine-3'-phosphorothioate
  modified_base 3: mod_base = OTHER; note = 2'-O-methylcytidine-3'-phosphate
  modified_base 4: mod_base = OTHER; note = 2'-O-methyladenosine-3'-phosphate
  modified_base 5: mod_base = OTHER; note = 2'-O-methylguanosine-3'-phosphate
  modified_base 6: mod_base = OTHER; note = 2'-O-methyladenosine-3'-phosphate
  modified_base 7: mod_base = OTHER; note = 2'-fluoroguanosine-3'-phosphate
  modified_base 8: mod_base = OTHER; note = 2'-O-methyladenosine-3'-phosphate
  modified_base 9: mod_base = OTHER; note = 2'-fluoroguanosine-3'-phosphate
  modified_base 10: mod_base = OTHER; note = 2'-fluoroguanosine-3'-phosphate
  modified_base 11: mod_base = OTHER; note = 2'-fluorocytidine-3'-phosphate
  modified_base 12: mod_base = OTHER; note = 2'-O-methylcytidine-3'-phosphate
  modified_base 13: mod_base = OTHER; note = 2'-O-methyluridine-3'-phosphate
  modified_base 14: mod_base = OTHER; note = 2'-O-methyluridine-3'-phosphate
  modified_base 15: mod_base = OTHER; note = 2'-O-methyluridine-3'-phosphate
  modified_base 16: mod_base = OTHER; note = 2'-O-methyluridine-3'-phosphate
  modified_base 17: mod_base = OTHER; note = 2'-O-methylguanosine-3'-phosphate
  modified_base 18: mod_base = OTHER; note = 2'-O-methyluridine-3'-phosphate
  modified_base 19: mod_base = OTHER; note = 2'-O-methyluridine-3'-phosphate
  modified_base 20: mod_base = OTHER; note = 2'-O-methyluridine-3'-phosphate
  modified_base 21: mod_base = OTHER; note = 2'-O-methyladenosine
ttcagagaggccttttgttta

SEQ ID NO: 1037 - RNA, 21 nt, synthetic construct
  source 1..21: mol_type = other RNA
  modified_base 1: mod_base = OTHER; note = 2'-O-methylcytidine-3'-phosphorothioate
  modified_base 2: mod_base = OTHER; note = 2'-O-methyladenosine-3'-phosphorothioate
  modified_base 3: mod_base = OTHER; note = 2'-O-methylguanosine-3'-phosphate
  modified_base 4: mod_base = OTHER; note = 2'-O-methyladenosine-3'-phosphate
  modified_base 5: mod_base = OTHER; note = 2'-O-methylguanosine-3'-phosphate
  modified_base 6: mod_base = OTHER; note = 2'-O-methyladenosine-3'-phosphate
  modified_base 7: mod_base = OTHER; note = 2'-fluoroguanosine-3'-phosphate
  modified_base 8: mod_base = OTHER; note = 2'-O-methylguanosine-3'-phosphate
  modified_base 9: mod_base = OTHER; note = 2'-fluorocytidine-3'-phosphate
  modified_base 10: mod_base = OTHER; note = 2'-fluorocytidine-3'-phosphate
  modified_base 11: mod_base = OTHER; note = 2'-fluorouridine-3'-phosphate
  modified_base 12: mod_base = OTHER; note = 2'-O-methyluridine-3'-phosphate
  modified_base 13: mod_base = OTHER; note = 2'-O-methyluridine-3'-phosphate
  modified_base 14: mod_base = OTHER; note = 2'-O-methyluridine-3'-phosphate
  modified_base 15: mod_base = OTHER; note = 2'-O-methylguanosine-3'-phosphate
  modified_base 16: mod_base = OTHER; note = 2'-O-methyluridine-3'-phosphate
  modified_base 17: mod_base = OTHER; note = 2'-O-methyluridine-3'-phosphate
  modified_base 18: mod_base = OTHER; note = 2'-O-methyluridine-3'-phosphate
  modified_base 19: mod_base = OTHER; note = 2'-O-methyladenosine-3'-phosphate
  modified_base 20: mod_base = OTHER; note = 2'-O-methyladenosine-3'-phosphate
  modified_base 21: mod_base = OTHER; note = 2'-O-methyladenosine
cagagaggccttttgtttaaa

SEQ ID NO: 1038 - RNA, 21 nt, synthetic construct
  source 1..21: mol_type = other RNA
  modified_base 1: mod_base = OTHER; note = 2'-O-methyladenosine-3'-phosphorothioate
  modified_base 2: mod_base = OTHER; note = 2'-O-methylguanosine-3'-phosphorothioate
  modified_base 3: mod_base = OTHER; note = 2'-O-methyladenosine-3'-phosphate
  modified_base 4: mod_base = OTHER; note = 2'-O-methylguanosine-3'-phosphate
  modified_base 5: mod_base = OTHER; note = 2'-O-methylguanosine-3'-phosphate
  modified_base 6: mod_base = OTHER; note = 2'-O-methylcytidine-3'-phosphate
  modified_base 7: mod_base = OTHER; note = 2'-fluorocytidine-3'-phosphate
  modified_base 8: mod_base = OTHER; note = 2'-O-methyluridine-3'-phosphate
  modified_base 9: mod_base = OTHER; note = 2'-fluorouridine-3'-phosphate
  modified_base 10: mod_base = OTHER; note = 2'-fluorouridine-3'-phosphate
  modified_base 11: mod_base = OTHER; note = 2'-fluorouridine-3'-phosphate
  modified_base 12: mod_base = OTHER; note = 2'-O-methylguanosine-3'-phosphate
  modified_base 13: mod_base = OTHER; note = 2'-O-methyluridine-3'-phosphate
  modified_base 14: mod_base = OTHER; note = 2'-O-methyluridine-3'-phosphate
  modified_base 15: mod_base = OTHER; note = 2'-O-methyluridine-3'-phosphate
  modified_base 16: mod_base = OTHER; note = 2'-O-methyladenosine-3'-phosphate
  modified_base 17: mod_base = OTHER; note = 2'-O-methyladenosine-3'-phosphate
  modified_base 18: mod_base = OTHER; note = 2'-O-methyladenosine-3'-phosphate
  modified_base 19: mod_base = OTHER; note = 2'-O-methyluridine-3'-phosphate
  modified_base 20: mod_base = OTHER; note = 2'-O-methyladenosine-3'-phosphate
  modified_base 21: mod_base = OTHER; note = 2'-O-methyluridine
agaggccttttgtttaaatat

SEQ ID NO: 1039 - RNA, 21 nt, synthetic construct
  source 1..21: mol_type = other RNA
  modified_base 1: mod_base = OTHER; note = 2'-O-methylcytidine-3'-phosphorothioate
  modified_base 2: mod_base = OTHER; note = 2'-O-methyluridine-3'-phosphorothioate
  modified_base 3: mod_base = OTHER; note = 2'-O-methylguanosine-3'-phosphate
  modified_base 4: mod_base = OTHER; note = 2'-O-methylguanosine-3'-phosphate
  modified_base 5: mod_base = OTHER; note = 2'-O-methyladenosine-3'-phosphate
  modified_base 6: mod_base = OTHER; note = 2'-O-methyluridine-3'-phosphate
  modified_base 7: mod_base = OTHER; note = 2'-fluorouridine-3'-phosphate
  modified_base 8: mod_base = OTHER; note = 2'-O-methylguanosine-3'-phosphate
  modified_base 9: mod_base = OTHER; note = 2'-fluoroguanosine-3'-phosphate
  modified_base 10: mod_base = OTHER; note = 2'-fluorocytidine-3'-phosphate
  modified_base 11: mod_base = OTHER; note = 2'-fluorouridine-3'-phosphate
  modified_base 12: mod_base = OTHER; note = 2'-O-methyladenosine-3'-phosphate
  modified_base 13: mod_base = OTHER; note = 2'-O-methyluridine-3'-phosphate
  modified_base 14: mod_base = OTHER; note = 2'-O-methyladenosine-3'-phosphate
  modified_base 15: mod_base = OTHER; note = 2'-O-methyladenosine-3'-phosphate
  modified_base 16: mod_base = OTHER; note = 2'-O-methylcytidine-3'-phosphate
  modified_base 17: mod_base = OTHER; note = 2'-O-methyladenosine-3'-phosphate
  modified_base 18: mod_base = OTHER; note = 2'-O-methyluridine-3'-phosphate
  modified_base 19: mod_base = OTHER; note = 2'-O-methylguanosine-3'-phosphate
  modified_base 20: mod_base = OTHER; note = 2'-O-methyluridine-3'-phosphate
  modified_base 21: mod_base = OTHER; note = 2'-O-methyladenosine
ctggattggctataacatgta

SEQ ID NO: 1040 - RNA, 21 nt, synthetic construct
  source 1..21: mol_type = other RNA
  modified_base 1: mod_base = OTHER; note = 2'-O-methyluridine-3'-phosphorothioate
  modified_base 2: mod_base = OTHER; note = 2'-O-methylguanosine-3'-phosphorothioate
  modified_base 3: mod_base = OTHER; note = 2'-O-methylguanosine-3'-phosphate
  modified_base 4: mod_base = OTHER; note = 2'-O-methyladenosine-3'-phosphate
  modified_base 5: mod_base = OTHER; note = 2'-O-methyluridine-3'-phosphate
  modified_base 6: mod_base = OTHER; note = 2'-O-methyluridine-3'-phosphate
  modified_base 7: mod_base = OTHER; note = 2'-fluoroguanosine-3'-phosphate
  modified_base 8: mod_base = OTHER; note = 2'-O-methylguanosine-3'-phosphate
  modified_base 9: mod_base = OTHER; note = 2'-fluorocytidine-3'-phosphate
  modified_base 10: mod_base = OTHER; note = 2'-fluorouridine-3'-phosphate
  modified_base 11: mod_base = OTHER; note = 2'-fluoroadenosine-3'-phosphate
  modified_base 12: mod_base = OTHER; note = 2'-O-methyluridine-3'-phosphate
  modified_base 13: mod_base = OTHER; note = 2'-O-methyladenosine-3'-phosphate
  modified_base 14: mod_base = OTHER; note = 2'-O-methyladenosine-3'-phosphate
  modified_base 15: mod_base = OTHER; note = 2'-O-methylcytidine-3'-phosphate
  modified_base 16: mod_base = OTHER; note = 2'-O-methyladenosine-3'-phosphate
  modified_base 17: mod_base = OTHER; note = 2'-O-methyluridine-3'-phosphate
  modified_base 18: mod_base = OTHER; note = 2'-O-methylguanosine-3'-phosphate
  modified_base 19: mod_base = OTHER; note = 2'-O-methyluridine-3'-phosphate
  modified_base 20: mod_base = OTHER; note = 2'-O-methylcytidine-3'-phosphate
  modified_base 21: mod_base = OTHER; note = 2'-O-methyluridine
tggattggctataacatgtct

SEQ ID NO: 1041 - RNA, 21 nt, synthetic construct
  source 1..21: mol_type = other RNA
  modified_base 1: mod_base = OTHER; note = 2'-O-methyluridine-3'-phosphorothioate
  modified_base 2: mod_base = OTHER; note = 2'-O-methyluridine-3'-phosphorothioate
  modified_base 3: mod_base = OTHER; note = 2'-O-methylguanosine-3'-phosphate
  modified_base 4: mod_base = OTHER; note = 2'-O-methylguanosine-3'-phosphate
  modified_base 5: mod_base = OTHER; note = 2'-O-methylcytidine-3'-phosphate
  modified_base 6: mod_base = OTHER; note = 2'-O-methyluridine-3'-phosphate
  modified_base 7: mod_base = OTHER; note = 2'-fluoroadenosine-3'-phosphate
  modified_base 8: mod_base = OTHER; note = 2'-O-methyluridine-3'-phosphate
  modified_base 9: mod_base = OTHER; note = 2'-fluoroadenosine-3'-phosphate
  modified_base 10: mod_base = OTHER; note = 2'-fluoroadenosine-3'-phosphate
  modified_base 11: mod_base = OTHER; note = 2'-fluorocytidine-3'-phosphate
  modified_base 12: mod_base = OTHER; note = 2'-O-methyladenosine-3'-phosphate
  modified_base 13: mod_base = OTHER; note = 2'-O-methyluridine-3'-phosphate
  modified_base 14: mod_base = OTHER; note = 2'-O-methylguanosine-3'-phosphate
  modified_base 15: mod_base = OTHER; note = 2'-O-methyluridine-3'-phosphate
  modified_base 16: mod_base = OTHER; note = 2'-O-methylcytidine-3'-phosphate
  modified_base 17: mod_base = OTHER; note = 2'-O-methyluridine-3'-phosphate
  modified_base 18: mod_base = OTHER; note = 2'-O-methyluridine-3'-phosphate
  modified_base 19: mod_base = OTHER; note = 2'-O-methyluridine-3'-phosphate
  modified_base 20: mod_base = OTHER; note = 2'-O-methylcytidine-3'-phosphate
  modified_base 21: mod_base = OTHER; note = 2'-O-methyladenosine
ttggctataacatgtctttca

SEQ ID NO: 1042 - RNA, 21 nt, synthetic construct
  source 1..21: mol_type = other RNA
  modified_base 1: mod_base = OTHER; note = 2'-O-methylcytidine-3'-phosphorothioate
  modified_base 2: mod_base = OTHER; note = 2'-O-methyladenosine-3'-phosphorothioate
  modified_base 3: mod_base = OTHER; note = 2'-O-methyladenosine-3'-phosphate
  modified_base 4: mod_base = OTHER; note = 2'-O-methylguanosine-3'-phosphate
  modified_base 5: mod_base = OTHER; note = 2'-O-methyladenosine-3'-phosphate
  modified_base 6: mod_base = OTHER; note = 2'-O-methylcytidine-3'-phosphate
  modified_base 7: mod_base = OTHER; note = 2'-fluorouridine-3'-phosphate
  modified_base 8: mod_base = OTHER; note = 2'-O-methylguanosine-3'-phosphate
  modified_base 9: mod_base = OTHER; note = 2'-fluoroguanosine-3'-phosphate
  modified_base 10: mod_base = OTHER; note = 2'-fluoroguanosine-3'-phosphate
  modified_base 11: mod_base = OTHER; note = 2'-fluoroadenosine-3'-phosphate
  modified_base 12: mod_base = OTHER; note = 2'-O-methylcytidine-3'-phosphate
  modified_base 13: mod_base = OTHER; note = 2'-O-methylcytidine-3'-phosphate
  modified_base 14: mod_base = OTHER; note = 2'-O-methyluridine-3'-phosphate
  modified_base 15: mod_base = OTHER; note = 2'-O-methyluridine-3'-phosphate
  modified_base 16: mod_base = OTHER; note = 2'-O-methyladenosine-3'-phosphate
  modified_base 17: mod_base = OTHER; note = 2'-O-methylguanosine-3'-phosphate
  modified_base 18: mod_base = OTHER; note = 2'-O-methyladenosine-3'-phosphate
  modified_base 19: mod_base = OTHER; note = 2'-O-methyladenosine-3'-phosphate
  modified_base 20: mod_base = OTHER; note = 2'-O-methyladenosine-3'-phosphate
  modified_base 21: mod_base = OTHER; note = 2'-O-methyluridine
caagactgggaccttagaaat

SEQ ID NO: 1043 - RNA, 21 nt, synthetic construct
  source 1..21: mol_type = other RNA
  modified_base 1: mod_base = OTHER; note = 2'-O-methyladenosine-3'-phosphorothioate
  modified_base 2: mod_base = OTHER; note = 2'-O-methyladenosine-3'-phosphorothioate
  modified_base 3: mod_base = OTHER; note = 2'-O-methylguanosine-3'-phosphate
  modified_base 4: mod_base = OTHER; note = 2'-O-methyladenosine-3'-phosphate
  modified_base 5: mod_base = OTHER; note = 2'-O-methylcytidine-3'-phosphate
  modified_base 6: mod_base = OTHER; note = 2'-O-methyluridine-3'-phosphate
  modified_base 7: mod_base = OTHER; note = 2'-fluoroguanosine-3'-phosphate
  modified_base 8: mod_base = OTHER; note = 2'-O-methylguanosine-3'-phosphate
  modified_base 9: mod_base = OTHER; note = 2'-fluoroguanosine-3'-phosphate
  modified_base 10: mod_base = OTHER; note = 2'-fluoroadenosine-3'-phosphate
  modified_base 11: mod_base = OTHER; note = 2'-fluorocytidine-3'-phosphate
  modified_base 12: mod_base = OTHER; note = 2'-O-methylcytidine-3'-phosphate
  modified_base 13: mod_base = OTHER; note = 2'-O-methyluridine-3'-phosphate
  modified_base 14: mod_base = OTHER; note = 2'-O-methyluridine-3'-phosphate
  modified_base 15: mod_base = OTHER; note = 2'-O-methyladenosine-3'-phosphate
  modified_base 16: mod_base = OTHER; note = 2'-O-methylguanosine-3'-phosphate
  modified_base 17: mod_base = OTHER; note = 2'-O-methyladenosine-3'-phosphate
  modified_base 18: mod_base = OTHER; note = 2'-O-methyladenosine-3'-phosphate
  modified_base 19: mod_base = OTHER; note = 2'-O-methyladenosine-3'-phosphate
  modified_base 20: mod_base = OTHER; note = 2'-O-methyluridine-3'-phosphate
  modified_base 21: mod_base = OTHER; note = 2'-O-methyladenosine
aagactgggaccttagaaata

SEQ ID NO: 1044 - RNA, 21 nt, synthetic construct
  source 1..21: mol_type = other RNA
  modified_base 1: mod_base = OTHER; note = 2'-O-methyluridine-3'-phosphorothioate
  modified_base 2: mod_base = OTHER; note = 2'-O-methylcytidine-3'-phosphorothioate
  modified_base 3: mod_base = OTHER; note = 2'-O-methyluridine-3'-phosphate
  modified_base 4: mod_base = OTHER; note = 2'-O-methyladenosine-3'-phosphate
  modified_base 5: mod_base = OTHER; note = 2'-O-methyladenosine-3'-phosphate
  modified_base 6: mod_base = OTHER; note = 2'-O-methylguanosine-3'-phosphate
  modified_base 7: mod_base = OTHER; note = 2'-fluorocytidine-3'-phosphate
  modified_base 8: mod_base = OTHER; note = 2'-O-methylcytidine-3'-phosphate
  modified_base 9: mod_base = OTHER; note = 2'-fluoroadenosine-3'-phosphate
  modified_base 10: mod_base = OTHER; note = 2'-fluoroadenosine-3'-phosphate
  modified_base 11: mod_base = OTHER; note = 2'-fluorocytidine-3'-phosphate
  modified_base 12: mod_base = OTHER; note = 2'-O-methyluridine-3'-phosphate
  modified_base 13: mod_base = OTHER; note = 2'-O-methyluridine-3'-phosphate
  modified_base 14: mod_base = OTHER; note = 2'-O-methyluridine-3'-phosphate
  modified_base 15: mod_base = OTHER; note = 2'-O-methyladenosine-3'-phosphate
  modified_base 16: mod_base = OTHER; note = 2'-O-methyladenosine-3'-phosphate
  modified_base 17: mod_base = OTHER; note = 2'-O-methyluridine-3'-phosphate
  modified_base 18: mod_base = OTHER; note = 2'-O-methyluridine-3'-phosphate
  modified_base 19: mod_base = OTHER; note = 2'-O-methylguanosine-3'-phosphate
  modified_base 20: mod_base = OTHER; note = 2'-O-methylcytidine-3'-phosphate
  modified_base 21: mod_base = OTHER; note = 2'-O-methyluridine
tctaagccaactttaattgct

SEQ ID NO: 1045 - RNA, 21 nt, synthetic construct
  source 1..21: mol_type = other RNA
  modified_base 1: mod_base = OTHER; note = 2'-O-methyluridine-3'-phosphorothioate
  modified_base 2: mod_base = OTHER; note = 2'-O-methyluridine-3'-phosphorothioate
  modified_base 3: mod_base = OTHER; note = 2'-O-methyluridine-3'-phosphate
  modified_base 4: mod_base = OTHER; note = 2'-O-methylguanosine-3'-phosphate
  modified_base 5: mod_base = OTHER; note = 2'-O-methyluridine-3'-phosphate
  modified_base 6: mod_base = OTHER; note = 2'-O-methyladenosine-3'-phosphate
  modified_base 7: mod_base = OTHER; note = 2'-fluoroadenosine-3'-phosphate
  modified_base 8: mod_base = OTHER; note = 2'-O-methyladenosine-3'-phosphate
  modified_base 9: mod_base = OTHER; note = 2'-fluorocytidine-3'-phosphate
  modified_base 10: mod_base = OTHER; note = 2'-fluorouridine-3'-phosphate
  modified_base 11: mod_base = OTHER; note = 2'-fluoroguanosine-3'-phosphate
  modified_base 12: mod_base = OTHER; note = 2'-O-methyluridine-3'-phosphate
  modified_base 13: mod_base = OTHER; note = 2'-O-methyladenosine-3'-phosphate
  modified_base 14: mod_base = OTHER; note = 2'-O-methyluridine-3'-phosphate
  modified_base 15: mod_base = OTHER; note = 2'-O-methylcytidine-3'-phosphate
  modified_base 16: mod_base = OTHER; note = 2'-O-methyladenosine-3'-phosphate
  modified_base 17: mod_base = OTHER; note = 2'-O-methyladenosine-3'-phosphate
  modified_base 18: mod_base = OTHER; note = 2'-O-methyladenosine-3'-phosphate
  modified_base 19: mod_base = OTHER; note = 2'-O-methyluridine-3'-phosphate
  modified_base 20: mod_base = OTHER; note = 2'-O-methylcytidine-3'-phosphate
  modified_base 21: mod_base = OTHER; note = 2'-O-methyluridine
tttgtaaactgtatcaaatct

SEQ ID NO: 1046 - RNA, 21 nt, synthetic construct
  source 1..21: mol_type = other RNA
  modified_base 1: mod_base = OTHER; note = 2'-O-methyluridine-3'-phosphorothioate
  modified_base 2: mod_base = OTHER; note = 2'-O-methyladenosine-3'-phosphorothioate
  modified_base 3: mod_base = OTHER; note = 2'-O-methyluridine-3'-phosphate
  modified_base 4: mod_base = OTHER; note = 2'-O-methylcytidine-3'-phosphate
  modified_base 5: mod_base = OTHER; note = 2'-O-methyladenosine-3'-phosphate
  modified_base 6: mod_base = OTHER; note = 2'-O-methyladenosine-3'-phosphate
  modified_base 7: mod_base = OTHER; note = 2'-fluoroadenosine-3'-phosphate
  modified_base 8: mod_base = OTHER; note = 2'-O-methyluridine-3'-phosphate
  modified_base 9: mod_base = OTHER; note = 2'-fluorocytidine-3'-phosphate
  modified_base 10: mod_base = OTHER; note = 2'-fluorouridine-3'-phosphate
  modified_base 11: mod_base = OTHER; note = 2'-fluoroguanosine-3'-phosphate
  modified_base 12: mod_base = OTHER; note = 2'-O-methyluridine-3'-phosphate
  modified_base 13: mod_base = OTHER; note = 2'-O-methyladenosine-3'-phosphate
  modified_base 14: mod_base = OTHER; note = 2'-O-methyluridine-3'-phosphate
  modified_base 15: mod_base = OTHER; note = 2'-O-methyladenosine-3'-phosphate
  modified_base 16: mod_base = OTHER; note = 2'-O-methyluridine-3'-phosphate
  modified_base 17: mod_base = OTHER; note = 2'-O-methylguanosine-3'-phosphate
  modified_base 18: mod_base = OTHER; note = 2'-O-methyluridine-3'-phosphate
  modified_base 19: mod_base = OTHER; note = 2'-O-methyluridine-3'-phosphate
  modified_base 20: mod_base = OTHER; note = 2'-O-methylguanosine-3'-phosphate
  modified_base 21: mod_base = OTHER; note = 2'-O-methyluridine
tatcaaatctgtatatgttgt

SEQ ID NO: 1047 - RNA, 21 nt, synthetic construct
  source 1..21: mol_type = other RNA
  modified_base 1: mod_base = OTHER; note = 2'-O-methyluridine-3'-phosphorothioate
  modified_base 2: mod_base = OTHER; note = 2'-O-methyladenosine-3'-phosphorothioate
  modified_base 3: mod_base = OTHER; note = 2'-O-methyluridine-3'-phosphate
  modified_base 4: mod_base = OTHER; note = 2'-O-methylguanosine-3'-phosphate
  modified_base 5: mod_base = OTHER; note = 2'-O-methylcytidine-3'-phosphate
  modified_base 6: mod_base = OTHER; note = 2'-O-methyluridine-3'-phosphate
  modified_base 7: mod_base = OTHER; note = 2'-fluoroadenosine-3'-phosphate
  modified_base 8: mod_base = OTHER; note = 2'-O-methylguanosine-3'-phosphate
  modified_base 9: mod_base = OTHER; note = 2'-fluorouridine-3'-phosphate
  modified_base 10: mod_base = OTHER; note = 2'-fluorouridine-3'-phosphate
  modified_base 11: mod_base = OTHER; note = 2'-fluorouridine-3'-phosphate
  modified_base 12: mod_base = OTHER; note = 2'-O-methyladenosine-3'-phosphate
  modified_base 13: mod_base = OTHER; note = 2'-O-methyluridine-3'-phosphate
  modified_base 14: mod_base = OTHER; note = 2'-O-methyluridine-3'-phosphate
  modified_base 15: mod_base = OTHER; note = 2'-O-methylguanosine-3'-phosphate
  modified_base 16: mod_base = OTHER; note = 2'-O-methylguanosine-3'-phosphate
  modified_base 17: mod_base = OTHER; note = 2'-O-methyladenosine-3'-phosphate
  modified_base 18: mod_base = OTHER; note = 2'-O-methyladenosine-3'-phosphate
  modified_base 19: mod_base = OTHER; note = 2'-O-methylguanosine-3'-phosphate
  modified_base 20: mod_base = OTHER; note = 2'-O-methyluridine-3'-phosphate
  modified_base 21: mod_base = OTHER; note = 2'-O-methyladenosine
tatgctagtttattggaagta

SEQ ID NO: 1048 - RNA, 21 nt, synthetic construct
  source 1..21: mol_type = other RNA
  modified_base 1: mod_base = OTHER; note = 2'-O-methyladenosine-3'-phosphorothioate
  modified_base 2: mod_base = OTHER; note = 2'-O-methyluridine-3'-phosphorothioate
  modified_base 3: mod_base = OTHER; note = 2'-O-methyluridine-3'-phosphate
  modified_base 4: mod_base = OTHER; note = 2'-O-methylguanosine-3'-phosphate
  modified_base 5: mod_base = OTHER; note = 2'-O-methylguanosine-3'-phosphate
  modified_base 6: mod_base = OTHER; note = 2'-O-methyladenosine-3'-phosphate
  modified_base 7: mod_base = OTHER; note = 2'-fluoroadenosine-3'-phosphate
  modified_base 8: mod_base = OTHER; note = 2'-O-methylguanosine-3'-phosphate
  modified_base 9: mod_base = OTHER; note = 2'-fluorouridine-3'-phosphate
  modified_base 10: mod_base = OTHER; note = 2'-fluoroguanosine-3'-phosphate
  modified_base 11: mod_base = OTHER; note = 2'-fluorouridine-3'-phosphate
  modified_base 12: mod_base = OTHER; note = 2'-O-methyluridine-3'-phosphate
  modified_base 13: mod_base = OTHER; note = 2'-O-methylcytidine-3'-phosphate
  modified_base 14: mod_base = OTHER; note = 2'-O-methyladenosine-3'-phosphate
  modified_base 15: mod_base = OTHER; note = 2'-O-methyladenosine-3'-phosphate
  modified_base 16: mod_base = OTHER; note = 2'-O-methylguanosine-3'-phosphate
  modified_base 17: mod_base = OTHER; note = 2'-O-methyladenosine-3'-phosphate
  modified_base 18: mod_base = OTHER; note = 2'-O-methyladenosine-3'-phosphate
  modified_base 19: mod_base = OTHER; note = 2'-O-methyladenosine-3'-phosphate
  modified_base 20: mod_base = OTHER; note = 2'-O-methyluridine-3'-phosphate
  modified_base 21: mod_base = OTHER; note = 2'-O-methyladenosine
attggaagtgttcaagaaata

SEQ ID NO: 1049 - RNA, 21 nt, synthetic construct
  source 1..21: mol_type = other RNA
  modified_base 1: mod_base = OTHER; note = 2'-O-methyluridine-3'-phosphorothioate
  modified_base 2: mod_base = OTHER; note = 2'-O-methylguanosine-3'-phosphorothioate
  modified_base 3: mod_base = OTHER; note = 2'-O-methylguanosine-3'-phosphate
  modified_base 4: mod_base = OTHER; note = 2'-O-methyladenosine-3'-phosphate
  modified_base 5: mod_base = OTHER; note = 2'-O-methyladenosine-3'-phosphate
  modified_base 6: mod_base = OTHER; note = 2'-O-methylguanosine-3'-phosphate
  modified_base 7: mod_base = OTHER; note = 2'-fluorouridine-3'-phosphate
  modified_base 8: mod_base = OTHER; note = 2'-O-methylguanosine-3'-phosphate
  modified_base 9: mod_base = OTHER; note = 2'-fluorouridine-3'-phosphate
  modified_base 10: mod_base = OTHER; note = 2'-fluorouridine-3'-phosphate
  modified_base 11: mod_base = OTHER; note = 2'-fluorocytidine-3'-phosphate
  modified_base 12: mod_base = OTHER; note = 2'-O-methyladenosine-3'-phosphate
  modified_base 13: mod_base = OTHER; note = 2'-O-methyladenosine-3'-phosphate
  modified_base 14: mod_base = OTHER; note = 2'-O-methylguanosine-3'-phosphate
  modified_base 15: mod_base = OTHER; note = 2'-O-methyladenosine-3'-phosphate
  modified_base 16: mod_base = OTHER; note = 2'-O-methyladenosine-3'-phosphate
  modified_base 17: mod_base = OTHER; note = 2'-O-methyladenosine-3'-phosphate
  modified_base 18: mod_base = OTHER; note = 2'-O-methyluridine-3'-phosphate
  modified_base 19: mod_base = OTHER; note = 2'-O-methyladenosine-3'-phosphate
  modified_base 20: mod_base = OTHER; note = 2'-O-methyladenosine-3'-phosphate
  modified_base 21: mod_base = OTHER; note = 2'-O-methyladenosine
tggaagtgttcaagaaataaa

SEQ ID NO: 1050 - RNA, 21 nt, synthetic construct
  source 1..21: mol_type = other RNA
  modified_base 1: mod_base = OTHER; note = 2'-O-methyluridine-3'-phosphorothioate
  modified_base 2: mod_base = OTHER; note = 2'-O-methylcytidine-3'-phosphorothioate
  modified_base 3: mod_base = OTHER; note = 2'-O-methyladenosine-3'-phosphate
  modified_base 4: mod_base = OTHER; note = 2'-O-methyladenosine-3'-phosphate
  modified_base 5: mod_base = OTHER; note = 2'-O-methylcytidine-3'-phosphate
  modified_base 6: mod_base = OTHER; note = 2'-O-methyluridine-3'-phosphate
  modified_base 7: mod_base = OTHER; note = 2'-fluorouridine-3'-phosphate
  modified_base 8: mod_base = OTHER; note = 2'-O-methylguanosine-3'-phosphate
  modified_base 9: mod_base = OTHER; note = 2'-fluorouridine-3'-phosphate
  modified_base 10: mod_base = OTHER; note = 2'-fluoroguanosine-3'-phosphate
  modified_base 11: mod_base = OTHER; note = 2'-fluorouridine-3'-phosphate
  modified_base 12: mod_base = OTHER; note = 2'-O-methyladenosine-3'-phosphate
  modified_base 13: mod_base = OTHER; note = 2'-O-methylcytidine-3'-phosphate
  modified_base 14: mod_base = OTHER; note = 2'-O-methyluridine-3'-phosphate
  modified_base 15: mod_base = OTHER; note = 2'-O-methylguanosine-3'-phosphate
  modified_base 16: mod_base = OTHER; note = 2'-O-methyladenosine-3'-phosphate
  modified_base 17: mod_base = OTHER; note = 2'-O-methyluridine-3'-phosphate
  modified_base 18: mod_base = OTHER; note = 2'-O-methyladenosine-3'-phosphate
  modified_base 19: mod_base = OTHER; note = 2'-O-methyladenosine-3'-phosphate
  modified_base 20: mod_base = OTHER; note = 2'-O-methyladenosine-3'-phosphate
  modified_base 21: mod_base = OTHER; note = 2'-O-methyladenosine
tcaacttgtgtactgataaaa

SEQ ID NO: 1051 - RNA, 21 nt, synthetic construct
  source 1..21: mol_type = other RNA
  modified_base 1: mod_base = OTHER; note = 2'-O-methylguanosine-3'-phosphorothioate
  modified_base 2: mod_base = OTHER; note = 2'-O-methyluridine-3'-phosphorothioate
  modified_base 3: mod_base = OTHER; note = 2'-O-methylcytidine-3'-phosphate
  modified_base 4: mod_base = OTHER; note = 2'-O-methyladenosine-3'-phosphate
  modified_base 5: mod_base = OTHER; note = 2'-O-methylguanosine-3'-phosphate
  modified_base 6: mod_base = OTHER; note = 2'-O-methylcytidine-3'-phosphate
  modified_base 7: mod_base = OTHER; note = 2'-fluoroadenosine-3'-phosphate
  modified_base 8: mod_base = OTHER; note = 2'-O-methylguanosine-3'-phosphate
  modified_base 9: mod_base = OTHER; note = 2'-fluoroadenosine-3'-phosphate
  modified_base 10: mod_base = OTHER; note = 2'-fluoroguanosine-3'-phosphate
  modified_base 11: mod_base = OTHER; note = 2'-fluorouridine-3'-phosphate
  modified_base 12: mod_base = OTHER; note = 2'-O-methyluridine-3'-phosphate
  modified_base 13: mod_base = OTHER; note = 2'-O-methyladenosine-3'-phosphate
  modified_base 14: mod_base = OTHER; note = 2'-O-methyluridine-3'-phosphate
  modified_base 15: mod_base = OTHER; note = 2'-O-methyluridine-3'-phosphate
  modified_base 16: mod_base = OTHER; note = 2'-O-methylguanosine-3'-phosphate
  modified_base 17: mod_base = OTHER; note = 2'-O-methyladenosine-3'-phosphate
  modified_base 18: mod_base = OTHER; note = 2'-O-methyladenosine-3'-phosphate
  modified_base 19: mod_base = OTHER; note = 2'-O-methyluridine-3'-phosphate
  modified_base 20: mod_base = OTHER; note = 2'-O-methylcytidine-3'-phosphate
  modified_base 21: mod_base = OTHER; note = 2'-O-methyluridine
gtcagcagagttattgaatct

SEQ ID NO: 1052 - RNA, 21 nt, synthetic construct
  source 1..21: mol_type = other RNA
  modified_base 1: mod_base = OTHER; note = 2'-O-methyladenosine-3'-phosphorothioate
  modified_base 2: mod_base = OTHER; note = 2'-O-methyluridine-3'-phosphorothioate
  modified_base 3: mod_base = OTHER; note = 2'-O-methyluridine-3'-phosphate
  modified_base 4: mod_base = OTHER; note = 2'-O-methyluridine-3'-phosphate
  modified_base 5: mod_base = OTHER; note = 2'-O-methyluridine-3'-phosphate
  modified_base 6: mod_base = OTHER; note = 2'-O-methyluridine-3'-phosphate
  modified_base 7: mod_base = OTHER; note = 2'-fluorouridine-3'-phosphate
  modified_base 8: mod_base = OTHER; note = 2'-O-methyluridine-3'-phosphate
  modified_base 9: mod_base = OTHER; note = 2'-fluorouridine-3'-phosphate
  modified_base 10: mod_base = OTHER; note = 2'-fluoroadenosine-3'-phosphate
  modified_base 11: mod_base = OTHER; note = 2'-fluoroadenosine-3'-phosphate
  modified_base 12: mod_base = OTHER; note = 2'-O-methyluridine-3'-phosphate
  modified_base 13: mod_base = OTHER; note = 2'-O-methylguanosine-3'-phosphate
  modified_base 14: mod_base = OTHER; note = 2'-O-methyluridine-3'-phosphate
  modified_base 15: mod_base = OTHER; note = 2'-O-methyladenosine-3'-phosphate
  modified_base 16: mod_base = OTHER; note = 2'-O-methylcytidine-3'-phosphate
  modified_base 17: mod_base = OTHER; note = 2'-O-methyladenosine-3'-phosphate
  modified_base 18: mod_base = OTHER; note = 2'-O-methyladenosine-3'-phosphate
  modified_base 19: mod_base = OTHER; note = 2'-O-methylguanosine-3'-phosphate
  modified_base 20: mod_base = OTHER; note = 2'-O-methyluridine-3'-phosphate
  modified_base 21: mod_base = OTHER; note = 2'-O-methyluridine
attttttttaatgtacaagtt

SEQ ID NO: 1053 - RNA, 23 nt, synthetic construct
  source 1..23: mol_type = other RNA
  modified_base 1: mod_base = OTHER; note = 2'-O-methyluridine-3'-phosphorothioate
  modified_base 2: mod_base = OTHER; note = 2'-fluorocytidine-3'-phosphorothioate
  modified_base 3: mod_base = OTHER; note = 2'-O-methylguanosine-3'-phosphate
  modified_base 4: mod_base = OTHER; note = 2'-O-methyladenosine-3'-phosphate
  modified_base 5: mod_base = OTHER; note = 2'-O-methyladenosine-3'-phosphate
  modified_base 6: mod_base = OTHER; note = 2'-fluoroadenosine-3'-phosphate
  modified_base 7: mod_base = OTHER; note = 2'-O-methyladenosine-3'-phosphate
  modified_base 8: mod_base = OTHER; note = 2'-O-methyladenosine-3'-phosphate
  modified_base 9: mod_base = OTHER; note = 2'-O-methylguanosine-3'-phosphate
  modified_base 10: mod_base = OTHER; note = 2'-O-methyluridine-3'-phosphate
  modified_base 11: mod_base = OTHER; note = 2'-O-methylcytidine-3'-phosphate
  modified_base 12: mod_base = OTHER; note = 2'-O-methyluridine-3'-phosphate
  modified_base 13: mod_base = OTHER; note = 2'-O-methyluridine-3'-phosphate
  modified_base 14: mod_base = OTHER; note = 2'-fluoroguanosine-3'-phosphate
  modified_base 15: mod_base = OTHER; note = 2'-O-methyladenosine-3'-phosphate
  modified_base 16: mod_base = OTHER; note = 2'-fluorocytidine-3'-phosphate
  modified_base 17: mod_base = OTHER; note = 2'-O-methyladenosine-3'-phosphate
  modified_base 18: mod_base = OTHER; note = 2'-O-methyladenosine-3'-phosphate
  modified_base 19: mod_base = OTHER; note = 2'-O-methylcytidine-3'-phosphate
  modified_base 20: mod_base = OTHER; note = 2'-O-methyladenosine-3'-phosphate
  modified_base 21: mod_base = OTHER; note = 2'-O-methyluridine-3'-phosphorothioate
  modified_base 22: mod_base = OTHER; note = 2'-O-methyluridine-3'-phosphorothioate
  modified_base 23: mod_base = OTHER; note = 2'-O-methylguanosine
tcgaaaaagtcttgacaacattg

SEQ ID NO: 1054 - RNA, 23 nt, synthetic construct
  source 1..23: mol_type = other RNA
  modified_base 1: mod_base = OTHER; note = 2'-O-methyluridine-3'-phosphorothioate
  modified_base 2: mod_base = OTHER; note = 2'-fluorouridine-3'-phosphorothioate
  modified_base 3: mod_base = OTHER; note = 2'-O-methylcytidine-3'-phosphate
  modified_base 4: mod_base = OTHER; note = 2'-O-methylguanosine-3'-phosphate
  modified_base 5: mod_base = OTHER; note = 2'-O-methyladenosine-3'-phosphate
  modified_base 6: mod_base = OTHER; note = 2'-fluoroadenosine-3'-phosphate
  modified_base 7: mod_base = OTHER; note = 2'-O-methyladenosine-3'-phosphate
  modified_base 8: mod_base = OTHER; note = 2'-O-methyladenosine-3'-phosphate
  modified_base 9: mod_base = OTHER; note = 2'-O-methyladenosine-3'-phosphate
  modified_base 10: mod_base = OTHER; note = 2'-O-methylguanosine-3'-phosphate
  modified_base 11: mod_base = OTHER; note = 2'-O-methyluridine-3'-phosphate
  modified_base 12: mod_base = OTHER; note = 2'-O-methylcytidine-3'-phosphate
  modified_base 13: mod_base = OTHER; note = 2'-O-methyluridine-3'-phosphate
  modified_base 14: mod_base = OTHER; note = 2'-fluorouridine-3'-phosphate
  modified_base 15: mod_base = OTHER; note = 2'-O-methylguanosine-3'-phosphate
  modified_base 16: mod_base = OTHER; note = 2'-fluoroadenosine-3'-phosphate
  modified_base 17: mod_base = OTHER; note = 2'-O-methylcytidine-3'-phosphate
  modified_base 18: mod_base = OTHER; note = 2'-O-methyladenosine-3'-phosphate
  modified_base 19: mod_base = OTHER; note = 2'-O-methyladenosine-3'-phosphate
  modified_base 20: mod_base = OTHER; note = 2'-O-methylcytidine-3'-phosphate
  modified_base 21: mod_base = OTHER; note = 2'-O-methyladenosine-3'-phosphorothioate
  modified_base 22: mod_base = OTHER; note = 2'-O-methyluridine-3'-phosphorothioate
  modified_base 23: mod_base = OTHER; note = 2'-O-methyluridine
ttcgaaaaagtcttgacaacatt

SEQ ID NO: 1055 - RNA, 23 nt, synthetic construct
  source 1..23: mol_type = other RNA
  modified_base 1: mod_base = OTHER; note = 2'-O-methyladenosine-3'-phosphorothioate
  modified_base 2: mod_base = OTHER; note = 2'-fluorouridine-3'-phosphorothioate
  modified_base 3: mod_base = OTHER; note = 2'-O-methyluridine-3'-phosphate
  modified_base 4: mod_base = OTHER; note = 2'-O-methylcytidine-3'-phosphate
  modified_base 5: mod_base = OTHER; note = 2'-O-methylguanosine-3'-phosphate
  modified_base 6: mod_base = OTHER; note = 2'-fluoroadenosine-3'-phosphate
  modified_base 7: mod_base = OTHER; note = 2'-O-methyladenosine-3'-phosphate
  modified_base 8: mod_base = OTHER; note = 2'-O-methyladenosine-3'-phosphate
  modified_base 9: mod_base = OTHER; note = 2'-O-methyladenosine-3'-phosphate
  modified_base 10: mod_base = OTHER; note = 2'-O-methyladenosine-3'-phosphate
  modified_base 11: mod_base = OTHER; note = 2'-O-methylguanosine-3'-phosphate
  modified_base 12: mod_base = OTHER; note = 2'-O-methyluridine-3'-phosphate
  modified_base 13: mod_base = OTHER; note = 2'-O-methylcytidine-3'-phosphate
  modified_base 14: mod_base = OTHER; note = 2'-fluorouridine-3'-phosphate
  modified_base 15: mod_base = OTHER; note = 2'-O-methyluridine-3'-phosphate
  modified_base 16: mod_base = OTHER; note = 2'-fluoroguanosine-3'-phosphate
  modified_base 17: mod_base = OTHER; note = 2'-O-methyladenosine-3'-phosphate
  modified_base 18: mod_base = OTHER; note = 2'-O-methylcytidine-3'-phosphate
  modified_base 19: mod_base = OTHER; note = 2'-O-methyladenosine-3'-phosphate
  modified_base 20: mod_base = OTHER; note = 2'-O-methyladenosine-3'-phosphate
  modified_base 21: mod_base = OTHER; note = 2'-O-methylcytidine-3'-phosphorothioate
  modified_base 22: mod_base = OTHER; note = 2'-O-methyladenosine-3'-phosphorothioate
  modified_base 23: mod_base = OTHER; note = 2'-O-methyluridine
attcgaaaaagtcttgacaacat

SEQ ID NO: 1056 - RNA, 23 nt, synthetic construct
  source 1..23: mol_type = other RNA
  modified_base 1: mod_base = OTHER; note = 2'-O-methyluridine-3'-phosphorothioate
  modified_base 2: mod_base = OTHER; note = 2'-fluoroguanosine-3'-phosphorothioate
  modified_base 3: mod_base = OTHER; note = 2'-O-methylcytidine-3'-phosphate
  modified_base 4: mod_base = OTHER; note = 2'-O-methyladenosine-3'-phosphate
  modified_base 5: mod_base = OTHER; note = 2'-O-methyluridine-3'-phosphate
  modified_base 6: mod_base = OTHER; note = 2'-fluorouridine-3'-phosphate
  modified_base 7: mod_base = OTHER; note = 2'-O-methylcytidine-3'-phosphate
  modified_base 8: mod_base = OTHER; note = 2'-O-methylguanosine-3'-phosphate
  modified_base 9: mod_base = OTHER; note = 2'-O-methyladenosine-3'-phosphate
  modified_base 10: mod_base = OTHER; note = 2'-O-methyladenosine-3'-phosphate
  modified_base 11: mod_base = OTHER; note = 2'-O-methyladenosine-3'-phosphate
  modified_base 12: mod_base = OTHER; note = 2'-O-methyladenosine-3'-phosphate
  modified_base 13: mod_base = OTHER; note = 2'-O-methyladenosine-3'-phosphate
  modified_base 14: mod_base = OTHER; note = 2'-fluoroguanosine-3'-phosphate
  modified_base 15: mod_base = OTHER; note = 2'-O-methyluridine-3'-phosphate
  modified_base 16: mod_base = OTHER; note = 2'-fluorocytidine-3'-phosphate
  modified_base 17: mod_base = OTHER; note = 2'-O-methyluridine-3'-phosphate
  modified_base 18: mod_base = OTHER; note = 2'-O-methyluridine-3'-phosphate
  modified_base 19: mod_base = OTHER; note = 2'-O-methylguanosine-3'-phosphate
  modified_base 20: mod_base = OTHER; note = 2'-O-methyladenosine-3'-phosphate
  modified_base 21: mod_base = OTHER; note = 2'-O-methylcytidine-3'-phosphorothioate
  modified_base 22: mod_base = OTHER; note = 2'-O-methyladenosine-3'-phosphorothioate
  modified_base 23: mod_base = OTHER; note = 2'-O-methyladenosine
tgcattcgaaaaagtcttgacaa

SEQ ID NO: 1057 - RNA, 23 nt, synthetic construct
  source 1..23: mol_type = other RNA
  modified_base 1: mod_base = OTHER; note = 2'-O-methyladenosine-3'-phosphorothioate
  modified_base 2: mod_base = OTHER; note = 2'-fluorouridine-3'-phosphorothioate
  modified_base 3: mod_base = OTHER; note = 2'-O-methylguanosine-3'-phosphate
  modified_base 4: mod_base = OTHER; note = 2'-O-methylcytidine-3'-phosphate
  modified_base 5: mod_base = OTHER; note = 2'-O-methyladenosine-3'-phosphate
  modified_base 6: mod_base = OTHER; note = 2'-fluorouridine-3'-phosphate
  modified_base 7: mod_base = OTHER; note = 2'-O-methyluridine-3'-phosphate
  modified_base 8: mod_base = OTHER; note = 2'-O-methylcytidine-3'-phosphate
  modified_base 9: mod_base = OTHER; note = 2'-O-methylguanosine-3'-phosphate
  modified_base 10: mod_base = OTHER; note = 2'-O-methyladenosine-3'-phosphate
  modified_base 11: mod_base = OTHER; note = 2'-O-methyladenosine-3'-phosphate
  modified_base 12: mod_base = OTHER; note = 2'-O-methyladenosine-3'-phosphate
  modified_base 13: mod_base = OTHER; note = 2'-O-methyladenosine-3'-phosphate
  modified_base 14: mod_base = OTHER; note = 2'-fluoroadenosine-3'-phosphate
  modified_base 15: mod_base = OTHER; note = 2'-O-methylguanosine-3'-phosphate
  modified_base 16: mod_base = OTHER; note = 2'-fluorouridine-3'-phosphate
  modified_base 17: mod_base = OTHER; note = 2'-O-methylcytidine-3'-phosphate
  modified_base 18: mod_base = OTHER; note = 2'-O-methyluridine-3'-phosphate
  modified_base 19: mod_base = OTHER; note = 2'-O-methyluridine-3'-phosphate
  modified_base 20: mod_base = OTHER; note = 2'-O-methylguanosine-3'-phosphate
  modified_base 21: mod_base = OTHER; note = 2'-O-methyladenosine-3'-phosphorothioate
  modified_base 22: mod_base = OTHER; note = 2'-O-methylcytidine-3'-phosphorothioate
  modified_base 23: mod_base = OTHER; note = 2'-O-methyladenosine
atgcattcgaaaaagtcttgaca

SEQ ID NO: 1058 - RNA, 23 nt, synthetic construct
  source 1..23: mol_type = other RNA
  modified_base 1: mod_base = OTHER; note = 2'-O-methyluridine-3'-phosphorothioate
  modified_base 2: mod_base = OTHER; note = 2'-fluorocytidine-3'-phosphorothioate
  modified_base 3: mod_base = OTHER; note = 2'-O-methyladenosine-3'-phosphate
  modified_base 4: mod_base = OTHER; note = 2'-O-methyluridine-3'-phosphate
  modified_base 5: mod_base = OTHER; note = 2'-O-methylguanosine-3'-phosphate
  modified_base 6: mod_base = OTHER; note = 2'-fluorocytidine-3'-phosphate
  modified_base 7: mod_base = OTHER; note = 2'-O-methyladenosine-3'-phosphate
  modified_base 8: mod_base = OTHER; note = 2'-O-methyluridine-3'-phosphate
  modified_base 9: mod_base = OTHER; note = 2'-O-methyluridine-3'-phosphate
  modified_base 10: mod_base = OTHER; note = 2'-O-methylcytidine-3'-phosphate
  modified_base 11: mod_base = OTHER; note = 2'-O-methylguanosine-3'-phosphate
  modified_base 12: mod_base = OTHER; note = 2'-O-methyladenosine-3'-phosphate
  modified_base 13: mod_base = OTHER; note = 2'-O-methyladenosine-3'-phosphate
  modified_base 14: mod_base = OTHER; note = 2'-fluoroadenosine-3'-phosphate
  modified_base 15: mod_base = OTHER; note = 2'-O-methyladenosine-3'-phosphate
  modified_base 16: mod_base = OTHER; note = 2'-fluoroadenosine-3'-phosphate
  modified_base 17: mod_base = OTHER; note = 2'-O-methylguanosine-3'-phosphate
  modified_base 18: mod_base = OTHER; note = 2'-O-methyluridine-3'-phosphate
  modified_base 19: mod_base = OTHER; note = 2'-O-methylcytidine-3'-phosphate
  modified_base 20: mod_base = OTHER; note = 2'-O-methyluridine-3'-phosphate
  modified_base 21: mod_base = OTHER; note = 2'-O-methyluridine-3'-phosphorothioate
  modified_base 22: mod_base = OTHER; note = 2'-O-methylguanosine-3'-phosphorothioate
  modified_base 23: mod_base = OTHER; note = 2'-O-methyladenosine
tcatgcattcgaaaaagtcttga

SEQ ID NO: 1059 - RNA, 23 nt, synthetic construct
  source 1..23: mol_type = other RNA
  modified_base 1: mod_base = OTHER; note = 2'-O-methyluridine-3'-phosphorothioate
  modified_base 2: mod_base = OTHER; note = 2'-fluoroadenosine-3'-phosphorothioate
  modified_base 3: mod_base = OTHER; note = 2'-O-methylcytidine-3'-phosphate
  modified_base 4: mod_base = OTHER; note = 2'-O-methyluridine-3'-phosphate
  modified_base 5: mod_base = OTHER; note = 2'-O-methyluridine-3'-phosphate
  modified_base 6: mod_base = OTHER; note = 2'-fluorocytidine-3'-phosphate
  modified_base 7: mod_base = OTHER; note = 2'-O-methylcytidine-3'-phosphate
  modified_base 8: mod_base = OTHER; note = 2'-O-methylcytidine-3'-phosphate
  modified_base 9: mod_base = OTHER; note = 2'-O-methyladenosine-3'-phosphate
  modified_base 10: mod_base = OTHER; note = 2'-O-methylguanosine-3'-phosphate
  modified_base 11: mod_base = OTHER; note = 2'-O-methylguanosine-3'-phosphate
  modified_base 12: mod_base = OTHER; note = 2'-O-methylguanosine-3'-phosphate
  modified_base 13: mod_base = OTHER; note = 2'-O-methyladenosine-3'-phosphate
  modified_base 14: mod_base = OTHER; note = 2'-fluorouridine-3'-phosphate
  modified_base 15: mod_base = OTHER; note = 2'-O-methylguanosine-3'-phosphate
  modified_base 16: mod_base = OTHER; note = 2'-fluoroguanosine-3'-phosphate
  modified_base 17: mod_base = OTHER; note = 2'-O-methylguanosine-3'-phosphate
  modified_base 18: mod_base = OTHER; note = 2'-O-methyladenosine-3'-phosphate
  modified_base 19: mod_base = OTHER; note = 2'-O-methylguanosine-3'-phosphate
  modified_base 20: mod_base = OTHER; note = 2'-O-methylguanosine-3'-phosphate
  modified_base 21: mod_base = OTHER; note = 2'-O-methylcytidine-3'-phosphorothioate
  modified_base 22: mod_base = OTHER; note = 2'-O-methylcytidine-3'-phosphorothioate
  modified_base 23: mod_base = OTHER; note = 2'-O-methyladenosine
tacttcccagggatgggaggcca

SEQ ID NO: 1060 - RNA, 23 nt, synthetic construct
  source 1..23: mol_type = other RNA
  modified_base 1: mod_base = OTHER; note = 2'-O-methyluridine-3'-phosphorothioate
  modified_base 2: mod_base = OTHER; note = 2'-fluorouridine-3'-phosphorothioate
  modified_base 3: mod_base = OTHER; note = 2'-O-methylcytidine-3'-phosphate
  modified_base 4: mod_base = OTHER; note = 2'-O-methylcytidine-3'-phosphate
  modified_base 5: mod_base = OTHER; note = 2'-O-methyladenosine-3'-phosphate
  modified_base 6: mod_base = OTHER; note = 2'-fluoroadenosine-3'-phosphate
  modified_base 7: mod_base = OTHER; note = 2'-O-methylcytidine-3'-phosphate
  modified_base 8: mod_base = OTHER; note = 2'-O-methylcytidine-3'-phosphate
  modified_base 9: mod_base = OTHER; note = 2'-O-methyladenosine-3'-phosphate
  modified_base 10: mod_base = OTHER; note = 2'-O-methylcytidine-3'-phosphate
  modified_base 11: mod_base = OTHER; note = 2'-O-methyladenosine-3'-phosphate
  modified_base 12: mod_base = OTHER; note = 2'-O-methylguanosine-3'-phosphate
  modified_base 13: mod_base = OTHER; note = 2'-O-methyladenosine-3'-phosphate
  modified_base 14: mod_base = OTHER; note = 2'-fluorouridine-3'-phosphate
  modified_base 15: mod_base = OTHER; note = 2'-O-methylcytidine-3'-phosphate
  modified_base 16: mod_base = OTHER; note = 2'-fluorouridine-3'-phosphate
  modified_base 17: mod_base = OTHER; note = 2'-O-methyluridine-3'-phosphate
  modified_base 18: mod_base = OTHER; note = 2'-O-methyladenosine-3'-phosphate
  modified_base 19: mod_base = OTHER; note = 2'-O-methyluridine-3'-phosphate
  modified_base 20: mod_base = OTHER; note = 2'-O-methyluridine-3'-phosphate
  modified_base 21: mod_base = OTHER; note = 2'-O-methylguanosine-3'-phosphorothioate
  modified_base 22: mod_base = OTHER; note = 2'-O-methyluridine-3'-phosphorothioate
  modified_base 23: mod_base = OTHER; note = 2'-O-methyluridine
ttccaaccacagatcttattgtt

SEQ ID NO: 1061 - RNA, 23 nt, synthetic construct
  source 1..23: mol_type = other RNA
  modified_base 1: mod_base = OTHER; note = 2'-O-methyladenosine-3'-phosphorothioate
  modified_base 2: mod_base = OTHER; note = 2'-fluoroadenosine-3'-phosphorothioate
  modified_base 3: mod_base = OTHER; note = 2'-O-methyladenosine-3'-phosphate
  modified_base 4: mod_base = OTHER; note = 2'-O-methyladenosine-3'-phosphate
  modified_base 5: mod_base = OTHER; note = 2'-O-methylcytidine-3'-phosphate
  modified_base 6: mod_base = OTHER; note = 2'-fluoroadenosine-3'-phosphate
  modified_base 7: mod_base = OTHER; note = 2'-O-methyluridine-3'-phosphate
  modified_base 8: mod_base = OTHER; note = 2'-O-methylcytidine-3'-phosphate
  modified_base 9: mod_base = OTHER; note = 2'-O-methylcytidine-3'-phosphate
  modified_base 10: mod_base = OTHER; note = 2'-O-methyluridine-3'-phosphate
  modified_base 11: mod_base = OTHER; note = 2'-O-methylcytidine-3'-phosphate
  modified_base 12: mod_base = OTHER; note = 2'-O-methyluridine-3'-phosphate
  modified_base 13: mod_base = OTHER; note = 2'-O-methyluridine-3'-phosphate
  modified_base 14: mod_base = OTHER; note = 2'-fluorocytidine-3'-phosphate
  modified_base 15: mod_base = OTHER; note = 2'-O-methyladenosine-3'-phosphate
  modified_base 16: mod_base = OTHER; note = 2'-fluoroadenosine-3'-phosphate
  modified_base 17: mod_base = OTHER; note = 2'-O-methyladenosine-3'-phosphate
  modified_base 18: mod_base = OTHER; note = 2'-O-methylcytidine-3'-phosphate
  modified_base 19: mod_base = OTHER; note = 2'-O-methyluridine-3'-phosphate
  modified_base 20: mod_base = OTHER; note = 2'-O-methyluridine-3'-phosphate
  modified_base 21: mod_base = OTHER; note = 2'-O-methyluridine-3'-phosphorothioate
  modified_base 22: mod_base = OTHER; note = 2'-O-methylguanosine-3'-phosphorothioate
  modified_base 23: mod_base = OTHER; note = 2'-O-methylguanosine
aaaacatcctcttcaaactttgg

SEQ ID NO: 1062 - RNA, 23 nt, synthetic construct
  source 1..23: mol_type = other RNA
  modified_base 1: mod_base = OTHER; note = 2'-O-methyladenosine-3'-phosphorothioate
  modified_base 2: mod_base = OTHER; note = 2'-fluorouridine-3'-phosphorothioate
  modified_base 3: mod_base = OTHER; note = 2'-O-methyluridine-3'-phosphate
  modified_base 4: mod_base = OTHER; note = 2'-O-methyladenosine-3'-phosphate
  modified_base 5: mod_base = OTHER; note = 2'-O-methyluridine-3'-phosphate
  modified_base 6: mod_base = OTHER; note = 2'-fluoroadenosine-3'-phosphate
  modified_base 7: mod_base = OTHER; note = 2'-O-methyladenosine-3'-phosphate
  modified_base 8: mod_base = OTHER; note = 2'-O-methyluridine-3'-phosphate
  modified_base 9: mod_base = OTHER; note = 2'-O-methylguanosine-3'-phosphate
  modified_base 10: mod_base = OTHER; note = 2'-O-methyluridine-3'-phosphate
  modified_base 11: mod_base = OTHER; note = 2'-O-methylcytidine-3'-phosphate
  modified_base 12: mod_base = OTHER; note = 2'-O-methyladenosine-3'-phosphate
  modified_base 13: mod_base = OTHER; note = 2'-O-methylcytidine-3'-phosphate
  modified_base 14: mod_base = OTHER; note = 2'-fluorouridine-3'-phosphate
  modified_base 15: mod_base = OTHER; note = 2'-O-methylguanosine-3'-phosphate
  modified_base 16: mod_base = OTHER; note = 2'-fluorocytidine-3'-phosphate
  modified_base 17: mod_base = OTHER; note = 2'-O-methyluridine-3'-phosphate
  modified_base 18: mod_base = OTHER; note = 2'-O-methylcytidine-3'-phosphate
  modified_base 19: mod_base = OTHER; note = 2'-O-methyladenosine-3'-phosphate
  modified_base 20: mod_base = OTHER; note = 2'-O-methyladenosine-3'-phosphate
  modified_base 21: mod_base = OTHER; note = 2'-O-methyladenosine-3'-phosphorothioate
  modified_base 22: mod_base = OTHER; note = 2'-O-methyladenosine-3'-phosphorothioate
  modified_base 23: mod_base = OTHER; note = 2'-O-methylcytidine
attataatgtcactgctcaaaac

SEQ ID NO: 1063 - RNA, 23 nt, synthetic construct
  source 1..23: mol_type = other RNA
  modified_base 1: mod_base = OTHER; note = 2'-O-methyluridine-3'-phosphorothioate
  modified_base 2: mod_base = OTHER; note = 2'-fluoroadenosine-3'-phosphorothioate
  modified_base 3: mod_base = OTHER; note = 2'-O-methyluridine-3'-phosphate
  modified_base 4: mod_base = OTHER; note = 2'-O-methylcytidine-3'-phosphate
  modified_base 5: mod_base = OTHER; note = 2'-O-methylguanosine-3'-phosphate
  modified_base 6: mod_base = OTHER; note = 2'-fluorouridine-3'-phosphate
  modified_base 7: mod_base = OTHER; note = 2'-O-methylguanosine-3'-phosphate
  modified_base 8: mod_base = OTHER; note = 2'-O-methyluridine-3'-phosphate
  modified_base 9: mod_base = OTHER; note = 2'-O-methyluridine-3'-phosphate
  modified_base 10: mod_base = OTHER; note = 2'-O-methyladenosine-3'-phosphate
  modified_base 11: mod_base = OTHER; note = 2'-O-methyluridine-3'-phosphate
  modified_base 12: mod_base = OTHER; note = 2'-O-methyluridine-3'-phosphate
  modified_base 13: mod_base = OTHER; note = 2'-O-methylguanosine-3'-phosphate
  modified_base 14: mod_base = OTHER; note = 2'-fluorouridine-3'-phosphate
  modified_base 15: mod_base = OTHER; note = 2'-O-methylcytidine-3'-phosphate
  modified_base 16: mod_base = OTHER; note = 2'-fluoroadenosine-3'-phosphate
  modified_base 17: mod_base = OTHER; note = 2'-O-methylguanosine-3'-phosphate
  modified_base 18: mod_base = OTHER; note = 2'-O-methyladenosine-3'-phosphate
  modified_base 19: mod_base = OTHER; note = 2'-O-methyladenosine-3'-phosphate
  modified_base 20: mod_base = OTHER; note = 2'-O-methyluridine-3'-phosphate
  modified_base 21: mod_base = OTHER; note = 2'-O-methyluridine-3'-phosphorothioate
  modified_base 22: mod_base = OTHER; note = 2'-O-methyladenosine-3'-phosphorothioate
  modified_base 23: mod_base = OTHER; note = 2'-O-methyluridine
tatcgtgttattgtcagaattat

SEQ ID NO: 1064 - RNA, 23 nt, synthetic construct
  source 1..23: mol_type = other RNA
  modified_base 1: mod_base = OTHER; note = 2'-O-methyluridine-3'-phosphorothioate
  modified_base 2: mod_base = OTHER; note = 2'-fluoroguanosine-3'-phosphorothioate
  modified_base 3: mod_base = OTHER; note = 2'-O-methylcytidine-3'-phosphate
  modified_base 4: mod_base = OTHER; note = 2'-O-methyladenosine-3'-phosphate
  modified_base 5: mod_base = OTHER; note = 2'-O-methyluridine-3'-phosphate
  modified_base 6: mod_base = OTHER; note = 2'-fluorocytidine-3'-phosphate
  modified_base 7: mod_base = OTHER; note = 2'-O-methylguanosine-3'-phosphate
  modified_base 8: mod_base = OTHER; note = 2'-O-methyluridine-3'-phosphate
  modified_base 9: mod_base = OTHER; note = 2'-O-methylguanosine-3'-phosphate
  modified_base 10: mod_base = OTHER; note = 2'-O-methyluridine-3'-phosphate
  modified_base 11: mod_base = OTHER; note = 2'-O-methyluridine-3'-phosphate
  modified_base 12: mod_base = OTHER; note = 2'-O-methyladenosine-3'-phosphate
  modified_base 13: mod_base = OTHER; note = 2'-O-methyluridine-3'-phosphate
  modified_base 14: mod_base = OTHER; note = 2'-fluorouridine-3'-phosphate
  modified_base 15: mod_base = OTHER; note = 2'-O-methylguanosine-3'-phosphate
  modified_base 16: mod_base = OTHER; note = 2'-fluorouridine-3'-phosphate
  modified_base 17: mod_base = OTHER; note = 2'-O-methylcytidine-3'-phosphate
  modified_base 18: mod_base = OTHER; note = 2'-O-methyladenosine-3'-phosphate
  modified_base 19: mod_base = OTHER; note = 2'-O-methylguanosine-3'-phosphate
  modified_base 20: mod_base = OTHER; note = 2'-O-methyladenosine-3'-phosphate
  modified_base 21: mod_base = OTHER; note = 2'-O-methyladenosine-3'-phosphorothioate
  modified_base 22: mod_base = OTHER; note = 2'-O-methyluridine-3'-phosphorothioate
  modified_base 23: mod_base = OTHER; note = 2'-O-methyluridine
tgcatcgtgttattgtcagaatt

SEQ ID NO: 1065 - RNA, 23 nt, synthetic construct
  source 1..23: mol_type = other RNA
  modified_base 1: mod_base = OTHER; note = 2'-O-methyladenosine-3'-phosphorothioate
  modified_base 2: mod_base = OTHER; note = 2'-fluorouridine-3'-phosphorothioate
  modified_base 3: mod_base = OTHER; note = 2'-O-methylguanosine-3'-phosphate
  modified_base 4: mod_base = OTHER; note = 2'-O-methylcytidine-3'-phosphate
  modified_base 5: mod_base = OTHER; note = 2'-O-methyladenosine-3'-phosphate
  modified_base 6: mod_base = OTHER; note = 2'-fluorouridine-3'-phosphate
  modified_base 7: mod_base = OTHER; note = 2'-O-methylcytidine-3'-phosphate
  modified_base 8: mod_base = OTHER; note = 2'-O-methylguanosine-3'-phosphate
  modified_base 9: mod_base = OTHER; note = 2'-O-methyluridine-3'-phosphate
  modified_base 10: mod_base = OTHER; note = 2'-O-methylguanosine-3'-phosphate
  modified_base 11: mod_base = OTHER; note = 2'-O-methyluridine-3'-phosphate
  modified_base 12: mod_base = OTHER; note = 2'-O-methyluridine-3'-phosphate
  modified_base 13: mod_base = OTHER; note = 2'-O-methyladenosine-3'-phosphate
  modified_base 14: mod_base = OTHER; note = 2'-fluorouridine-3'-phosphate
  modified_base 15: mod_base = OTHER; note = 2'-O-methyluridine-3'-phosphate
  modified_base 16: mod_base = OTHER; note = 2'-fluoroguanosine-3'-phosphate
  modified_base 17: mod_base = OTHER; note = 2'-O-methyluridine-3'-phosphate
  modified_base 18: mod_base = OTHER; note = 2'-O-methylcytidine-3'-phosphate
  modified_base 19: mod_base = OTHER; note = 2'-O-methyladenosine-3'-phosphate
  modified_base 20: mod_base = OTHER; note = 2'-O-methylguanosine-3'-phosphate
  modified_base 21: mod_base = OTHER; note = 2'-O-methyladenosine-3'-phosphorothioate
  modified_base 22: mod_base = OTHER; note = 2'-O-methyladenosine-3'-phosphorothioate
  modified_base 23: mod_base = OTHER; note = 2'-O-methyluridine
atgcatcgtgttattgtcagaat

SEQ ID NO: 1066 - RNA, 23 nt, synthetic construct
  source 1..23: mol_type = other RNA
  modified_base 1: mod_base = OTHER; note = 2'-O-methyluridine-3'-phosphorothioate
  modified_base 2: mod_base = OTHER; note = 2'-fluorouridine-3'-phosphorothioate
  modified_base 3: mod_base = OTHER; note = 2'-O-methyladenosine-3'-phosphate
  modified_base 4: mod_base = OTHER; note = 2'-O-methyluridine-3'-phosphate
  modified_base 5: mod_base = OTHER; note = 2'-O-methylguanosine-3'-phosphate
  modified_base 6: mod_base = OTHER; note = 2'-fluorocytidine-3'-phosphate
  modified_base 7: mod_base = OTHER; note = 2'-O-methyladenosine-3'-phosphate
  modified_base 8: mod_base = OTHER; note = 2'-O-methyluridine-3'-phosphate
  modified_base 9: mod_base = OTHER; note = 2'-O-methylcytidine-3'-phosphate
  modified_base 10: mod_base = OTHER; note = 2'-O-methylguanosine-3'-phosphate
  modified_base 11: mod_base = OTHER; note = 2'-O-methyluridine-3'-phosphate
  modified_base 12: mod_base = OTHER; note = 2'-O-methylguanosine-3'-phosphate
  modified_base 13: mod_base = OTHER; note = 2'-O-methyluridine-3'-phosphate
  modified_base 14: mod_base = OTHER; note = 2'-fluorouridine-3'-phosphate
  modified_base 15: mod_base = OTHER; note = 2'-O-methyladenosine-3'-phosphate
  modified_base 16: mod_base = OTHER; note = 2'-fluorouridine-3'-phosphate
  modified_base 17: mod_base = OTHER; note = 2'-O-methyluridine-3'-phosphate
  modified_base 18: mod_base = OTHER; note = 2'-O-methylguanosine-3'-phosphate
  modified_base 19: mod_base = OTHER; note = 2'-O-methyluridine-3'-phosphate
  modified_base 20: mod_base = OTHER; note = 2'-O-methylcytidine-3'-phosphate
  modified_base 21: mod_base = OTHER; note = 2'-O-methyladenosine-3'-phosphorothioate
  modified_base 22: mod_base = OTHER; note = 2'-O-methylguanosine-3'-phosphorothioate
  modified_base 23: mod_base = OTHER; note = 2'-O-methyladenosine
ttatgcatcgtgttattgtcaga

SEQ ID NO: 1067 - RNA, 23 nt, synthetic construct
  source 1..23: mol_type = other RNA
  modified_base 1: mod_base = OTHER; note = 2'-O-methyluridine-3'-phosphorothioate
  modified_base 2: mod_base = OTHER; note = 2'-fluoroadenosine-3'-phosphorothioate
  modified_base 3: mod_base = OTHER; note = 2'-O-methylcytidine-3'-phosphate
  modified_base 4: mod_base = OTHER; note = 2'-O-methylguanosine-3'-phosphate
  modified_base 5: mod_base = OTHER; note = 2'-O-methyluridine-3'-phosphate
  modified_base 6: mod_base = OTHER; note = 2'-fluoroadenosine-3'-phosphate
  modified_base 7: mod_base = OTHER; note = 2'-O-methyladenosine-3'-phosphate
  modified_base 8: mod_base = OTHER; note = 2'-O-methyladenosine-3'-phosphate
  modified_base 9: mod_base = OTHER; note = 2'-O-methyluridine-3'-phosphate
  modified_base 10: mod_base = OTHER; note = 2'-O-methyluridine-3'-phosphate
  modified_base 11: mod_base = OTHER; note = 2'-O-methylcytidine-3'-phosphate
  modified_base 12: mod_base = OTHER; note = 2'-O-methyluridine-3'-phosphate
  modified_base 13: mod_base = OTHER; note = 2'-O-methylguanosine-3'-phosphate
  modified_base 14: mod_base = OTHER; note = 2'-fluoroguanosine-3'-phosphate
  modified_base 15: mod_base = OTHER; note = 2'-O-methyladenosine-3'-phosphate
  modified_base 16: mod_base = OTHER; note = 2'-fluoroadenosine-3'-phosphate
  modified_base 17: mod_base = OTHER; note = 2'-O-methylcytidine-3'-phosphate
  modified_base 18: mod_base = OTHER; note = 2'-O-methyluridine-3'-phosphate
  modified_base 19: mod_base = OTHER; note = 2'-O-methylguanosine-3'-phosphate
  modified_base 20: mod_base = OTHER; note = 2'-O-methylguanosine-3'-phosphate
  modified_base 21: mod_base = OTHER; note = 2'-O-methyladenosine-3'-phosphorothioate
  modified_base 22: mod_base = OTHER; note = 2'-O-methyladenosine-3'-phosphorothioate
  modified_base 23: mod_base = OTHER; note = 2'-O-methylguanosine
tacgtaaattctggaactggaag

SEQ ID NO: 1068 - RNA, 23 nt, synthetic construct
  source 1..23: mol_type = other RNA
  modified_base 1: mod_base = OTHER; note = 2'-O-methyluridine-3'-phosphorothioate
  modified_base 2: mod_base = OTHER; note = 2'-fluorouridine-3'-phosphorothioate
  modified_base 3: mod_base = OTHER; note = 2'-O-methyluridine-3'-phosphate
  modified_base 4: mod_base = OTHER; note = 2'-O-methylguanosine-3'-phosphate
  modified_base 5: mod_base = OTHER; note = 2'-O-methyladenosine-3'-phosphate
  modified_base 6: mod_base = OTHER; note = 2'-fluorocytidine-3'-phosphate
  modified_base 7: mod_base = OTHER; note = 2'-O-methylguanosine-3'-phosphate
  modified_base 8: mod_base = OTHER; note = 2'-O-methyluridine-3'-phosphate
  modified_base 9: mod_base = OTHER; note = 2'-O-methyladenosine-3'-phosphate
  modified_base 10: mod_base = OTHER; note = 2'-O-methyladenosine-3'-phosphate
  modified_base 11: mod_base = OTHER; note = 2'-O-methyladenosine-3'-phosphate
  modified_base 12: mod_base = OTHER; note = 2'-O-methyluridine-3'-phosphate
  modified_base 13: mod_base = OTHER; note = 2'-O-methyluridine-3'-phosphate
  modified_base 14: mod_base = OTHER; note = 2'-fluorocytidine-3'-phosphate
  modified_base 15: mod_base = OTHER; note = 2'-O-methyluridine-3'-phosphate
  modified_base 16: mod_base = OTHER; note = 2'-fluoroguanosine-3'-phosphate
  modified_base 17: mod_base = OTHER; note = 2'-O-methylguanosine-3'-phosphate
  modified_base 18: mod_base = OTHER; note = 2'-O-methyladenosine-3'-phosphate
  modified_base 19: mod_base = OTHER; note = 2'-O-methyladenosine-3'-phosphate
  modified_base 20: mod_base = OTHER; note = 2'-O-methylcytidine-3'-phosphate
  modified_base 21: mod_base = OTHER; note = 2'-O-methyluridine-3'-phosphorothioate
  modified_base 22: mod_base = OTHER; note = 2'-O-methylguanosine-3'-phosphorothioate
  modified_base 23: mod_base = OTHER; note = 2'-O-methylguanosine
tttgacgtaaattctggaactgg

SEQ ID NO: 1069 - RNA, 23 nt, synthetic construct
  source 1..23: mol_type = other RNA
  modified_base 1: mod_base = OTHER; note = 2'-O-methyladenosine-3'-phosphorothioate
  modified_base 2: mod_base = OTHER; note = 2'-fluoroadenosine-3'-phosphorothioate
  modified_base 3: mod_base = OTHER; note = 2'-O-methylguanosine-3'-phosphate
  modified_base 4: mod_base = OTHER; note = 2'-O-methyluridine-3'-phosphate
  modified_base 5: mod_base = OTHER; note = 2'-O-methyluridine-3'-phosphate
  modified_base 6: mod_base = OTHER; note = 2'-fluoroguanosine-3'-phosphate
  modified_base 7: mod_base = OTHER; note = 2'-O-methyladenosine-3'-phosphate
  modified_base 8: mod_base = OTHER; note = 2'-O-methylcytidine-3'-phosphate
  modified_base 9: mod_base = OTHER; note = 2'-O-methylguanosine-3'-phosphate
  modified_base 10: mod_base = OTHER; note = 2'-O-methyluridine-3'-phosphate
  modified_base 11: mod_base = OTHER; note = 2'-O-methyladenosine-3'-phosphate
  modified_base 12: mod_base = OTHER; note = 2'-O-methyladenosine-3'-phosphate
  modified_base 13: mod_base = OTHER; note = 2'-O-methyladenosine-3'-phosphate
  modified_base 14: mod_base = OTHER; note = 2'-fluorouridine-3'-phosphate
  modified_base 15: mod_base = OTHER; note = 2'-O-methyluridine-3'-phosphate
  modified_base 16: mod_base = OTHER; note = 2'-fluorocytidine-3'-phosphate
  modified_base 17: mod_base = OTHER; note = 2'-O-methyluridine-3'-phosphate
  modified_base 18: mod_base = OTHER; note = 2'-O-methylguanosine-3'-phosphate
  modified_base 19: mod_base = OTHER; note = 2'-O-methylguanosine-3'-phosphate
  modified_base 20: mod_base = OTHER; note = 2'-O-methyladenosine-3'-phosphate
  modified_base 21: mod_base = OTHER; note = 2'-O-methyladenosine-3'-phosphorothioate
  modified_base 22: mod_base = OTHER; note = 2'-O-methylcytidine-3'-phosphorothioate
  modified_base 23: mod_base = OTHER; note = 2'-O-methyluridine
aagttgacgtaaattctggaact

SEQ ID NO: 1070 - RNA, 23 nt, synthetic construct
  source 1..23: mol_type = other RNA
  modified_base 1: mod_base = OTHER; note = 2'-O-methyluridine-3'-phosphorothioate
  modified_base 2: mod_base = OTHER; note = 2'-fluorocytidine-3'-phosphorothioate
  modified_base 3: mod_base = OTHER; note = 2'-O-methyladenosine-3'-phosphate
  modified_base 4: mod_base = OTHER; note = 2'-O-methyladenosine-3'-phosphate
  modified_base 5: mod_base = OTHER; note = 2'-O-methylguanosine-3'-phosphate
  modified_base 6: mod_base = OTHER; note = 2'-fluorouridine-3'-phosphate
  modified_base 7: mod_base = OTHER; note = 2'-O-methyluridine-3'-phosphate
  modified_base 8: mod_base = OTHER; note = 2'-O-methylguanosine-3'-phosphate
  modified_base 9: mod_base = OTHER; note = 2'-O-methyladenosine-3'-phosphate
  modified_base 10: mod_base = OTHER; note = 2'-O-methylcytidine-3'-phosphate
  modified_base 11: mod_base = OTHER; note = 2'-O-methylguanosine-3'-phosphate
  modified_base 12: mod_base = OTHER; note = 2'-O-methyluridine-3'-phosphate
  modified_base 13: mod_base = OTHER; note = 2'-O-methyladenosine-3'-phosphate
  modified_base 14: mod_base = OTHER; note = 2'-fluoroadenosine-3'-phosphate
  modified_base 15: mod_base = OTHER; note = 2'-O-methyladenosine-3'-phosphate
  modified_base 16: mod_base = OTHER; note = 2'-fluorouridine-3'-phosphate
  modified_base 17: mod_base = OTHER; note = 2'-O-methyluridine-3'-phosphate
  modified_base 18: mod_base = OTHER; note = 2'-O-methylcytidine-3'-phosphate
  modified_base 19: mod_base = OTHER; note = 2'-O-methyluridine-3'-phosphate
  modified_base 20: mod_base = OTHER; note = 2'-O-methylguanosine-3'-phosphate
  modified_base 21: mod_base = OTHER; note = 2'-O-methylguanosine-3'-phosphorothioate
  modified_base 22: mod_base = OTHER; note = 2'-O-methyladenosine-3'-phosphorothioate
  modified_base 23: mod_base = OTHER; note = 2'-O-methyladenosine
tcaagttgacgtaaattctggaa

SEQ ID NO: 1071 - RNA, 23 nt, synthetic construct
  source 1..23: mol_type = other RNA
  modified_base 1: mod_base = OTHER; note = 2'-O-methyladenosine-3'-phosphorothioate
  modified_base 2: mod_base = OTHER; note = 2'-fluorouridine-3'-phosphorothioate
  modified_base 3: mod_base = OTHER; note = 2'-O-methylcytidine-3'-phosphate
  modified_base 4: mod_base = OTHER; note = 2'-O-methylcytidine-3'-phosphate
  modified_base 5: mod_base = OTHER; note = 2'-O-methyladenosine-3'-phosphate
  modified_base 6: mod_base = OTHER; note = 2'-fluoroadenosine-3'-phosphate
  modified_base 7: mod_base = OTHER; note = 2'-O-methylguanosine-3'-phosphate
  modified_base 8: mod_base = OTHER; note = 2'-O-methyluridine-3'-phosphate
  modified_base 9: mod_base = OTHER; note = 2'-O-methyluridine-3'-phosphate
  modified_base 10: mod_base = OTHER; note = 2'-O-methylguanosine-3'-phosphate
  modified_base 11: mod_base = OTHER; note = 2'-O-methyladenosine-3'-phosphate
  modified_base 12: mod_base = OTHER; note = 2'-O-methylcytidine-3'-phosphate
  modified_base 13: mod_base = OTHER; note = 2'-O-methylguanosine-3'-phosphate
  modified_base 14: mod_base = OTHER; note = 2'-fluorouridine-3'-phosphate
  modified_base 15: mod_base = OTHER; note = 2'-O-methyladenosine-3'-phosphate
  modified_base 16: mod_base = OTHER; note = 2'-fluoroadenosine-3'-phosphate
  modified_base 17: mod_base = OTHER; note = 2'-O-methyladenosine-3'-phosphate
  modified_base 18: mod_base = OTHER; note = 2'-O-methyluridine-3'-phosphate
  modified_base 19: mod_base = OTHER; note = 2'-O-methyluridine-3'-phosphate
  modified_base 20: mod_base = OTHER; note = 2'-O-methylcytidine-3'-phosphate
  modified_base 21: mod_base = OTHER; note = 2'-O-methyluridine-3'-phosphorothioate
  modified_base 22: mod_base = OTHER; note = 2'-O-methylguanosine-3'-phosphorothioate
  modified_base 23: mod_base = OTHER; note = 2'-O-methylguanosine
atccaagttgacgtaaattctgg

SEQ ID NO: 1072 - RNA, 23 nt, synthetic construct
  source 1..23: mol_type = other RNA
  modified_base 1: mod_base = OTHER; note = 2'-O-methyluridine-3'-phosphorothioate
  modified_base 2: mod_base = OTHER; note = 2'-fluorouridine-3'-phosphorothioate
  modified_base 3: mod_base = OTHER; note = 2'-O-methyluridine-3'-phosphate
  modified_base 4: mod_base = OTHER; note = 2'-O-methylguanosine-3'-phosphate
  modified_base 5: mod_base = OTHER; note = 2'-O-methyladenosine-3'-phosphate
  modified_base 6: mod_base = OTHER; note = 2'-fluorouridine-3'-phosphate
  modified_base 7: mod_base = OTHER; note = 2'-O-methylcytidine-3'-phosphate
  modified_base 8: mod_base = OTHER; note = 2'-O-methylcytidine-3'-phosphate
  modified_base 9: mod_base = OTHER; note = 2'-O-methyladenosine-3'-phosphate
  modified_base 10: mod_base = OTHER; note = 2'-O-methyladenosine-3'-phosphate
  modified_base 11: mod_base = OTHER; note = 2'-O-methylguanosine-3'-phosphate
  modified_base 12: mod_base = OTHER; note = 2'-O-methyluridine-3'-phosphate
  modified_base 13: mod_base = OTHER; note = 2'-O-methyluridine-3'-phosphate
  modified_base 14: mod_base = OTHER; note = 2'-fluoroguanosine-3'-phosphate
  modified_base 15: mod_base = OTHER; note = 2'-O-methyladenosine-3'-phosphate
  modified_base 16: mod_base = OTHER; note = 2'-fluorocytidine-3'-phosphate
  modified_base 17: mod_base = OTHER; note = 2'-O-methylguanosine-3'-phosphate
  modified_base 18: mod_base = OTHER; note = 2'-O-methyluridine-3'-phosphate
  modified_base 19: mod_base = OTHER; note = 2'-O-methyladenosine-3'-phosphate
  modified_base 20: mod_base = OTHER; note = 2'-O-methyladenosine-3'-phosphate
  modified_base 21: mod_base = OTHER; note = 2'-O-methyladenosine-3'-phosphorothioate
  modified_base 22: mod_base = OTHER; note = 2'-O-methyluridine-3'-phosphorothioate
  modified_base 23: mod_base = OTHER; note = 2'-O-methyluridine
tttgatccaagttgacgtaaatt

SEQ ID NO: 1073 - RNA, 23 nt, synthetic construct
  source 1..23: mol_type = other RNA
  modified_base 1: mod_base = OTHER; note = 2'-O-methyluridine-3'-phosphorothioate
  modified_base 2: mod_base = OTHER; note = 2'-fluorouridine-3'-phosphorothioate
  modified_base 3: mod_base = OTHER; note = 2'-O-methyluridine-3'-phosphate
  modified_base 4: mod_base = OTHER; note = 2'-O-methyluridine-3'-phosphate
  modified_base 5: mod_base = OTHER; note = 2'-O-methylguanosine-3'-phosphate
  modified_base 6: mod_base = OTHER; note = 2'-fluoroadenosine-3'-phosphate
  modified_base 7: mod_base = OTHER; note = 2'-O-methyluridine-3'-phosphate
  modified_base 8: mod_base = OTHER; note = 2'-O-methylcytidine-3'-phosphate
  modified_base 9: mod_base = OTHER; note = 2'-O-methylcytidine-3'-phosphate
  modified_base 10: mod_base = OTHER; note = 2'-O-methyladenosine-3'-phosphate
  modified_base 11: mod_base = OTHER; note = 2'-O-methyladenosine-3'-phosphate
  modified_base 12: mod_base = OTHER; note = 2'-O-methylguanosine-3'-phosphate
  modified_base 13: mod_base = OTHER; note = 2'-O-methyluridine-3'-phosphate
  modified_base 14: mod_base = OTHER; note = 2'-fluorouridine-3'-phosphate
  modified_base 15: mod_base = OTHER; note = 2'-O-methylguanosine-3'-phosphate
  modified_base 16: mod_base = OTHER; note = 2'-fluoroadenosine-3'-phosphate
  modified_base 17: mod_base = OTHER; note = 2'-O-methylcytidine-3'-phosphate
  modified_base 18: mod_base = OTHER; note = 2'-O-methylguanosine-3'-phosphate
  modified_base 19: mod_base = OTHER; note = 2'-O-methyluridine-3'-phosphate
  modified_base 20: mod_base = OTHER; note = 2'-O-methyladenosine-3'-phosphate
  modified_base 21: mod_base = OTHER; note = 2'-O-methyladenosine-3'-phosphorothioate
  modified_base 22: mod_base = OTHER; note = 2'-O-methyladenosine-3'-phosphorothioate
  modified_base 23: mod_base = OTHER; note = 2'-O-methyluridine
ttttgatccaagttgacgtaaat

SEQ ID NO: 1074 - RNA, 23 nt, synthetic construct
  source 1..23: mol_type = other RNA
  modified_base 1: mod_base = OTHER; note = 2'-O-methyluridine-3'-phosphorothioate
  modified_base 2: mod_base = OTHER; note = 2'-fluoroadenosine-3'-phosphorothioate
  modified_base 3: mod_base = OTHER; note = 2'-O-methylcytidine-3'-phosphate
  modified_base 4: mod_base = OTHER; note = 2'-O-methyladenosine-3'-phosphate
  modified_base 5: mod_base = OTHER; note = 2'-O-methyladenosine-3'-phosphate
  modified_base 6: mod_base = OTHER; note = 2'-fluorocytidine-3'-phosphate
  modified_base 7: mod_base = OTHER; note = 2'-O-methyluridine-3'-phosphate
  modified_base 8: mod_base = OTHER; note = 2'-O-methylguanosine-3'-phosphate
  modified_base 9: mod_base = OTHER; note = 2'-O-methyluridine-3'-phosphate
  modified_base 10: mod_base = OTHER; note = 2'-O-methyladenosine-3'-phosphate
  modified_base 11: mod_base = OTHER; note = 2'-O-methylcytidine-3'-phosphate
  modified_base 12: mod_base = OTHER; note = 2'-O-methyluridine-3'-phosphate
  modified_base 13: mod_base = OTHER; note = 2'-O-methylguanosine-3'-phosphate
  modified_base 14: mod_base = OTHER; note = 2'-fluoroadenosine-3'-phosphate
  modified_base 15: mod_base = OTHER; note = 2'-O-methyladenosine-3'-phosphate
  modified_base 16: mod_base = OTHER; note = 2'-fluorouridine-3'-phosphate
  modified_base 17: mod_base = OTHER; note = 2'-O-methyladenosine-3'-phosphate
  modified_base 18: mod_base = OTHER; note = 2'-O-methylcytidine-3'-phosphate
  modified_base 19: mod_base = OTHER; note = 2'-O-methyladenosine-3'-phosphate
  modified_base 20: mod_base = OTHER; note = 2'-O-methyladenosine-3'-phosphate
  modified_base 21: mod_base = OTHER; note = 2'-O-methyladenosine-3'-phosphorothioate
  modified_base 22: mod_base = OTHER; note = 2'-O-methyladenosine-3'-phosphorothioate
  modified_base 23: mod_base = OTHER; note = 2'-O-methylcytidine
tacaactgtactgaatacaaaac

SEQ ID NO: 1075 - RNA, 23 nt, synthetic construct
  source 1..23: mol_type = other RNA
  modified_base 1: mod_base = OTHER; note = 2'-O-methyluridine-3'-phosphorothioate
  modified_base 2: mod_base = OTHER; note = 2'-fluoroguanosine-3'-phosphorothioate
  modified_base 3: mod_base = OTHER; note = 2'-O-methyladenosine-3'-phosphate
  modified_base 4: mod_base = OTHER; note = 2'-O-methyladenosine-3'-phosphate
  modified_base 5: mod_base = OTHER; note = 2'-O-methyluridine-3'-phosphate
  modified_base 6: mod_base = OTHER; note = 2'-fluoroguanosine-3'-phosphate
  modified_base 7: mod_base = OTHER; note = 2'-O-methyladenosine-3'-phosphate
  modified_base 8: mod_base = OTHER; note = 2'-O-methylcytidine-3'-phosphate
  modified_base 9: mod_base = OTHER; note = 2'-O-methyladenosine-3'-phosphate
  modified_base 10: mod_base = OTHER; note = 2'-O-methyladenosine-3'-phosphate
  modified_base 11: mod_base = OTHER; note = 2'-O-methylcytidine-3'-phosphate
  modified_base 12: mod_base = OTHER; note = 2'-O-methyluridine-3'-phosphate
  modified_base 13: mod_base = OTHER; note = 2'-O-methylguanosine-3'-phosphate
  modified_base 14: mod_base = OTHER; note = 2'-fluorouridine-3'-phosphate
  modified_base 15: mod_base = OTHER; note = 2'-O-methyladenosine-3'-phosphate
  modified_base 16: mod_base = OTHER; note = 2'-fluorocytidine-3'-phosphate
  modified_base 17: mod_base = OTHER; note = 2'-O-methyluridine-3'-phosphate
  modified_base 18: mod_base = OTHER; note = 2'-O-methylguanosine-3'-phosphate
  modified_base 19: mod_base = OTHER; note = 2'-O-methyladenosine-3'-phosphate
  modified_base 20: mod_base = OTHER; note = 2'-O-methyladenosine-3'-phosphate
  modified_base 21: mod_base = OTHER; note = 2'-O-methyluridine-3'-phosphorothioate
  modified_base 22: mod_base = OTHER; note = 2'-O-methyladenosine-3'-phosphorothioate
  modified_base 23: mod_base = OTHER; note = 2'-O-methylcytidine
tgaatgacaactgtactgaatac

SEQ ID NO: 1076 - RNA, 23 nt, synthetic construct
  source 1..23: mol_type = other RNA
  modified_base 1: mod_base = OTHER; note = 2'-O-methyluridine-3'-phosphorothioate
  modified_base 2: mod_base = OTHER; note = 2'-fluorouridine-3'-phosphorothioate
  modified_base 3: mod_base = OTHER; note = 2'-O-methylguanosine-3'-phosphate
  modified_base 4: mod_base = OTHER; note = 2'-O-methyluridine-3'-phosphate
  modified_base 5: mod_base = OTHER; note = 2'-O-methylcytidine-3'-phosphate
  modified_base 6: mod_base = OTHER; note = 2'-fluorouridine-3'-phosphate
  modified_base 7: mod_base = OTHER; note = 2'-O-methyladenosine-3'-phosphate
  modified_base 8: mod_base = OTHER; note = 2'-O-methyladenosine-3'-phosphate
  modified_base 9: mod_base = OTHER; note = 2'-O-methylguanosine-3'-phosphate
  modified_base 10: mod_base = OTHER; note = 2'-O-methyladenosine-3'-phosphate
  modified_base 11: mod_base = OTHER; note = 2'-O-methyladenosine-3'-phosphate
  modified_base 12: mod_base = OTHER; note = 2'-O-methylguanosine-3'-phosphate
  modified_base 13: mod_base = OTHER; note = 2'-O-methyluridine-3'-phosphate
  modified_base 14: mod_base = OTHER; note = 2'-fluoroguanosine-3'-phosphate
  modified_base 15: mod_base = OTHER; note = 2'-O-methyladenosine-3'-phosphate
  modified_base 16: mod_base = OTHER; note = 2'-fluoroadenosine-3'-phosphate
  modified_base 17: mod_base = OTHER; note = 2'-O-methyluridine-3'-phosphate
  modified_base 18: mod_base = OTHER; note = 2'-O-methylguanosine-3'-phosphate
  modified_base 19: mod_base = OTHER; note = 2'-O-methyladenosine-3'-phosphate
  modified_base 20: mod_base = OTHER; note = 2'-O-methylcytidine-3'-phosphate
  modified_base 21: mod_base = OTHER; note = 2'-O-methyladenosine-3'-phosphorothioate
  modified_base 22: mod_base = OTHER; note = 2'-O-methyladenosine-3'-phosphorothioate
  modified_base 23: mod_base = OTHER; note = 2'-O-methylcytidine
ttgtctaagaagtgaatgacaac

SEQ ID NO: 1077 - RNA, 23 nt, synthetic construct
  source 1..23: mol_type = other RNA
  modified_base 1: mod_base = OTHER; note = 2'-O-methyluridine-3'-phosphorothioate
  modified_base 2: mod_base = OTHER; note = 2'-fluoroguanosine-3'-phosphorothioate
  modified_base 3: mod_base = OTHER; note = 2'-O-methyluridine-3'-phosphate
  modified_base 4: mod_base = OTHER; note = 2'-O-methylcytidine-3'-phosphate
  modified_base 5: mod_base = OTHER; note = 2'-O-methyladenosine-3'-phosphate
  modified_base 6: mod_base = OTHER; note = 2'-fluoroadenosine-3'-phosphate
  modified_base 7: mod_base = OTHER; note = 2'-O-methyluridine-3'-phosphate
  modified_base 8: mod_base = OTHER; note = 2'-O-methyluridine-3'-phosphate
  modified_base 9: mod_base = OTHER; note = 2'-O-methylcytidine-3'-phosphate
  modified_base 10: mod_base = OTHER; note = 2'-O-methyluridine-3'-phosphate
  modified_base 11: mod_base = OTHER; note = 2'-O-methyluridine-3'-phosphate
  modified_base 12: mod_base = OTHER; note = 2'-O-methyluridine-3'-phosphate
  modified_base 13: mod_base = OTHER; note = 2'-O-methylguanosine-3'-phosphate
  modified_base 14: mod_base = OTHER; note = 2'-fluorouridine-3'-phosphate
  modified_base 15: mod_base = OTHER; note = 2'-O-methylcytidine-3'-phosphate
  modified_base 16: mod_base = OTHER; note = 2'-fluorouridine-3'-phosphate
  modified_base 17: mod_base = OTHER; note = 2'-O-methyladenosine-3'-phosphate
  modified_base 18: mod_base = OTHER; note = 2'-O-methyladenosine-3'-phosphate
  modified_base 19: mod_base = OTHER; note = 2'-O-methylguanosine-3'-phosphate
  modified_base 20: mod_base = OTHER; note = 2'-O-methyladenosine-3'-phosphate
  modified_base 21: mod_base = OTHER; note = 2'-O-methyladenosine-3'-phosphorothioate
  modified_base 22: mod_base = OTHER; note = 2'-O-methylguanosine-3'-phosphorothioate
  modified_base 23: mod_base = OTHER; note = 2'-O-methyluridine
tgtcaattctttgtctaagaagt

SEQ ID NO: 1078 - RNA, 23 nt, synthetic construct
  source 1..23: mol_type = other RNA
  modified_base 1: mod_base = OTHER; note = 2'-O-methyladenosine-3'-phosphorothioate
  modified_base 2: mod_base = OTHER; note = 2'-fluoroadenosine-3'-phosphorothioate
  modified_base 3: mod_base = OTHER; note = 2'-O-methylcytidine-3'-phosphate
  modified_base 4: mod_base = OTHER; note = 2'-O-methyluridine-3'-phosphate
  modified_base 5: mod_base = OTHER; note = 2'-O-methylguanosine-3'-phosphate
  modified_base 6: mod_base = OTHER; note = 2'-fluoroadenosine-3'-phosphate
  modified_base 7: mod_base = OTHER; note = 2'-O-methylguanosine-3'-phosphate
  modified_base 8: mod_base = OTHER; note = 2'-O-methylguanosine-3'-phosphate
  modified_base 9: mod_base = OTHER; note = 2'-O-methylguanosine-3'-phosphate
  modified_base 10: mod_base = OTHER; note = 2'-O-methylcytidine-3'-phosphate
  modified_base 11: mod_base = OTHER; note = 2'-O-methyladenosine-3'-phosphate
  modified_base 12: mod_base = OTHER; note = 2'-O-methyladenosine-3'-phosphate
  modified_base 13: mod_base = OTHER; note = 2'-O-methyladenosine-3'-phosphate
  modified_base 14: mod_base = OTHER; note = 2'-fluorocytidine-3'-phosphate
  modified_base 15: mod_base = OTHER; note = 2'-O-methyluridine-3'-phosphate
  modified_base 16: mod_base = OTHER; note = 2'-fluorouridine-3'-phosphate
  modified_base 17: mod_base = OTHER; note = 2'-O-methyluridine-3'-phosphate
  modified_base 18: mod_base = OTHER; note = 2'-O-methylguanosine-3'-phosphate
  modified_base 19: mod_base = OTHER; note = 2'-O-methylcytidine-3'-phosphate
  modified_base 20: mod_base = OTHER; note = 2'-O-methyluridine-3'-phosphate
  modified_base 21: mod_base = OTHER; note = 2'-O-methyladenosine-3'-phosphorothioate
  modified_base 22: mod_base = OTHER; note = 2'-O-methyladenosine-3'-phosphorothioate
  modified_base 23: mod_base = OTHER; note = 2'-O-methyluridine
aactgagggcaaactttgctaat

SEQ ID NO: 1079 - RNA, 23 nt, synthetic construct
  source 1..23: mol_type = other RNA
  modified_base 1: mod_base = OTHER; note = 2'-O-methyluridine-3'-phosphorothioate
  modified_base 2: mod_base = OTHER; note = 2'-fluorouridine-3'-phosphorothioate
  modified_base 3: mod_base = OTHER; note = 2'-O-methyluridine-3'-phosphate
  modified_base 4: mod_base = OTHER; note = 2'-O-methylcytidine-3'-phosphate
  modified_base 5: mod_base = OTHER; note = 2'-O-methyladenosine-3'-phosphate
  modified_base 6: mod_base = OTHER; note = 2'-fluorouridine-3'-phosphate
  modified_base 7: mod_base = OTHER; note = 2'-O-methylcytidine-3'-phosphate
  modified_base 8: mod_base = OTHER; note = 2'-O-methylcytidine-3'-phosphate
  modified_base 9: mod_base = OTHER; note = 2'-O-methyluridine-3'-phosphate
  modified_base 10: mod_base = OTHER; note = 2'-O-methylguanosine-3'-phosphate
  modified_base 11: mod_base = OTHER; note = 2'-O-methyluridine-3'-phosphate
  modified_base 12: mod_base = OTHER; note = 2'-O-methylguanosine-3'-phosphate
  modified_base 13: mod_base = OTHER; note = 2'-O-methyladenosine-3'-phosphate
  modified_base 14: mod_base = OTHER; note = 2'-fluoroguanosine-3'-phosphate
  modified_base 15: mod_base = OTHER; note = 2'-O-methyluridine-3'-phosphate
  modified_base 16: mod_base = OTHER; note = 2'-fluorouridine-3'-phosphate
  modified_base 17: mod_base = OTHER; note = 2'-O-methylguanosine-3'-phosphate
  modified_base 18: mod_base = OTHER; note = 2'-O-methylguanosine-3'-phosphate
  modified_base 19: mod_base = OTHER; note = 2'-O-methyladenosine-3'-phosphate
  modified_base 20: mod_base = OTHER; note = 2'-O-methyladenosine-3'-phosphate
  modified_base 21: mod_base = OTHER; note = 2'-O-methylcytidine-3'-phosphorothioate
  modified_base 22: mod_base = OTHER; note = 2'-O-methyluridine-3'-phosphorothioate
  modified_base 23: mod_base = OTHER; note = 2'-O-methylguanosine
tttcatcctgtgagttggaactg

SEQ ID NO: 1080 - RNA, 23 nt, synthetic construct
  source 1..23: mol_type = other RNA
  modified_base 1: mod_base = OTHER; note = 2'-O-methyluridine-3'-phosphorothioate
  modified_base 2: mod_base = OTHER; note = 2'-fluoroadenosine-3'-phosphorothioate
  modified_base 3: mod_base = OTHER; note = 2'-O-methyluridine-3'-phosphate
  modified_base 4: mod_base = OTHER; note = 2'-O-methyluridine-3'-phosphate
  modified_base 5: mod_base = OTHER; note = 2'-O-methylcytidine-3'-phosphate
  modified_base 6: mod_base = OTHER; note = 2'-fluorocytidine-3'-phosphate
  modified_base 7: mod_base = OTHER; note = 2'-O-methyladenosine-3'-phosphate
  modified_base 8: mod_base = OTHER; note = 2'-O-methylcytidine-3'-phosphate
  modified_base 9: mod_base = OTHER; note = 2'-O-methylguanosine-3'-phosphate
  modified_base 10: mod_base = OTHER; note = 2'-O-methyladenosine-3'-phosphate
  modified_base 11: mod_base = OTHER; note = 2'-O-methylguanosine-3'-phosphate
  modified_base 12: mod_base = OTHER; note = 2'-O-methylcytidine-3'-phosphate
  modified_base 13: mod_base = OTHER; note = 2'-O-methyladenosine-3'-phosphate
  modified_base 14: mod_base = OTHER; note = 2'-fluoroadenosine-3'-phosphate
  modified_base 15: mod_base = OTHER; note = 2'-O-methyluridine-3'-phosphate
  modified_base 16: mod_base = OTHER; note = 2'-fluoroadenosine-3'-phosphate
  modified_base 17: mod_base = OTHER; note = 2'-O-methyluridine-3'-phosphate
  modified_base 18: mod_base = OTHER; note = 2'-O-methyluridine-3'-phosphate
  modified_base 19: mod_base = OTHER; note = 2'-O-methyluridine-3'-phosphate
  modified_base 20: mod_base = OTHER; note = 2'-O-methyluridine-3'-phosphate
  modified_base 21: mod_base = OTHER; note = 2'-O-methylcytidine-3'-phosphorothioate
  modified_base 22: mod_base = OTHER; note = 2'-O-methylcytidine-3'-phosphorothioate
  modified_base 23: mod_base = OTHER; note = 2'-O-methylcytidine
tattccacgagcaatattttccc

SEQ ID NO: 1081 - RNA, 23 nt, synthetic construct
  source 1..23: mol_type = other RNA
  modified_base 1: mod_base = OTHER; note = 2'-O-methyluridine-3'-phosphorothioate
  modified_base 2: mod_base = OTHER; note = 2'-fluorocytidine-3'-phosphorothioate
  modified_base 3: mod_base = OTHER; note = 2'-O-methyladenosine-3'-phosphate
  modified_base 4: mod_base = OTHER; note = 2'-O-methyluridine-3'-phosphate
  modified_base 5: mod_base = OTHER; note = 2'-O-methyluridine-3'-phosphate
  modified_base 6: mod_base = OTHER; note = 2'-fluorocytidine-3'-phosphate
  modified_base 7: mod_base = OTHER; note = 2'-O-methylcytidine-3'-phosphate
  modified_base 8: mod_base = OTHER; note = 2'-O-methyladenosine-3'-phosphate
  modified_base 9: mod_base = OTHER; note = 2'-O-methylcytidine-3'-phosphate
  modified_base 10: mod_base = OTHER; note = 2'-O-methylguanosine-3'-phosphate
  modified_base 11: mod_base = OTHER; note = 2'-O-methyladenosine-3'-phosphate
  modified_base 12: mod_base = OTHER; note = 2'-O-methylguanosine-3'-phosphate
  modified_base 13: mod_base = OTHER; note = 2'-O-methylcytidine-3'-phosphate
  modified_base 14: mod_base = OTHER; note = 2'-fluoroadenosine-3'-phosphate
  modified_base 15: mod_base = OTHER; note = 2'-O-methyladenosine-3'-phosphate
  modified_base 16: mod_base = OTHER; note = 2'-fluorouridine-3'-phosphate
  modified_base 17: mod_base = OTHER; note = 2'-O-methyladenosine-3'-phosphate
  modified_base 18: mod_base = OTHER; note = 2'-O-methyluridine-3'-phosphate
  modified_base 19: mod_base = OTHER; note = 2'-O-methyluridine-3'-phosphate
  modified_base 20: mod_base = OTHER; note = 2'-O-methyluridine-3'-phosphate
  modified_base 21: mod_base = OTHER; note = 2'-O-methyluridine-3'-phosphorothioate
  modified_base 22: mod_base = OTHER; note = 2'-O-methylcytidine-3'-phosphorothioate
  modified_base 23: mod_base = OTHER; note = 2'-O-methylcytidine
tcattccacgagcaatattttcc

SEQ ID NO: 1082 - RNA, 23 nt, synthetic construct
  source 1..23: mol_type = other RNA
  modified_base 1: mod_base = OTHER; note = 2'-O-methyluridine-3'-phosphorothioate
  modified_base 2: mod_base = OTHER; note = 2'-fluorocytidine-3'-phosphorothioate
  modified_base 3: mod_base = OTHER; note = 2'-O-methylcytidine-3'-phosphate
  modified_base 4: mod_base = OTHER; note = 2'-O-methyladenosine-3'-phosphate
  modified_base 5: mod_base = OTHER; note = 2'-O-methyluridine-3'-phosphate
  modified_base 6: mod_base = OTHER; note = 2'-fluorouridine-3'-phosphate
  modified_base 7: mod_base = OTHER; note = 2'-O-methylcytidine-3'-phosphate
  modified_base 8: mod_base = OTHER; note = 2'-O-methylcytidine-3'-phosphate
  modified_base 9: mod_base = OTHER; note = 2'-O-methyladenosine-3'-phosphate
  modified_base 10: mod_base = OTHER; note = 2'-O-methylcytidine-3'-phosphate
  modified_base 11: mod_base = OTHER; note = 2'-O-methylguanosine-3'-phosphate
  modified_base 12: mod_base = OTHER; note = 2'-O-methyladenosine-3'-phosphate
  modified_base 13: mod_base = OTHER; note = 2'-O-methylguanosine-3'-phosphate
  modified_base 14: mod_base = OTHER; note = 2'-fluorocytidine-3'-phosphate
  modified_base 15: mod_base = OTHER; note = 2'-O-methyladenosine-3'-phosphate
  modified_base 16: mod_base = OTHER; note = 2'-fluoroadenosine-3'-phosphate
  modified_base 17: mod_base = OTHER; note = 2'-O-methyluridine-3'-phosphate
  modified_base 18: mod_base = OTHER; note = 2'-O-methyladenosine-3'-phosphate
  modified_base 19: mod_base = OTHER; note = 2'-O-methyluridine-3'-phosphate
  modified_base 20: mod_base = OTHER; note = 2'-O-methyluridine-3'-phosphate
  modified_base 21: mod_base = OTHER; note = 2'-O-methyluridine-3'-phosphorothioate
  modified_base 22: mod_base = OTHER; note = 2'-O-methyluridine-3'-phosphorothioate
  modified_base 23: mod_base = OTHER; note = 2'-O-methylcytidine
tccattccacgagcaatattttc

SEQ ID NO: 1083 - RNA, 23 nt, synthetic construct
  source 1..23: mol_type = other RNA
  modified_base 1: mod_base = OTHER; note = 2'-O-methyluridine-3'-phosphorothioate
  modified_base 2: mod_base = OTHER; note = 2'-fluoroguanosine-3'-phosphorothioate
  modified_base 3: mod_base = OTHER; note = 2'-O-methylcytidine-3'-phosphate
  modified_base 4: mod_base = OTHER; note = 2'-O-methylcytidine-3'-phosphate
  modified_base 5: mod_base = OTHER; note = 2'-O-methyladenosine-3'-phosphate
  modified_base 6: mod_base = OTHER; note = 2'-fluorouridine-3'-phosphate
  modified_base 7: mod_base = OTHER; note = 2'-O-methyluridine-3'-phosphate
  modified_base 8: mod_base = OTHER; note = 2'-O-methylcytidine-3'-phosphate
  modified_base 9: mod_base = OTHER; note = 2'-O-methylcytidine-3'-phosphate
  modified_base 10: mod_base = OTHER; note = 2'-O-methyladenosine-3'-phosphate
  modified_base 11: mod_base = OTHER; note = 2'-O-methylcytidine-3'-phosphate
  modified_base 12: mod_base = OTHER; note = 2'-O-methylguanosine-3'-phosphate
  modified_base 13: mod_base = OTHER; note = 2'-O-methyladenosine-3'-phosphate
  modified_base 14: mod_base = OTHER; note = 2'-fluoroguanosine-3'-phosphate
  modified_base 15: mod_base = OTHER; note = 2'-O-methylcytidine-3'-phosphate
  modified_base 16: mod_base = OTHER; note = 2'-fluoroadenosine-3'-phosphate
  modified_base 17: mod_base = OTHER; note = 2'-O-methyladenosine-3'-phosphate
  modified_base 18: mod_base = OTHER; note = 2'-O-methyluridine-3'-phosphate
  modified_base 19: mod_base = OTHER; note = 2'-O-methyladenosine-3'-phosphate
  modified_base 20: mod_base = OTHER; note = 2'-O-methyluridine-3'-phosphate
  modified_base 21: mod_base = OTHER; note = 2'-O-methyluridine-3'-phosphorothioate
  modified_base 22: mod_base = OTHER; note = 2'-O-methyluridine-3'-phosphorothioate
  modified_base 23: mod_base = OTHER; note = 2'-O-methyluridine
tgccattccacgagcaatatttt

SEQ ID NO: 1084 - RNA, 23 nt, synthetic construct
  source 1..23: mol_type = other RNA
  modified_base 1: mod_base = OTHER; note = 2'-O-methyladenosine-3'-phosphorothioate
  modified_base 2: mod_base = OTHER; note = 2'-fluoroadenosine-3'-phosphorothioate
  modified_base 3: mod_base = OTHER; note = 2'-O-methyluridine-3'-phosphate
  modified_base 4: mod_base = OTHER; note = 2'-O-methyluridine-3'-phosphate
  modified_base 5: mod_base = OTHER; note = 2'-O-methylguanosine-3'-phosphate
  modified_base 6: mod_base = OTHER; note = 2'-fluorocytidine-3'-phosphate
  modified_base 7: mod_base = OTHER; note = 2'-O-methylcytidine-3'-phosphate
  modified_base 8: mod_base = OTHER; note = 2'-O-methyladenosine-3'-phosphate
  modified_base 9: mod_base = OTHER; note = 2'-O-methyluridine-3'-phosphate
  modified_base 10: mod_base = OTHER; note = 2'-O-methyluridine-3'-phosphate
  modified_base 11: mod_base = OTHER; note = 2'-O-methylcytidine-3'-phosphate
  modified_base 12: mod_base = OTHER; note = 2'-O-methylcytidine-3'-phosphate
  modified_base 13: mod_base = OTHER; note = 2'-O-methyladenosine-3'-phosphate
  modified_base 14: mod_base = OTHER; note = 2'-fluorocytidine-3'-phosphate
  modified_base 15: mod_base = OTHER; note = 2'-O-methylguanosine-3'-phosphate
  modified_base 16: mod_base = OTHER; note = 2'-fluoroadenosine-3'-phosphate
  modified_base 17: mod_base = OTHER; note = 2'-O-methylguanosine-3'-phosphate
  modified_base 18: mod_base = OTHER; note = 2'-O-methylcytidine-3'-phosphate
  modified_base 19: mod_base = OTHER; note = 2'-O-methyladenosine-3'-phosphate
  modified_base 20: mod_base = OTHER; note = 2'-O-methyladenosine-3'-phosphate
  modified_base 21: mod_base = OTHER; note = 2'-O-methyluridine-3'-phosphorothioate
  modified_base 22: mod_base = OTHER; note = 2'-O-methyladenosine-3'-phosphorothioate
  modified_base 23: mod_base = OTHER; note = 2'-O-methyluridine
aattgccattccacgagcaatat

SEQ ID NO: 1085 - RNA, 23 nt, synthetic construct
  source 1..23: mol_type = other RNA
  modified_base 1: mod_base = OTHER; note = 2'-O-methyladenosine-3'-phosphorothioate
  modified_base 2: mod_base = OTHER; note = 2'-fluoroadenosine-3'-phosphorothioate
  modified_base 3: mod_base = OTHER; note = 2'-O-methyladenosine-3'-phosphate
  modified_base 4: mod_base = OTHER; note = 2'-O-methyladenosine-3'-phosphate
  modified_base 5: mod_base = OTHER; note = 2'-O-methyluridine-3'-phosphate
  modified_base 6: mod_base = OTHER; note = 2'-fluorouridine-3'-phosphate
  modified_base 7: mod_base = OTHER; note = 2'-O-methylguanosine-3'-phosphate
  modified_base 8: mod_base = OTHER; note = 2'-O-methylcytidine-3'-phosphate
  modified_base 9: mod_base = OTHER; note = 2'-O-methylcytidine-3'-phosphate
  modified_base 10: mod_base = OTHER; note = 2'-O-methyladenosine-3'-phosphate
  modified_base 11: mod_base = OTHER; note = 2'-O-methyluridine-3'-phosphate
  modified_base 12: mod_base = OTHER; note = 2'-O-methyluridine-3'-phosphate
  modified_base 13: mod_base = OTHER; note = 2'-O-methylcytidine-3'-phosphate
  modified_base 14: mod_base = OTHER; note = 2'-fluorocytidine-3'-phosphate
  modified_base 15: mod_base = OTHER; note = 2'-O-methyladenosine-3'-phosphate
  modified_base 16: mod_base = OTHER; note = 2'-fluorocytidine-3'-phosphate
  modified_base 17: mod_base = OTHER; note = 2'-O-methylguanosine-3'-phosphate
  modified_base 18: mod_base = OTHER; note = 2'-O-methyladenosine-3'-phosphate
  modified_base 19: mod_base = OTHER; note = 2'-O-methylguanosine-3'-phosphate
  modified_base 20: mod_base = OTHER; note = 2'-O-methylcytidine-3'-phosphate
  modified_base 21: mod_base = OTHER; note = 2'-O-methyladenosine-3'-phosphorothioate
  modified_base 22: mod_base = OTHER; note = 2'-O-methyladenosine-3'-phosphorothioate
  modified_base 23: mod_base = OTHER; note = 2'-O-methyluridine
aaaattgccattccacgagcaat

SEQ ID NO: 1086 - RNA, 23 nt, synthetic construct
  source 1..23: mol_type = other RNA
  modified_base 1: mod_base = OTHER; note = 2'-O-methyluridine-3'-phosphorothioate
  modified_base 2: mod_base = OTHER; note = 2'-fluoroadenosine-3'-phosphorothioate
  modified_base 3: mod_base = OTHER; note = 2'-O-methylcytidine-3'-phosphate
  modified_base 4: mod_base = OTHER; note = 2'-O-methylcytidine-3'-phosphate
  modified_base 5: mod_base = OTHER; note = 2'-O-methyluridine-3'-phosphate
  modified_base 6: mod_base = OTHER; note = 2'-fluoroadenosine-3'-phosphate
  modified_base 7: mod_base = OTHER; note = 2'-O-methyladenosine-3'-phosphate
  modified_base 8: mod_base = OTHER; note = 2'-O-methyladenosine-3'-phosphate
  modified_base 9: mod_base = OTHER; note = 2'-O-methyladenosine-3'-phosphate
  modified_base 10: mod_base = OTHER; note = 2'-O-methyluridine-3'-phosphate
  modified_base 11: mod_base = OTHER; note = 2'-O-methyluridine-3'-phosphate
  modified_base 12: mod_base = OTHER; note = 2'-O-methylguanosine-3'-phosphate
  modified_base 13: mod_base = OTHER; note = 2'-O-methylcytidine-3'-phosphate
  modified_base 14: mod_base = OTHER; note = 2'-fluorocytidine-3'-phosphate
  modified_base 15: mod_base = OTHER; note = 2'-O-methyladenosine-3'-phosphate
  modified_base 16: mod_base = OTHER; note = 2'-fluorouridine-3'-phosphate
  modified_base 17: mod_base = OTHER; note = 2'-O-methyluridine-3'-phosphate
  modified_base 18: mod_base = OTHER; note = 2'-O-methylcytidine-3'-phosphate
  modified_base 19: mod_base = OTHER; note = 2'-O-methylcytidine-3'-phosphate
  modified_base 20: mod_base = OTHER; note = 2'-O-methyladenosine-3'-phosphate
  modified_base 21: mod_base = OTHER; note = 2'-O-methylcytidine-3'-phosphorothioate
  modified_base 22: mod_base = OTHER; note = 2'-O-methylguanosine-3'-phosphorothioate
  modified_base 23: mod_base = OTHER; note = 2'-O-methyladenosine
tacctaaaattgccattccacga

SEQ ID NO: 1087 - RNA, 23 nt, synthetic construct
  source 1..23: mol_type = other RNA
  modified_base 1: mod_base = OTHER; note = 2'-O-methyladenosine-3'-phosphorothioate
  modified_base 2: mod_base = OTHER; note = 2'-fluoroguanosine-3'-phosphorothioate
  modified_base 3: mod_base = OTHER; note = 2'-O-methylcytidine-3'-phosphate
  modified_base 4: mod_base = OTHER; note = 2'-O-methyladenosine-3'-phosphate
  modified_base 5: mod_base = OTHER; note = 2'-O-methyluridine-3'-phosphate
  modified_base 6: mod_base = OTHER; note = 2'-fluorocytidine-3'-phosphate
  modified_base 7: mod_base = OTHER; note = 2'-O-methylguanosine-3'-phosphate
  modified_base 8: mod_base = OTHER; note = 2'-O-methyladenosine-3'-phosphate
  modified_base 9: mod_base = OTHER; note = 2'-O-methylguanosine-3'-phosphate
  modified_base 10: mod_base = OTHER; note = 2'-O-methylguanosine-3'-phosphate
  modified_base 11: mod_base = OTHER; note = 2'-O-methylguanosine-3'-phosphate
  modified_base 12: mod_base = OTHER; note = 2'-O-methyluridine-3'-phosphate
  modified_base 13: mod_base = OTHER; note = 2'-O-methyladenosine-3'-phosphate
  modified_base 14: mod_base = OTHER; note = 2'-fluoroadenosine-3'-phosphate
  modified_base 15: mod_base = OTHER; note = 2'-O-methyladenosine-3'-phosphate
  modified_base 16: mod_base = OTHER; note = 2'-fluorocytidine-3'-phosphate
  modified_base 17: mod_base = OTHER; note = 2'-O-methylguanosine-3'-phosphate
  modified_base 18: mod_base = OTHER; note = 2'-O-methyluridine-3'-phosphate
  modified_base 19: mod_base = OTHER; note = 2'-O-methyladenosine-3'-phosphate
  modified_base 20: mod_base = OTHER; note = 2'-O-methylguanosine-3'-phosphate
  modified_base 21: mod_base = OTHER; note = 2'-O-methylguanosine-3'-phosphorothioate
  modified_base 22: mod_base = OTHER; note = 2'-O-methyladenosine-3'-phosphorothioate
  modified_base 23: mod_base = OTHER; note = 2'-O-methylcytidine
agcatcgagggtaaacgtaggac

SEQ ID NO: 1088 - RNA, 23 nt, synthetic construct
  source 1..23: mol_type = other RNA
  modified_base 1: mod_base = OTHER; note = 2'-O-methyluridine-3'-phosphorothioate
  modified_base 2: mod_base = OTHER; note = 2'-fluoroadenosine-3'-phosphorothioate
  modified_base 3: mod_base = OTHER; note = 2'-O-methylguanosine-3'-phosphate
  modified_base 4: mod_base = OTHER; note = 2'-O-methylcytidine-3'-phosphate
  modified_base 5: mod_base = OTHER; note = 2'-O-methyladenosine-3'-phosphate
  modified_base 6: mod_base = OTHER; note = 2'-fluorouridine-3'-phosphate
  modified_base 7: mod_base = OTHER; note = 2'-O-methylcytidine-3'-phosphate
  modified_base 8: mod_base = OTHER; note = 2'-O-methylguanosine-3'-phosphate
  modified_base 9: mod_base = OTHER; note = 2'-O-methyladenosine-3'-phosphate
  modified_base 10: mod_base = OTHER; note = 2'-O-methylguanosine-3'-phosphate
  modified_base 11: mod_base = OTHER; note = 2'-O-methylguanosine-3'-phosphate
  modified_base 12: mod_base = OTHER; note = 2'-O-methylguanosine-3'-phosphate
  modified_base 13: mod_base = OTHER; note = 2'-O-methyluridine-3'-phosphate
  modified_base 14: mod_base = OTHER; note = 2'-fluoroadenosine-3'-phosphate
  modified_base 15: mod_base = OTHER; note = 2'-O-methyladenosine-3'-phosphate
  modified_base 16: mod_base = OTHER; note = 2'-fluoroadenosine-3'-phosphate
  modified_base 17: mod_base = OTHER; note = 2'-O-methylcytidine-3'-phosphate
  modified_base 18: mod_base = OTHER; note = 2'-O-methylguanosine-3'-phosphate
  modified_base 19: mod_base = OTHER; note = 2'-O-methyluridine-3'-phosphate
  modified_base 20: mod_base = OTHER; note = 2'-O-methyladenosine-3'-phosphate
  modified_base 21: mod_base = OTHER; note = 2'-O-methylguanosine-3'-phosphorothioate
  modified_base 22: mod_base = OTHER; note = 2'-O-methylguanosine-3'-phosphorothioate
  modified_base 23: mod_base = OTHER; note = 2'-O-methyladenosine
tagcatcgagggtaaacgtagga

SEQ ID NO: 1089 - RNA, 23 nt, synthetic construct
  source 1..23: mol_type = other RNA
  modified_base 1: mod_base = OTHER; note = 2'-O-methyladenosine-3'-phosphorothioate
  modified_base 2: mod_base = OTHER; note = 2'-fluoroadenosine-3'-phosphorothioate
  modified_base 3: mod_base = OTHER; note = 2'-O-methyluridine-3'-phosphate
  modified_base 4: mod_base = OTHER; note = 2'-O-methylcytidine-3'-phosphate
  modified_base 5: mod_base = OTHER; note = 2'-O-methyladenosine-3'-phosphate
  modified_base 6: mod_base = OTHER; note = 2'-fluorocytidine-3'-phosphate
  modified_base 7: mod_base = OTHER; note = 2'-O-methyladenosine-3'-phosphate
  modified_base 8: mod_base = OTHER; note = 2'-O-methyladenosine-3'-phosphate
  modified_base 9: mod_base = OTHER; note = 2'-O-methylguanosine-3'-phosphate
  modified_base 10: mod_base = OTHER; note = 2'-O-methyladenosine-3'-phosphate
  modified_base 11: mod_base = OTHER; note = 2'-O-methylcytidine-3'-phosphate
  modified_base 12: mod_base = OTHER; note = 2'-O-methyladenosine-3'-phosphate
  modified_base 13: mod_base = OTHER; note = 2'-O-methyluridine-3'-phosphate
  modified_base 14: mod_base = OTHER; note = 2'-fluorouridine-3'-phosphate
  modified_base 15: mod_base = OTHER; note = 2'-O-methylcytidine-3'-phosphate
  modified_base 16: mod_base = OTHER; note = 2'-fluoroadenosine-3'-phosphate
  modified_base 17: mod_base = OTHER; note = 2'-O-methyladenosine-3'-phosphate
  modified_base 18: mod_base = OTHER; note = 2'-O-methylcytidine-3'-phosphate
  modified_base 19: mod_base = OTHER; note = 2'-O-methyladenosine-3'-phosphate
  modified_base 20: mod_base = OTHER; note = 2'-O-methyladenosine-3'-phosphate
  modified_base 21: mod_base = OTHER; note = 2'-O-methylguanosine-3'-phosphorothioate
  modified_base 22: mod_base = OTHER; note = 2'-O-methyladenosine-3'-phosphorothioate
  modified_base 23: mod_base = OTHER; note = 2'-O-methylguanosine
aatcacaagacattcaacaagag

SEQ ID NO: 1090 - RNA, 23 nt, synthetic construct
  source 1..23: mol_type = other RNA
  modified_base 1: mod_base = OTHER; note = 2'-O-methyluridine-3'-phosphorothioate
  modified_base 2: mod_base = OTHER; note = 2'-fluorocytidine-3'-phosphorothioate
  modified_base 3: mod_base = OTHER; note = 2'-O-methylcytidine-3'-phosphate
  modified_base 4: mod_base = OTHER; note = 2'-O-methyladenosine-3'-phosphate
  modified_base 5: mod_base = OTHER; note = 2'-O-methyladenosine-3'-phosphate
  modified_base 6: mod_base = OTHER; note = 2'-fluorouridine-3'-phosphate
  modified_base 7: mod_base = OTHER; note = 2'-O-methylcytidine-3'-phosphate
  modified_base 8: mod_base = OTHER; note = 2'-O-methyladenosine-3'-phosphate
  modified_base 9: mod_base = OTHER; note = 2'-O-methylcytidine-3'-phosphate
  modified_base 10: mod_base = OTHER; note = 2'-O-methyladenosine-3'-phosphate
  modified_base 11: mod_base = OTHER; note = 2'-O-methyladenosine-3'-phosphate
  modified_base 12: mod_base = OTHER; note = 2'-O-methylguanosine-3'-phosphate
  modified_base 13: mod_base = OTHER; note = 2'-O-methyladenosine-3'-phosphate
  modified_base 14: mod_base = OTHER; note = 2'-fluorocytidine-3'-phosphate
  modified_base 15: mod_base = OTHER; note = 2'-O-methyladenosine-3'-phosphate
  modified_base 16: mod_base = OTHER; note = 2'-fluorouridine-3'-phosphate
  modified_base 17: mod_base = OTHER; note = 2'-O-methyluridine-3'-phosphate
  modified_base 18: mod_base = OTHER; note = 2'-O-methylcytidine-3'-phosphate
  modified_base 19: mod_base = OTHER; note = 2'-O-methyladenosine-3'-phosphate
  modified_base 20: mod_base = OTHER; note = 2'-O-methyladenosine-3'-phosphate
  modified_base 21: mod_base = OTHER; note = 2'-O-methylcytidine-3'-phosphorothioate
  modified_base 22: mod_base = OTHER; note = 2'-O-methyladenosine-3'-phosphorothioate
  modified_base 23: mod_base = OTHER; note = 2'-O-methyladenosine
tccaatcacaagacattcaacaa

SEQ ID NO: 1091 - RNA, 23 nt, synthetic construct
  source 1..23: mol_type = other RNA
  modified_base 1: mod_base = OTHER; note = 2'-O-methyluridine-3'-phosphorothioate
  modified_base 2: mod_base = OTHER; note = 2'-fluoroadenosine-3'-phosphorothioate
  modified_base 3: mod_base = OTHER; note = 2'-O-methyluridine-3'-phosphate
  modified_base 4: mod_base = OTHER; note = 2'-O-methyladenosine-3'-phosphate
  modified_base 5: mod_base = OTHER; note = 2'-O-methyladenosine-3'-phosphate
  modified_base 6: mod_base = OTHER; note = 2'-fluorouridine-3'-phosphate
  modified_base 7: mod_base = OTHER; note = 2'-O-methyluridine-3'-phosphate
  modified_base 8: mod_base = OTHER; note = 2'-O-methyluridine-3'-phosphate
  modified_base 9: mod_base = OTHER; note = 2'-O-methylcytidine-3'-phosphate
  modified_base 10: mod_base = OTHER; note = 2'-O-methyladenosine-3'-phosphate
  modified_base 11: mod_base = OTHER; note = 2'-O-methyladenosine-3'-phosphate
  modified_base 12: mod_base = OTHER; note = 2'-O-methylguanosine-3'-phosphate
  modified_base 13: mod_base = OTHER; note = 2'-O-methylcytidine-3'-phosphate
  modified_base 14: mod_base = OTHER; note = 2'-fluorouridine-3'-phosphate
  modified_base 15: mod_base = OTHER; note = 2'-O-methylguanosine-3'-phosphate
  modified_base 16: mod_base = OTHER; note = 2'-fluoroadenosine-3'-phosphate
  modified_base 17: mod_base = OTHER; note = 2'-O-methylcytidine-3'-phosphate
  modified_base 18: mod_base = OTHER; note = 2'-O-methylguanosine-3'-phosphate
  modified_base 19: mod_base = OTHER; note = 2'-O-methyluridine-3'-phosphate
  modified_base 20: mod_base = OTHER; note = 2'-O-methyladenosine-3'-phosphate
  modified_base 21: mod_base = OTHER; note = 2'-O-methylcytidine-3'-phosphorothioate
  modified_base 22: mod_base = OTHER; note = 2'-O-methylcytidine-3'-phosphorothioate
  modified_base 23: mod_base = OTHER; note = 2'-O-methylcytidine
tataatttcaagctgacgtaccc

SEQ ID NO: 1092 - RNA, 23 nt, synthetic construct
  source 1..23: mol_type = other RNA
  modified_base 1: mod_base = OTHER; note = 2'-O-methyluridine-3'-phosphorothioate
  modified_base 2: mod_base = OTHER; note = 2'-fluoroadenosine-3'-phosphorothioate
  modified_base 3: mod_base = OTHER; note = 2'-O-methylguanosine-3'-phosphate
  modified_base 4: mod_base = OTHER; note = 2'-O-methylcytidine-3'-phosphate
  modified_base 5: mod_base = OTHER; note = 2'-O-methyladenosine-3'-phosphate
  modified_base 6: mod_base = OTHER; note = 2'-fluorocytidine-3'-phosphate
  modified_base 7: mod_base = OTHER; note = 2'-O-methyladenosine-3'-phosphate
  modified_base 8: mod_base = OTHER; note = 2'-O-methyluridine-3'-phosphate
  modified_base 9: mod_base = OTHER; note = 2'-O-methyladenosine-3'-phosphate
  modified_base 10: mod_base = OTHER; note = 2'-O-methyladenosine-3'-phosphate
  modified_base 11: mod_base = OTHER; note = 2'-O-methyluridine-3'-phosphate
  modified_base 12: mod_base = OTHER; note = 2'-O-methyluridine-3'-phosphate
  modified_base 13: mod_base = OTHER; note = 2'-O-methyluridine-3'-phosphate
  modified_base 14: mod_base = OTHER; note = 2'-fluorocytidine-3'-phosphate
  modified_base 15: mod_base = OTHER; note = 2'-O-methyladenosine-3'-phosphate
  modified_base 16: mod_base = OTHER; note = 2'-fluoroadenosine-3'-phosphate
  modified_base 17: mod_base = OTHER; note = 2'-O-methylguanosine-3'-phosphate
  modified_base 18: mod_base = OTHER; note = 2'-O-methylcytidine-3'-phosphate
  modified_base 19: mod_base = OTHER; note = 2'-O-methyluridine-3'-phosphate
  modified_base 20: mod_base = OTHER; note = 2'-O-methylguanosine-3'-phosphate
  modified_base 21: mod_base = OTHER; note = 2'-O-methyladenosine-3'-phosphorothioate
  modified_base 22: mod_base = OTHER; note = 2'-O-methylcytidine-3'-phosphorothioate
  modified_base 23: mod_base = OTHER; note = 2'-O-methylguanosine
tagcacataatttcaagctgacg

SEQ ID NO: 1093 - RNA, 23 nt, synthetic construct
  source 1..23: mol_type = other RNA
  modified_base 1: mod_base = OTHER; note = 2'-O-methyluridine-3'-phosphorothioate
  modified_base 2: mod_base = OTHER; note = 2'-fluoroadenosine-3'-phosphorothioate
  modified_base 3: mod_base = OTHER; note = 2'-O-methylguanosine-3'-phosphate
  modified_base 4: mod_base = OTHER; note = 2'-O-methylcytidine-3'-phosphate
  modified_base 5: mod_base = OTHER; note = 2'-O-methylcytidine-3'-phosphate
  modified_base 6: mod_base = OTHER; note = 2'-fluoroadenosine-3'-phosphate
  modified_base 7: mod_base = OTHER; note = 2'-O-methyladenosine-3'-phosphate
  modified_base 8: mod_base = OTHER; note = 2'-O-methyladenosine-3'-phosphate
  modified_base 9: mod_base = OTHER; note = 2'-O-methylguanosine-3'-phosphate
  modified_base 10: mod_base = OTHER; note = 2'-O-methylcytidine-3'-phosphate
  modified_base 11: mod_base = OTHER; note = 2'-O-methyladenosine-3'-phosphate
  modified_base 12: mod_base = OTHER; note = 2'-O-methylguanosine-3'-phosphate
  modified_base 13: mod_base = OTHER; note = 2'-O-methylcytidine-3'-phosphate
  modified_base 14: mod_base = OTHER; note = 2'-fluoroadenosine-3'-phosphate
  modified_base 15: mod_base = OTHER; note = 2'-O-methylcytidine-3'-phosphate
  modified_base 16: mod_base = OTHER; note = 2'-fluoroadenosine-3'-phosphate
  modified_base 17: mod_base = OTHER; note = 2'-O-methyluridine-3'-phosphate
  modified_base 18: mod_base = OTHER; note = 2'-O-methyladenosine-3'-phosphate
  modified_base 19: mod_base = OTHER; note = 2'-O-methyladenosine-3'-phosphate
  modified_base 20: mod_base = OTHER; note = 2'-O-methyluridine-3'-phosphate
  modified_base 21: mod_base = OTHER; note = 2'-O-methyluridine-3'-phosphorothioate
  modified_base 22: mod_base = OTHER; note = 2'-O-methyluridine-3'-phosphorothioate
  modified_base 23: mod_base = OTHER; note = 2'-O-methylcytidine
tagccaaagcagcacataatttc

SEQ ID NO: 1094 - RNA, 23 nt, synthetic construct
  source 1..23: mol_type = other RNA
  modified_base 1: mod_base = OTHER; note = 2'-O-methyladenosine-3'-phosphorothioate
  modified_base 2: mod_base = OTHER; note = 2'-fluoroadenosine-3'-phosphorothioate
  modified_base 3: mod_base = OTHER; note = 2'-O-methylguanosine-3'-phosphate
  modified_base 4: mod_base = OTHER; note = 2'-O-methyladenosine-3'-phosphate
  modified_base 5: mod_base = OTHER; note = 2'-O-methyladenosine-3'-phosphate
  modified_base 6: mod_base = OTHER; note = 2'-fluorocytidine-3'-phosphate
  modified_base 7: mod_base = OTHER; note = 2'-O-methyluridine-3'-phosphate
  modified_base 8: mod_base = OTHER; note = 2'-O-methylguanosine-3'-phosphate
  modified_base 9: mod_base = OTHER; note = 2'-O-methyladenosine-3'-phosphate
  modified_base 10: mod_base = OTHER; note = 2'-O-methylcytidine-3'-phosphate
  modified_base 11: mod_base = OTHER; note = 2'-O-methyladenosine-3'-phosphate
  modified_base 12: mod_base = OTHER; note = 2'-O-methyluridine-3'-phosphate
  modified_base 13: mod_base = OTHER; note = 2'-O-methylguanosine-3'-phosphate
  modified_base 14: mod_base = OTHER; note = 2'-fluorocytidine-3'-phosphate
  modified_base 15: mod_base = OTHER; note = 2'-O-methyladenosine-3'-phosphate
  modified_base 16: mod_base = OTHER; note = 2'-fluoroguanosine-3'-phosphate
  modified_base 17: mod_base = OTHER; note = 2'-O-methylcytidine-3'-phosphate
  modified_base 18: mod_base = OTHER; note = 2'-O-methylcytidine-3'-phosphate
  modified_base 19: mod_base = OTHER; note = 2'-O-methyladenosine-3'-phosphate
  modified_base 20: mod_base = OTHER; note = 2'-O-methyladenosine-3'-phosphate
  modified_base 21: mod_base = OTHER; note = 2'-O-methyladenosine-3'-phosphorothioate
  modified_base 22: mod_base = OTHER; note = 2'-O-methylguanosine-3'-phosphorothioate
  modified_base 23: mod_base = OTHER; note = 2'-O-methylcytidine
aagaactgacatgcagccaaagc

SEQ ID NO: 1095 - RNA, 23 nt, synthetic construct
  source 1..23: mol_type = other RNA
  modified_base 1: mod_base = OTHER; note = 2'-O-methyluridine-3'-phosphorothioate
  modified_base 2: mod_base = OTHER; note = 2'-fluoroguanosine-3'-phosphorothioate
  modified_base 3: mod_base = OTHER; note = 2'-O-methyladenosine-3'-phosphate
  modified_base 4: mod_base = OTHER; note = 2'-O-methyladenosine-3'-phosphate
  modified_base 5: mod_base = OTHER; note = 2'-O-methylcytidine-3'-phosphate
  modified_base 6: mod_base = OTHER; note = 2'-fluoroadenosine-3'-phosphate
  modified_base 7: mod_base = OTHER; note = 2'-O-methylcytidine-3'-phosphate
  modified_base 8: mod_base = OTHER; note = 2'-O-methylguanosine-3'-phosphate
  modified_base 9: mod_base = OTHER; note = 2'-O-methyladenosine-3'-phosphate
  modified_base 10: mod_base = OTHER; note = 2'-O-methyladenosine-3'-phosphate
  modified_base 11: mod_base = OTHER; note = 2'-O-methylguanosine-3'-phosphate
  modified_base 12: mod_base = OTHER; note = 2'-O-methyluridine-3'-phosphate
  modified_base 13: mod_base = OTHER; note = 2'-O-methyladenosine-3'-phosphate
  modified_base 14: mod_base = OTHER; note = 2'-fluoroguanosine-3'-phosphate
  modified_base 15: mod_base = OTHER; note = 2'-O-methyluridine-3'-phosphate
  modified_base 16: mod_base = OTHER; note = 2'-fluorouridine-3'-phosphate
  modified_base 17: mod_base = OTHER; note = 2'-O-methylguanosine-3'-phosphate
  modified_base 18: mod_base = OTHER; note = 2'-O-methylguanosine-3'-phosphate
  modified_base 19: mod_base = OTHER; note = 2'-O-methylcytidine-3'-phosphate
  modified_base 20: mod_base = OTHER; note = 2'-O-methyladenosine-3'-phosphate
  modified_base 21: mod_base = OTHER; note = 2'-O-methyladenosine-3'-phosphorothioate
  modified_base 22: mod_base = OTHER; note = 2'-O-methylguanosine-3'-phosphorothioate
  modified_base 23: mod_base = OTHER; note = 2'-O-methyladenosine
tgaacacgaagtagttggcaaga

SEQ ID NO: 1096 - RNA, 23 nt, synthetic construct
  source 1..23: mol_type = other RNA
  modified_base 1: mod_base = OTHER; note = 2'-O-methyladenosine-3'-phosphorothioate
  modified_base 2: mod_base = OTHER; note = 2'-fluorouridine-3'-phosphorothioate
  modified_base 3: mod_base = OTHER; note = 2'-O-methylguanosine-3'-phosphate
  modified_base 4: mod_base = OTHER; note = 2'-O-methyladenosine-3'-phosphate
  modified_base 5: mod_base = OTHER; note = 2'-O-methyladenosine-3'-phosphate
  modified_base 6: mod_base = OTHER; note = 2'-fluorocytidine-3'-phosphate
  modified_base 7: mod_base = OTHER; note = 2'-O-methyladenosine-3'-phosphate
  modified_base 8: mod_base = OTHER; note = 2'-O-methylcytidine-3'-phosphate
  modified_base 9: mod_base = OTHER; note = 2'-O-methylguanosine-3'-phosphate
  modified_base 10: mod_base = OTHER; note = 2'-O-methyladenosine-3'-phosphate
  modified_base 11: mod_base = OTHER; note = 2'-O-methyladenosine-3'-phosphate
  modified_base 12: mod_base = OTHER; note = 2'-O-methylguanosine-3'-phosphate
  modified_base 13: mod_base = OTHER; note = 2'-O-methyluridine-3'-phosphate
  modified_base 14: mod_base = OTHER; note = 2'-fluoroadenosine-3'-phosphate
  modified_base 15: mod_base = OTHER; note = 2'-O-methylguanosine-3'-phosphate
  modified_base 16: mod_base = OTHER; note = 2'-fluorouridine-3'-phosphate
  modified_base 17: mod_base = OTHER; note = 2'-O-methyluridine-3'-phosphate
  modified_base 18: mod_base = OTHER; note = 2'-O-methylguanosine-3'-phosphate
  modified_base 19: mod_base = OTHER; note = 2'-O-methylguanosine-3'-phosphate
  modified_base 20: mod_base = OTHER; note = 2'-O-methylcytidine-3'-phosphate
  modified_base 21: mod_base = OTHER; note = 2'-O-methyladenosine-3'-phosphorothioate
  modified_base 22: mod_base = OTHER; note = 2'-O-methyladenosine-3'-phosphorothioate
  modified_base 23: mod_base = OTHER; note = 2'-O-methylguanosine
atgaacacgaagtagttggcaag

SEQ ID NO: 1097 - RNA, 23 nt, synthetic construct
  source 1..23: mol_type = other RNA
  modified_base 1: mod_base = OTHER; note = 2'-O-methyladenosine-3'-phosphorothioate
  modified_base 2: mod_base = OTHER; note = 2'-fluoroguanosine-3'-phosphorothioate
  modified_base 3: mod_base = OTHER; note = 2'-O-methyluridine-3'-phosphate
  modified_base 4: mod_base = OTHER; note = 2'-O-methylcytidine-3'-phosphate
  modified_base 5: mod_base = OTHER; note = 2'-O-methyladenosine-3'-phosphate
  modified_base 6: mod_base = OTHER; note = 2'-fluorouridine-3'-phosphate
  modified_base 7: mod_base = OTHER; note = 2'-O-methylguanosine-3'-phosphate
  modified_base 8: mod_base = OTHER; note = 2'-O-methyladenosine-3'-phosphate
  modified_base 9: mod_base = OTHER; note = 2'-O-methyladenosine-3'-phosphate
  modified_base 10: mod_base = OTHER; note = 2'-O-methylcytidine-3'-phosphate
  modified_base 11: mod_base = OTHER; note = 2'-O-methyladenosine-3'-phosphate
  modified_base 12: mod_base = OTHER; note = 2'-O-methylcytidine-3'-phosphate
  modified_base 13: mod_base = OTHER; note = 2'-O-methylguanosine-3'-phosphate
  modified_base 14: mod_base = OTHER; note = 2'-fluoroadenosine-3'-phosphate
  modified_base 15: mod_base = OTHER; note = 2'-O-methyladenosine-3'-phosphate
  modified_base 16: mod_base = OTHER; note = 2'-fluoroguanosine-3'-phosphate
  modified_base 17: mod_base = OTHER; note = 2'-O-methyluridine-3'-phosphate
  modified_base 18: mod_base = OTHER; note = 2'-O-methyladenosine-3'-phosphate
  modified_base 19: mod_base = OTHER; note = 2'-O-methylguanosine-3'-phosphate
  modified_base 20: mod_base = OTHER; note = 2'-O-methyluridine-3'-phosphate
  modified_base 21: mod_base = OTHER; note = 2'-O-methyluridine-3'-phosphorothioate
  modified_base 22: mod_base = OTHER; note = 2'-O-methylguanosine-3'-phosphorothioate
  modified_base 23: mod_base = OTHER; note = 2'-O-methylguanosine
agtcatgaacacgaagtagttgg

SEQ ID NO: 1098 - RNA, 23 nt, synthetic construct
  source 1..23: mol_type = other RNA
  modified_base 1: mod_base = OTHER; note = 2'-O-methyladenosine-3'-phosphorothioate
  modified_base 2: mod_base = OTHER; note = 2'-fluoroguanosine-3'-phosphorothioate
  modified_base 3: mod_base = OTHER; note = 2'-O-methyladenosine-3'-phosphate
  modified_base 4: mod_base = OTHER; note = 2'-O-methyladenosine-3'-phosphate
  modified_base 5: mod_base = OTHER; note = 2'-O-methyladenosine-3'-phosphate
  modified_base 6: mod_base = OTHER; note = 2'-fluoroguanosine-3'-phosphate
  modified_base 7: mod_base = OTHER; note = 2'-O-methyluridine-3'-phosphate
  modified_base 8: mod_base = OTHER; note = 2'-O-methylcytidine-3'-phosphate
  modified_base 9: mod_base = OTHER; note = 2'-O-methyladenosine-3'-phosphate
  modified_base 10: mod_base = OTHER; note = 2'-O-methyluridine-3'-phosphate
  modified_base 11: mod_base = OTHER; note = 2'-O-methylguanosine-3'-phosphate
  modified_base 12: mod_base = OTHER; note = 2'-O-methyladenosine-3'-phosphate
  modified_base 13: mod_base = OTHER; note = 2'-O-methyladenosine-3'-phosphate
  modified_base 14: mod_base = OTHER; note = 2'-fluorocytidine-3'-phosphate
  modified_base 15: mod_base = OTHER; note = 2'-O-methyladenosine-3'-phosphate
  modified_base 16: mod_base = OTHER; note = 2'-fluorocytidine-3'-phosphate
  modified_base 17: mod_base = OTHER; note = 2'-O-methylguanosine-3'-phosphate
  modified_base 18: mod_base = OTHER; note = 2'-O-methyladenosine-3'-phosphate
  modified_base 19: mod_base = OTHER; note = 2'-O-methyladenosine-3'-phosphate
  modified_base 20: mod_base = OTHER; note = 2'-O-methylguanosine-3'-phosphate
  modified_base 21: mod_base = OTHER; note = 2'-O-methyluridine-3'-phosphorothioate
  modified_base 22: mod_base = OTHER; note = 2'-O-methyladenosine-3'-phosphorothioate
  modified_base 23: mod_base = OTHER; note = 2'-O-methylguanosine
agaaagtcatgaacacgaagtag

SEQ ID NO: 1099 - RNA, 23 nt, synthetic construct
  source 1..23: mol_type = other RNA
  modified_base 1: mod_base = OTHER; note = 2'-O-methyladenosine-3'-phosphorothioate
  modified_base 2: mod_base = OTHER; note = 2'-fluoroadenosine-3'-phosphorothioate
  modified_base 3: mod_base = OTHER; note = 2'-O-methylguanosine-3'-phosphate
  modified_base 4: mod_base = OTHER; note = 2'-O-methyladenosine-3'-phosphate
  modified_base 5: mod_base = OTHER; note = 2'-O-methyladenosine-3'-phosphate
  modified_base 6: mod_base = OTHER; note = 2'-fluoroadenosine-3'-phosphate
  modified_base 7: mod_base = OTHER; note = 2'-O-methylguanosine-3'-phosphate
  modified_base 8: mod_base = OTHER; note = 2'-O-methyluridine-3'-phosphate
  modified_base 9: mod_base = OTHER; note = 2'-O-methylcytidine-3'-phosphate
  modified_base 10: mod_base = OTHER; note = 2'-O-methyladenosine-3'-phosphate
  modified_base 11: mod_base = OTHER; note = 2'-O-methyluridine-3'-phosphate
  modified_base 12: mod_base = OTHER; note = 2'-O-methylguanosine-3'-phosphate
  modified_base 13: mod_base = OTHER; note = 2'-O-methyladenosine-3'-phosphate
  modified_base 14: mod_base = OTHER; note = 2'-fluoroadenosine-3'-phosphate
  modified_base 15: mod_base = OTHER; note = 2'-O-methylcytidine-3'-phosphate
  modified_base 16: mod_base = OTHER; note = 2'-fluoroadenosine-3'-phosphate
  modified_base 17: mod_base = OTHER; note = 2'-O-methylcytidine-3'-phosphate
  modified_base 18: mod_base = OTHER; note = 2'-O-methylguanosine-3'-phosphate
  modified_base 19: mod_base = OTHER; note = 2'-O-methyladenosine-3'-phosphate
  modified_base 20: mod_base = OTHER; note = 2'-O-methyladenosine-3'-phosphate
  modified_base 21: mod_base = OTHER; note = 2'-O-methylguanosine-3'-phosphorothioate
  modified_base 22: mod_base = OTHER; note = 2'-O-methyluridine-3'-phosphorothioate
  modified_base 23: mod_base = OTHER; note = 2'-O-methyladenosine
aagaaagtcatgaacacgaagta

SEQ ID NO: 1100 - RNA, 23 nt, synthetic construct
  source 1..23: mol_type = other RNA
  modified_base 1: mod_base = OTHER; note = 2'-O-methyladenosine-3'-phosphorothioate
  modified_base 2: mod_base = OTHER; note = 2'-fluoroadenosine-3'-phosphorothioate
  modified_base 3: mod_base = OTHER; note = 2'-O-methylguanosine-3'-phosphate
  modified_base 4: mod_base = OTHER; note = 2'-O-methyladenosine-3'-phosphate
  modified_base 5: mod_base = OTHER; note = 2'-O-methyladenosine-3'-phosphate
  modified_base 6: mod_base = OTHER; note = 2'-fluorocytidine-3'-phosphate
  modified_base 7: mod_base = OTHER; note = 2'-O-methylcytidine-3'-phosphate
  modified_base 8: mod_base = OTHER; note = 2'-O-methyladenosine-3'-phosphate
  modified_base 9: mod_base = OTHER; note = 2'-O-methyladenosine-3'-phosphate
  modified_base 10: mod_base = OTHER; note = 2'-O-methylguanosine-3'-phosphate
  modified_base 11: mod_base = OTHER; note = 2'-O-methylcytidine-3'-phosphate
  modified_base 12: mod_base = OTHER; note = 2'-O-methylcytidine-3'-phosphate
  modified_base 13: mod_base = OTHER; note = 2'-O-methyluridine-3'-phosphate
  modified_base 14: mod_base = OTHER; note = 2'-fluoroadenosine-3'-phosphate
  modified_base 15: mod_base = OTHER; note = 2'-O-methylguanosine-3'-phosphate
  modified_base 16: mod_base = OTHER; note = 2'-fluoroadenosine-3'-phosphate
  modified_base 17: mod_base = OTHER; note = 2'-O-methylguanosine-3'-phosphate
  modified_base 18: mod_base = OTHER; note = 2'-O-methyladenosine-3'-phosphate
  modified_base 19: mod_base = OTHER; note = 2'-O-methylcytidine-3'-phosphate
  modified_base 20: mod_base = OTHER; note = 2'-O-methyladenosine-3'-phosphate
  modified_base 21: mod_base = OTHER; note = 2'-O-methyluridine-3'-phosphorothioate
  modified_base 22: mod_base = OTHER; note = 2'-O-methyladenosine-3'-phosphorothioate
  modified_base 23: mod_base = OTHER; note = 2'-O-methyladenosine
aagaaccaagcctagagacataa

SEQ ID NO: 1101 - RNA, 23 nt, synthetic construct
  source 1..23: mol_type = other RNA
  modified_base 1: mod_base = OTHER; note = 2'-O-methyluridine-3'-phosphorothioate
  modified_base 2: mod_base = OTHER; note = 2'-fluoroadenosine-3'-phosphorothioate
  modified_base 3: mod_base = OTHER; note = 2'-O-methyluridine-3'-phosphate
  modified_base 4: mod_base = OTHER; note = 2'-O-methylguanosine-3'-phosphate
  modified_base 5: mod_base = OTHER; note = 2'-O-methyladenosine-3'-phosphate
  modified_base 6: mod_base = OTHER; note = 2'-fluoroadenosine-3'-phosphate
  modified_base 7: mod_base = OTHER; note = 2'-O-methylcytidine-3'-phosphate
  modified_base 8: mod_base = OTHER; note = 2'-O-methyladenosine-3'-phosphate
  modified_base 9: mod_base = OTHER; note = 2'-O-methyladenosine-3'-phosphate
  modified_base 10: mod_base = OTHER; note = 2'-O-methylguanosine-3'-phosphate
  modified_base 11: mod_base = OTHER; note = 2'-O-methyladenosine-3'-phosphate
  modified_base 12: mod_base = OTHER; note = 2'-O-methyladenosine-3'-phosphate
  modified_base 13: mod_base = OTHER; note = 2'-O-methylcytidine-3'-phosphate
  modified_base 14: mod_base = OTHER; note = 2'-fluorocytidine-3'-phosphate
  modified_base 15: mod_base = OTHER; note = 2'-O-methyladenosine-3'-phosphate
  modified_base 16: mod_base = OTHER; note = 2'-fluoroadenosine-3'-phosphate
  modified_base 17: mod_base = OTHER; note = 2'-O-methylguanosine-3'-phosphate
  modified_base 18: mod_base = OTHER; note = 2'-O-methylcytidine-3'-phosphate
  modified_base 19: mod_base = OTHER; note = 2'-O-methylcytidine-3'-phosphate
  modified_base 20: mod_base = OTHER; note = 2'-O-methyluridine-3'-phosphate
  modified_base 21: mod_base = OTHER; note = 2'-O-methyladenosine-3'-phosphorothioate
  modified_base 22: mod_base = OTHER; note = 2'-O-methylguanosine-3'-phosphorothioate
  modified_base 23: mod_base = OTHER; note = 2'-O-methyladenosine
tatgaacaagaaccaagcctaga

SEQ ID NO: 1102 - RNA, 23 nt, synthetic construct
  source 1..23: mol_type = other RNA
  modified_base 1: mod_base = OTHER; note = 2'-O-methyluridine-3'-phosphorothioate
  modified_base 2: mod_base = OTHER; note = 2'-fluoroguanosine-3'-phosphorothioate
  modified_base 3: mod_base = OTHER; note = 2'-O-methyladenosine-3'-phosphate
  modified_base 4: mod_base = OTHER; note = 2'-O-methylcytidine-3'-phosphate
  modified_base 5: mod_base = OTHER; note = 2'-O-methyluridine-3'-phosphate
  modified_base 6: mod_base = OTHER; note = 2'-fluoroguanosine-3'-phosphate
  modified_base 7: mod_base = OTHER; note = 2'-O-methyluridine-3'-phosphate
  modified_base 8: mod_base = OTHER; note = 2'-O-methylguanosine-3'-phosphate
  modified_base 9: mod_base = OTHER; note = 2'-O-methyladenosine-3'-phosphate
  modified_base 10: mod_base = OTHER; note = 2'-O-methylguanosine-3'-phosphate
  modified_base 11: mod_base = OTHER; note = 2'-O-methylcytidine-3'-phosphate
  modified_base 12: mod_base = OTHER; note = 2'-O-methyladenosine-3'-phosphate
  modified_base 13: mod_base = OTHER; note = 2'-O-methyluridine-3'-phosphate
  modified_base 14: mod_base = OTHER; note = 2'-fluoroguanosine-3'-phosphate
  modified_base 15: mod_base = OTHER; note = 2'-O-methyladenosine-3'-phosphate
  modified_base 16: mod_base = OTHER; note = 2'-fluoroadenosine-3'-phosphate
  modified_base 17: mod_base = OTHER; note = 2'-O-methylcytidine-3'-phosphate
  modified_base 18: mod_base = OTHER; note = 2'-O-methyladenosine-3'-phosphate
  modified_base 19: mod_base = OTHER; note = 2'-O-methyladenosine-3'-phosphate
  modified_base 20: mod_base = OTHER; note = 2'-O-methylguanosine-3'-phosphate
  modified_base 21: mod_base = OTHER; note = 2'-O-methyladenosine-3'-phosphorothioate
  modified_base 22: mod_base = OTHER; note = 2'-O-methyladenosine-3'-phosphorothioate
  modified_base 23: mod_base = OTHER; note = 2'-O-methylcytidine
tgactgtgagcatgaacaagaac

SEQ ID NO: 1103 - RNA, 23 nt, synthetic construct
  source 1..23: mol_type = other RNA
  modified_base 1: mod_base = OTHER; note = 2'-O-methyluridine-3'-phosphorothioate
  modified_base 2: mod_base = OTHER; note = 2'-fluorouridine-3'-phosphorothioate
  modified_base 3: mod_base = OTHER; note = 2'-O-methyladenosine-3'-phosphate
  modified_base 4: mod_base = OTHER; note = 2'-O-methyluridine-3'-phosphate
  modified_base 5: mod_base = OTHER; note = 2'-O-methylcytidine-3'-phosphate
  modified_base 6: mod_base = OTHER; note = 2'-fluorocytidine-3'-phosphate
  modified_base 7: mod_base = OTHER; note = 2'-O-methyladenosine-3'-phosphate
  modified_base 8: mod_base = OTHER; note = 2'-O-methylguanosine-3'-phosphate
  modified_base 9: mod_base = OTHER; note = 2'-O-methylcytidine-3'-phosphate
  modified_base 10: mod_base = OTHER; note = 2'-O-methylguanosine-3'-phosphate
  modified_base 11: mod_base = OTHER; note = 2'-O-methyladenosine-3'-phosphate
  modified_base 12: mod_base = OTHER; note = 2'-O-methylcytidine-3'-phosphate
  modified_base 13: mod_base = OTHER; note = 2'-O-methyluridine-3'-phosphate
  modified_base 14: mod_base = OTHER; note = 2'-fluoroguanosine-3'-phosphate
  modified_base 15: mod_base = OTHER; note = 2'-O-methyluridine-3'-phosphate
  modified_base 16: mod_base = OTHER; note = 2'-fluoroguanosine-3'-phosphate
  modified_base 17: mod_base = OTHER; note = 2'-O-methyladenosine-3'-phosphate
  modified_base 18: mod_base = OTHER; note = 2'-O-methylguanosine-3'-phosphate
  modified_base 19: mod_base = OTHER; note = 2'-O-methylcytidine-3'-phosphate
  modified_base 20: mod_base = OTHER; note = 2'-O-methyladenosine-3'-phosphate
  modified_base 21: mod_base = OTHER; note = 2'-O-methyluridine-3'-phosphorothioate
  modified_base 22: mod_base = OTHER; note = 2'-O-methylguanosine-3'-phosphorothioate
  modified_base 23: mod_base = OTHER; note = 2'-O-methyladenosine
ttatccagcgactgtgagcatga

SEQ ID NO: 1104 - RNA, 23 nt, synthetic construct
  source 1..23: mol_type = other RNA
  modified_base 1: mod_base = OTHER; note = 2'-O-methyluridine-3'-phosphorothioate
  modified_base 2: mod_base = OTHER; note = 2'-fluorocytidine-3'-phosphorothioate
  modified_base 3: mod_base = OTHER; note = 2'-O-methyluridine-3'-phosphate
  modified_base 4: mod_base = OTHER; note = 2'-O-methyladenosine-3'-phosphate
  modified_base 5: mod_base = OTHER; note = 2'-O-methyluridine-3'-phosphate
  modified_base 6: mod_base = OTHER; note = 2'-fluorocytidine-3'-phosphate
  modified_base 7: mod_base = OTHER; note = 2'-O-methylcytidine-3'-phosphate
  modified_base 8: mod_base = OTHER; note = 2'-O-methyladenosine-3'-phosphate
  modified_base 9: mod_base = OTHER; note = 2'-O-methylguanosine-3'-phosphate
  modified_base 10: mod_base = OTHER; note = 2'-O-methylcytidine-3'-phosphate
  modified_base 11: mod_base = OTHER; note = 2'-O-methylguanosine-3'-phosphate
  modified_base 12: mod_base = OTHER; note = 2'-O-methyladenosine-3'-phosphate
  modified_base 13: mod_base = OTHER; note = 2'-O-methylcytidine-3'-phosphate
  modified_base 14: mod_base = OTHER; note = 2'-fluorouridine-3'-phosphate
  modified_base 15: mod_base = OTHER; note = 2'-O-methylguanosine-3'-phosphate
  modified_base 16: mod_base = OTHER; note = 2'-fluorouridine-3'-phosphate
  modified_base 17: mod_base = OTHER; note = 2'-O-methylguanosine-3'-phosphate
  modified_base 18: mod_base = OTHER; note = 2'-O-methyladenosine-3'-phosphate
  modified_base 19: mod_base = OTHER; note = 2'-O-methylguanosine-3'-phosphate
  modified_base 20: mod_base = OTHER; note = 2'-O-methylcytidine-3'-phosphate
  modified_base 21: mod_base = OTHER; note = 2'-O-methyladenosine-3'-phosphorothioate
  modified_base 22: mod_base = OTHER; note = 2'-O-methyluridine-3'-phosphorothioate
  modified_base 23: mod_base = OTHER; note = 2'-O-methylguanosine
tctatccagcgactgtgagcatg

SEQ ID NO: 1105 - RNA, 23 nt, synthetic construct
  source 1..23: mol_type = other RNA
  modified_base 1: mod_base = OTHER; note = 2'-O-methyladenosine-3'-phosphorothioate
  modified_base 2: mod_base = OTHER; note = 2'-fluorouridine-3'-phosphorothioate
  modified_base 3: mod_base = OTHER; note = 2'-O-methylcytidine-3'-phosphate
  modified_base 4: mod_base = OTHER; note = 2'-O-methyladenosine-3'-phosphate
  modified_base 5: mod_base = OTHER; note = 2'-O-methylguanosine-3'-phosphate
  modified_base 6: mod_base = OTHER; note = 2'-fluorocytidine-3'-phosphate
  modified_base 7: mod_base = OTHER; note = 2'-O-methyluridine-3'-phosphate
  modified_base 8: mod_base = OTHER; note = 2'-O-methyladenosine-3'-phosphate
  modified_base 9: mod_base = OTHER; note = 2'-O-methyluridine-3'-phosphate
  modified_base 10: mod_base = OTHER; note = 2'-O-methylcytidine-3'-phosphate
  modified_base 11: mod_base = OTHER; note = 2'-O-methylcytidine-3'-phosphate
  modified_base 12: mod_base = OTHER; note = 2'-O-methyladenosine-3'-phosphate
  modified_base 13: mod_base = OTHER; note = 2'-O-methylguanosine-3'-phosphate
  modified_base 14: mod_base = OTHER; note = 2'-fluorocytidine-3'-phosphate
  modified_base 15: mod_base = OTHER; note = 2'-O-methylguanosine-3'-phosphate
  modified_base 16: mod_base = OTHER; note = 2'-fluoroadenosine-3'-phosphate
  modified_base 17: mod_base = OTHER; note = 2'-O-methylcytidine-3'-phosphate
  modified_base 18: mod_base = OTHER; note = 2'-O-methyluridine-3'-phosphate
  modified_base 19: mod_base = OTHER; note = 2'-O-methylguanosine-3'-phosphate
  modified_base 20: mod_base = OTHER; note = 2'-O-methyluridine-3'-phosphate
  modified_base 21: mod_base = OTHER; note = 2'-O-methylguanosine-3'-phosphorothioate
  modified_base 22: mod_base = OTHER; note = 2'-O-methyladenosine-3'-phosphorothioate
  modified_base 23: mod_base = OTHER; note = 2'-O-methylguanosine
atcagctatccagcgactgtgag

SEQ ID NO: 1106 - RNA, 23 nt, synthetic construct
  source 1..23: mol_type = other RNA
  modified_base 1: mod_base = OTHER; note = 2'-O-methyladenosine-3'-phosphorothioate
  modified_base 2: mod_base = OTHER; note = 2'-fluoroguanosine-3'-phosphorothioate
  modified_base 3: mod_base = OTHER; note = 2'-O-methylguanosine-3'-phosphate
  modified_base 4: mod_base = OTHER; note = 2'-O-methyladenosine-3'-phosphate
  modified_base 5: mod_base = OTHER; note = 2'-O-methyluridine-3'-phosphate
  modified_base 6: mod_base = OTHER; note = 2'-fluorocytidine-3'-phosphate
  modified_base 7: mod_base = OTHER; note = 2'-O-methyladenosine-3'-phosphate
  modified_base 8: mod_base = OTHER; note = 2'-O-methylguanosine-3'-phosphate
  modified_base 9: mod_base = OTHER; note = 2'-O-methylcytidine-3'-phosphate
  modified_base 10: mod_base = OTHER; note = 2'-O-methyluridine-3'-phosphate
  modified_base 11: mod_base = OTHER; note = 2'-O-methyladenosine-3'-phosphate
  modified_base 12: mod_base = OTHER; note = 2'-O-methyluridine-3'-phosphate
  modified_base 13: mod_base = OTHER; note = 2'-O-methylcytidine-3'-phosphate
  modified_base 14: mod_base = OTHER; note = 2'-fluorocytidine-3'-phosphate
  modified_base 15: mod_base = OTHER; note = 2'-O-methyladenosine-3'-phosphate
  modified_base 16: mod_base = OTHER; note = 2'-fluoroguanosine-3'-phosphate
  modified_base 17: mod_base = OTHER; note = 2'-O-methylcytidine-3'-phosphate
  modified_base 18: mod_base = OTHER; note = 2'-O-methylguanosine-3'-phosphate
  modified_base 19: mod_base = OTHER; note = 2'-O-methyladenosine-3'-phosphate
  modified_base 20: mod_base = OTHER; note = 2'-O-methylcytidine-3'-phosphate
  modified_base 21: mod_base = OTHER; note = 2'-O-methyluridine-3'-phosphorothioate
  modified_base 22: mod_base = OTHER; note = 2'-O-methylguanosine-3'-phosphorothioate
  modified_base 23: mod_base = OTHER; note = 2'-O-methyluridine
aggatcagctatccagcgactgt

SEQ ID NO: 1107 - RNA, 23 nt, synthetic construct
  source 1..23: mol_type = other RNA
  modified_base 1: mod_base = OTHER; note = 2'-O-methyluridine-3'-phosphorothioate
  modified_base 2: mod_base = OTHER; note = 2'-fluorouridine-3'-phosphorothioate
  modified_base 3: mod_base = OTHER; note = 2'-O-methylguanosine-3'-phosphate
  modified_base 4: mod_base = OTHER; note = 2'-O-methyluridine-3'-phosphate
  modified_base 5: mod_base = OTHER; note = 2'-O-methyladenosine-3'-phosphate
  modified_base 6: mod_base = OTHER; note = 2'-fluorocytidine-3'-phosphate
  modified_base 7: mod_base = OTHER; note = 2'-O-methyluridine-3'-phosphate
  modified_base 8: mod_base = OTHER; note = 2'-O-methylguanosine-3'-phosphate
  modified_base 9: mod_base = OTHER; note = 2'-O-methyluridine-3'-phosphate
  modified_base 10: mod_base = OTHER; note = 2'-O-methyluridine-3'-phosphate
  modified_base 11: mod_base = OTHER; note = 2'-O-methyluridine-3'-phosphate
  modified_base 12: mod_base = OTHER; note = 2'-O-methyluridine-3'-phosphate
  modified_base 13: mod_base = OTHER; note = 2'-O-methylguanosine-3'-phosphate
  modified_base 14: mod_base = OTHER; note = 2'-fluoroadenosine-3'-phosphate
  modified_base 15: mod_base = OTHER; note = 2'-O-methylguanosine-3'-phosphate
  modified_base 16: mod_base = OTHER; note = 2'-fluoroguanosine-3'-phosphate
  modified_base 17: mod_base = OTHER; note = 2'-O-methyladenosine-3'-phosphate
  modified_base 18: mod_base = OTHER; note = 2'-O-methylguanosine-3'-phosphate
  modified_base 19: mod_base = OTHER; note = 2'-O-methyladenosine-3'-phosphate
  modified_base 20: mod_base = OTHER; note = 2'-O-methyladenosine-3'-phosphate
  modified_base 21: mod_base = OTHER; note = 2'-O-methylguanosine-3'-phosphorothioate
  modified_base 22: mod_base = OTHER; note = 2'-O-methylguanosine-3'-phosphorothioate
  modified_base 23: mod_base = OTHER; note = 2'-O-methyladenosine
ttgtactgttttgaggagaagga

SEQ ID NO: 1108 - RNA, 23 nt, synthetic construct
  source 1..23: mol_type = other RNA
  modified_base 1: mod_base = OTHER; note = 2'-O-methyluridine-3'-phosphorothioate
  modified_base 2: mod_base = OTHER; note = 2'-fluorouridine-3'-phosphorothioate
  modified_base 3: mod_base = OTHER; note = 2'-O-methylguanosine-3'-phosphate
  modified_base 4: mod_base = OTHER; note = 2'-O-methylcytidine-3'-phosphate
  modified_base 5: mod_base = OTHER; note = 2'-O-methyluridine-3'-phosphate
  modified_base 6: mod_base = OTHER; note = 2'-fluoroguanosine-3'-phosphate
  modified_base 7: mod_base = OTHER; note = 2'-O-methyluridine-3'-phosphate
  modified_base 8: mod_base = OTHER; note = 2'-O-methyladenosine-3'-phosphate
  modified_base 9: mod_base = OTHER; note = 2'-O-methylcytidine-3'-phosphate
  modified_base 10: mod_base = OTHER; note = 2'-O-methyluridine-3'-phosphate
  modified_base 11: mod_base = OTHER; note = 2'-O-methylguanosine-3'-phosphate
  modified_base 12: mod_base = OTHER; note = 2'-O-methyluridine-3'-phosphate
  modified_base 13: mod_base = OTHER; note = 2'-O-methyluridine-3'-phosphate
  modified_base 14: mod_base = OTHER; note = 2'-fluorouridine-3'-phosphate
  modified_base 15: mod_base = OTHER; note = 2'-O-methyluridine-3'-phosphate
  modified_base 16: mod_base = OTHER; note = 2'-fluoroguanosine-3'-phosphate
  modified_base 17: mod_base = OTHER; note = 2'-O-methyladenosine-3'-phosphate
  modified_base 18: mod_base = OTHER; note = 2'-O-methylguanosine-3'-phosphate
  modified_base 19: mod_base = OTHER; note = 2'-O-methylguanosine-3'-phosphate
  modified_base 20: mod_base = OTHER; note = 2'-O-methyladenosine-3'-phosphate
  modified_base 21: mod_base = OTHER; note = 2'-O-methylguanosine-3'-phosphorothioate
  modified_base 22: mod_base = OTHER; note = 2'-O-methyladenosine-3'-phosphorothioate
  modified_base 23: mod_base = OTHER; note = 2'-O-methyladenosine
ttgctgtactgttttgaggagaa

SEQ ID NO: 1109 - RNA, 23 nt, synthetic construct
  source 1..23: mol_type = other RNA
  modified_base 1: mod_base = OTHER; note = 2'-O-methyluridine-3'-phosphorothioate
  modified_base 2: mod_base = OTHER; note = 2'-fluoroadenosine-3'-phosphorothioate
  modified_base 3: mod_base = OTHER; note = 2'-O-methylguanosine-3'-phosphate
  modified_base 4: mod_base = OTHER; note = 2'-O-methyladenosine-3'-phosphate
  modified_base 5: mod_base = OTHER; note = 2'-O-methyladenosine-3'-phosphate
  modified_base 6: mod_base = OTHER; note = 2'-fluoroguanosine-3'-phosphate
  modified_base 7: mod_base = OTHER; note = 2'-O-methyluridine-3'-phosphate
  modified_base 8: mod_base = OTHER; note = 2'-O-methyladenosine-3'-phosphate
  modified_base 9: mod_base = OTHER; note = 2'-O-methyluridine-3'-phosphate
  modified_base 10: mod_base = OTHER; note = 2'-O-methylcytidine-3'-phosphate
  modified_base 11: mod_base = OTHER; note = 2'-O-methyluridine-3'-phosphate
  modified_base 12: mod_base = OTHER; note = 2'-O-methylguanosine-3'-phosphate
  modified_base 13: mod_base = OTHER; note = 2'-O-methylcytidine-3'-phosphate
  modified_base 14: mod_base = OTHER; note = 2'-fluorouridine-3'-phosphate
  modified_base 15: mod_base = OTHER; note = 2'-O-methylguanosine-3'-phosphate
  modified_base 16: mod_base = OTHER; note = 2'-fluorouridine-3'-phosphate
  modified_base 17: mod_base = OTHER; note = 2'-O-methyladenosine-3'-phosphate
  modified_base 18: mod_base = OTHER; note = 2'-O-methylcytidine-3'-phosphate
  modified_base 19: mod_base = OTHER; note = 2'-O-methyluridine-3'-phosphate
  modified_base 20: mod_base = OTHER; note = 2'-O-methylguanosine-3'-phosphate
  modified_base 21: mod_base = OTHER; note = 2'-O-methyluridine-3'-phosphorothioate
  modified_base 22: mod_base = OTHER; note = 2'-O-methyluridine-3'-phosphorothioate
  modified_base 23: mod_base = OTHER; note = 2'-O-methyluridine
tagaagtatctgctgtactgttt

SEQ ID NO: 1110 - RNA, 23 nt, synthetic construct
  source 1..23: mol_type = other RNA
  modified_base 1: mod_base = OTHER; note = 2'-O-methyluridine-3'-phosphorothioate
  modified_base 2: mod_base = OTHER; note = 2'-fluorouridine-3'-phosphorothioate
  modified_base 3: mod_base = OTHER; note = 2'-O-methyladenosine-3'-phosphate
  modified_base 4: mod_base = OTHER; note = 2'-O-methylguanosine-3'-phosphate
  modified_base 5: mod_base = OTHER; note = 2'-O-methyladenosine-3'-phosphate
  modified_base 6: mod_base = OTHER; note = 2'-fluoroadenosine-3'-phosphate
  modified_base 7: mod_base = OTHER; note = 2'-O-methylguanosine-3'-phosphate
  modified_base 8: mod_base = OTHER; note = 2'-O-methyluridine-3'-phosphate
  modified_base 9: mod_base = OTHER; note = 2'-O-methyladenosine-3'-phosphate
  modified_base 10: mod_base = OTHER; note = 2'-O-methyluridine-3'-phosphate
  modified_base 11: mod_base = OTHER; note = 2'-O-methylcytidine-3'-phosphate
  modified_base 12: mod_base = OTHER; note = 2'-O-methyluridine-3'-phosphate
  modified_base 13: mod_base = OTHER; note = 2'-O-methylguanosine-3'-phosphate
  modified_base 14: mod_base = OTHER; note = 2'-fluorocytidine-3'-phosphate
  modified_base 15: mod_base = OTHER; note = 2'-O-methyluridine-3'-phosphate
  modified_base 16: mod_base = OTHER; note = 2'-fluoroguanosine-3'-phosphate
  modified_base 17: mod_base = OTHER; note = 2'-O-methyluridine-3'-phosphate
  modified_base 18: mod_base = OTHER; note = 2'-O-methyladenosine-3'-phosphate
  modified_base 19: mod_base = OTHER; note = 2'-O-methylcytidine-3'-phosphate
  modified_base 20: mod_base = OTHER; note = 2'-O-methyluridine-3'-phosphate
  modified_base 21: mod_base = OTHER; note = 2'-O-methylguanosine-3'-phosphorothioate
  modified_base 22: mod_base = OTHER; note = 2'-O-methyluridine-3'-phosphorothioate
  modified_base 23: mod_base = OTHER; note = 2'-O-methyluridine
ttagaagtatctgctgtactgtt

SEQ ID NO: 1111 - RNA, 23 nt, synthetic construct
  source 1..23: mol_type = other RNA
  modified_base 1: mod_base = OTHER; note = 2'-O-methyluridine-3'-phosphorothioate
  modified_base 2: mod_base = OTHER; note = 2'-fluorouridine-3'-phosphorothioate
  modified_base 3: mod_base = OTHER; note = 2'-O-methyluridine-3'-phosphate
  modified_base 4: mod_base = OTHER; note = 2'-O-methyladenosine-3'-phosphate
  modified_base 5: mod_base = OTHER; note = 2'-O-methylguanosine-3'-phosphate
  modified_base 6: mod_base = OTHER; note = 2'-fluoroadenosine-3'-phosphate
  modified_base 7: mod_base = OTHER; note = 2'-O-methyladenosine-3'-phosphate
  modified_base 8: mod_base = OTHER; note = 2'-O-methylguanosine-3'-phosphate
  modified_base 9: mod_base = OTHER; note = 2'-O-methyluridine-3'-phosphate
  modified_base 10: mod_base = OTHER; note = 2'-O-methyladenosine-3'-phosphate
  modified_base 11: mod_base = OTHER; note = 2'-O-methyluridine-3'-phosphate
  modified_base 12: mod_base = OTHER; note = 2'-O-methylcytidine-3'-phosphate
  modified_base 13: mod_base = OTHER; note = 2'-O-methyluridine-3'-phosphate
  modified_base 14: mod_base = OTHER; note = 2'-fluoroguanosine-3'-phosphate
  modified_base 15: mod_base = OTHER; note = 2'-O-methylcytidine-3'-phosphate
  modified_base 16: mod_base = OTHER; note = 2'-fluorouridine-3'-phosphate
  modified_base 17: mod_base = OTHER; note = 2'-O-methylguanosine-3'-phosphate
  modified_base 18: mod_base = OTHER; note = 2'-O-methyluridine-3'-phosphate
  modified_base 19: mod_base = OTHER; note = 2'-O-methyladenosine-3'-phosphate
  modified_base 20: mod_base = OTHER; note = 2'-O-methylcytidine-3'-phosphate
  modified_base 21: mod_base = OTHER; note = 2'-O-methyluridine-3'-phosphorothioate
  modified_base 22: mod_base = OTHER; note = 2'-O-methylguanosine-3'-phosphorothioate
  modified_base 23: mod_base = OTHER; note = 2'-O-methyluridine
tttagaagtatctgctgtactgt

SEQ ID NO: 1112 - RNA, 23 nt, synthetic construct
  source 1..23: mol_type = other RNA
  modified_base 1: mod_base = OTHER; note = 2'-O-methyladenosine-3'-phosphorothioate
  modified_base 2: mod_base = OTHER; note = 2'-fluoroadenosine-3'-phosphorothioate
  modified_base 3: mod_base = OTHER; note = 2'-O-methyladenosine-3'-phosphate
  modified_base 4: mod_base = OTHER; note = 2'-O-methylcytidine-3'-phosphate
  modified_base 5: mod_base = OTHER; note = 2'-O-methylcytidine-3'-phosphate
  modified_base 6: mod_base = OTHER; note = 2'-fluorouridine-3'-phosphate
  modified_base 7: mod_base = OTHER; note = 2'-O-methyluridine-3'-phosphate
  modified_base 8: mod_base = OTHER; note = 2'-O-methyladenosine-3'-phosphate
  modified_base 9: mod_base = OTHER; note = 2'-O-methylguanosine-3'-phosphate
  modified_base 10: mod_base = OTHER; note = 2'-O-methyladenosine-3'-phosphate
  modified_base 11: mod_base = OTHER; note = 2'-O-methyladenosine-3'-phosphate
  modified_base 12: mod_base = OTHER; note = 2'-O-methylguanosine-3'-phosphate
  modified_base 13: mod_base = OTHER; note = 2'-O-methyluridine-3'-phosphate
  modified_base 14: mod_base = OTHER; note = 2'-fluoroadenosine-3'-phosphate
  modified_base 15: mod_base = OTHER; note = 2'-O-methyluridine-3'-phosphate
  modified_base 16: mod_base = OTHER; note = 2'-fluorocytidine-3'-phosphate
  modified_base 17: mod_base = OTHER; note = 2'-O-methyluridine-3'-phosphate
  modified_base 18: mod_base = OTHER; note = 2'-O-methylguanosine-3'-phosphate
  modified_base 19: mod_base = OTHER; note = 2'-O-methylcytidine-3'-phosphate
  modified_base 20: mod_base = OTHER; note = 2'-O-methyluridine-3'-phosphate
  modified_base 21: mod_base = OTHER; note = 2'-O-methylguanosine-3'-phosphorothioate
  modified_base 22: mod_base = OTHER; note = 2'-O-methyluridine-3'-phosphorothioate
  modified_base 23: mod_base = OTHER; note = 2'-O-methyladenosine
aaaccttagaagtatctgctgta

SEQ ID NO: 1113 - RNA, 23 nt, synthetic construct
  source 1..23: mol_type = other RNA
  modified_base 1: mod_base = OTHER; note = 2'-O-methyluridine-3'-phosphorothioate
  modified_base 2: mod_base = OTHER; note = 2'-fluorouridine-3'-phosphorothioate
  modified_base 3: mod_base = OTHER; note = 2'-O-methyladenosine-3'-phosphate
  modified_base 4: mod_base = OTHER; note = 2'-O-methylguanosine-3'-phosphate
  modified_base 5: mod_base = OTHER; note = 2'-O-methylguanosine-3'-phosphate
  modified_base 6: mod_base = OTHER; note = 2'-fluoroguanosine-3'-phosphate
  modified_base 7: mod_base = OTHER; note = 2'-O-methyluridine-3'-phosphate
  modified_base 8: mod_base = OTHER; note = 2'-O-methyladenosine-3'-phosphate
  modified_base 9: mod_base = OTHER; note = 2'-O-methyladenosine-3'-phosphate
  modified_base 10: mod_base = OTHER; note = 2'-O-methyluridine-3'-phosphate
  modified_base 11: mod_base = OTHER; note = 2'-O-methyladenosine-3'-phosphate
  modified_base 12: mod_base = OTHER; note = 2'-O-methyladenosine-3'-phosphate
  modified_base 13: mod_base = OTHER; note = 2'-O-methylcytidine-3'-phosphate
  modified_base 14: mod_base = OTHER; note = 2'-fluorouridine-3'-phosphate
  modified_base 15: mod_base = OTHER; note = 2'-O-methyluridine-3'-phosphate
  modified_base 16: mod_base = OTHER; note = 2'-fluoroguanosine-3'-phosphate
  modified_base 17: mod_base = OTHER; note = 2'-O-methyluridine-3'-phosphate
  modified_base 18: mod_base = OTHER; note = 2'-O-methyluridine-3'-phosphate
  modified_base 19: mod_base = OTHER; note = 2'-O-methylcytidine-3'-phosphate
  modified_base 20: mod_base = OTHER; note = 2'-O-methyladenosine-3'-phosphate
  modified_base 21: mod_base = OTHER; note = 2'-O-methyladenosine-3'-phosphorothioate
  modified_base 22: mod_base = OTHER; note = 2'-O-methyluridine-3'-phosphorothioate
  modified_base 23: mod_base = OTHER; note = 2'-O-methyladenosine
ttagggtaataacttgttcaata

SEQ ID NO: 1114 - RNA, 23 nt, synthetic construct
  source 1..23: mol_type = other RNA
  modified_base 1: mod_base = OTHER; note = 2'-O-methyladenosine-3'-phosphorothioate
  modified_base 2: mod_base = OTHER; note = 2'-fluorocytidine-3'-phosphorothioate
  modified_base 3: mod_base = OTHER; note = 2'-O-methyluridine-3'-phosphate
  modified_base 4: mod_base = OTHER; note = 2'-O-methyluridine-3'-phosphate
  modified_base 5: mod_base = OTHER; note = 2'-O-methyladenosine-3'-phosphate
  modified_base 6: mod_base = OTHER; note = 2'-fluoroguanosine-3'-phosphate
  modified_base 7: mod_base = OTHER; note = 2'-O-methylguanosine-3'-phosphate
  modified_base 8: mod_base = OTHER; note = 2'-O-methylguanosine-3'-phosphate
  modified_base 9: mod_base = OTHER; note = 2'-O-methyluridine-3'-phosphate
  modified_base 10: mod_base = OTHER; note = 2'-O-methyladenosine-3'-phosphate
  modified_base 11: mod_base = OTHER; note = 2'-O-methyladenosine-3'-phosphate
  modified_base 12: mod_base = OTHER; note = 2'-O-methyluridine-3'-phosphate
  modified_base 13: mod_base = OTHER; note = 2'-O-methyladenosine-3'-phosphate
  modified_base 14: mod_base = OTHER; note = 2'-fluoroadenosine-3'-phosphate
  modified_base 15: mod_base = OTHER; note = 2'-O-methylcytidine-3'-phosphate
  modified_base 16: mod_base = OTHER; note = 2'-fluorouridine-3'-phosphate
  modified_base 17: mod_base = OTHER; note = 2'-O-methyluridine-3'-phosphate
  modified_base 18: mod_base = OTHER; note = 2'-O-methylguanosine-3'-phosphate
  modified_base 19: mod_base = OTHER; note = 2'-O-methyluridine-3'-phosphate
  modified_base 20: mod_base = OTHER; note = 2'-O-methyluridine-3'-phosphate
  modified_base 21: mod_base = OTHER; note = 2'-O-methylcytidine-3'-phosphorothioate
  modified_base 22: mod_base = OTHER; note = 2'-O-methyladenosine-3'-phosphorothioate
  modified_base 23: mod_base = OTHER; note = 2'-O-methyladenosine
acttagggtaataacttgttcaa

SEQ ID NO: 1115 - RNA, 23 nt, synthetic construct
  source 1..23: mol_type = other RNA
  modified_base 1: mod_base = OTHER; note = 2'-O-methyladenosine-3'-phosphorothioate
  modified_base 2: mod_base = OTHER; note = 2'-fluoroadenosine-3'-phosphorothioate
  modified_base 3: mod_base = OTHER; note = 2'-O-methyladenosine-3'-phosphate
  modified_base 4: mod_base = OTHER; note = 2'-O-methylcytidine-3'-phosphate
  modified_base 5: mod_base = OTHER; note = 2'-O-methyluridine-3'-phosphate
  modified_base 6: mod_base = OTHER; note = 2'-fluorouridine-3'-phosphate
  modified_base 7: mod_base = OTHER; note = 2'-O-methyladenosine-3'-phosphate
  modified_base 8: mod_base = OTHER; note = 2'-O-methylguanosine-3'-phosphate
  modified_base 9: mod_base = OTHER; note = 2'-O-methylguanosine-3'-phosphate
  modified_base 10: mod_base = OTHER; note = 2'-O-methylguanosine-3'-phosphate
  modified_base 11: mod_base = OTHER; note = 2'-O-methyluridine-3'-phosphate
  modified_base 12: mod_base = OTHER; note = 2'-O-methyladenosine-3'-phosphate
  modified_base 13: mod_base = OTHER; note = 2'-O-methyladenosine-3'-phosphate
  modified_base 14: mod_base = OTHER; note = 2'-fluorouridine-3'-phosphate
  modified_base 15: mod_base = OTHER; note = 2'-O-methyladenosine-3'-phosphate
  modified_base 16: mod_base = OTHER; note = 2'-fluoroadenosine-3'-phosphate
  modified_base 17: mod_base = OTHER; note = 2'-O-methylcytidine-3'-phosphate
  modified_base 18: mod_base = OTHER; note = 2'-O-methyluridine-3'-phosphate
  modified_base 19: mod_base = OTHER; note = 2'-O-methyluridine-3'-phosphate
  modified_base 20: mod_base = OTHER; note = 2'-O-methylguanosine-3'-phosphate
  modified_base 21: mod_base = OTHER; note = 2'-O-methyluridine-3'-phosphorothioate
  modified_base 22: mod_base = OTHER; note = 2'-O-methyluridine-3'-phosphorothioate
  modified_base 23: mod_base = OTHER; note = 2'-O-methylcytidine
aaacttagggtaataacttgttc

SEQ ID NO: 1116 - RNA, 23 nt, synthetic construct
  source 1..23: mol_type = other RNA
  modified_base 1: mod_base = OTHER; note = 2'-O-methyluridine-3'-phosphorothioate
  modified_base 2: mod_base = OTHER; note = 2'-fluoroadenosine-3'-phosphorothioate
  modified_base 3: mod_base = OTHER; note = 2'-O-methyladenosine-3'-phosphate
  modified_base 4: mod_base = OTHER; note = 2'-O-methyladenosine-3'-phosphate
  modified_base 5: mod_base = OTHER; note = 2'-O-methylcytidine-3'-phosphate
  modified_base 6: mod_base = OTHER; note = 2'-fluorouridine-3'-phosphate
  modified_base 7: mod_base = OTHER; note = 2'-O-methyluridine-3'-phosphate
  modified_base 8: mod_base = OTHER; note = 2'-O-methyladenosine-3'-phosphate
  modified_base 9: mod_base = OTHER; note = 2'-O-methylguanosine-3'-phosphate
  modified_base 10: mod_base = OTHER; note = 2'-O-methylguanosine-3'-phosphate
  modified_base 11: mod_base = OTHER; note = 2'-O-methylguanosine-3'-phosphate
  modified_base 12: mod_base = OTHER; note = 2'-O-methyluridine-3'-phosphate
  modified_base 13: mod_base = OTHER; note = 2'-O-methyladenosine-3'-phosphate
  modified_base 14: mod_base = OTHER; note = 2'-fluoroadenosine-3'-phosphate
  modified_base 15: mod_base = OTHER; note = 2'-O-methyluridine-3'-phosphate
  modified_base 16: mod_base = OTHER; note = 2'-fluoroadenosine-3'-phosphate
  modified_base 17: mod_base = OTHER; note = 2'-O-methyladenosine-3'-phosphate
  modified_base 18: mod_base = OTHER; note = 2'-O-methylcytidine-3'-phosphate
  modified_base 19: mod_base = OTHER; note = 2'-O-methyluridine-3'-phosphate
  modified_base 20: mod_base = OTHER; note = 2'-O-methyluridine-3'-phosphate
  modified_base 21: mod_base = OTHER; note = 2'-O-methylguanosine-3'-phosphorothioate
  modified_base 22: mod_base = OTHER; note = 2'-O-methyluridine-3'-phosphorothioate
  modified_base 23: mod_base = OTHER; note = 2'-O-methyluridine
taaacttagggtaataacttgtt

SEQ ID NO: 1117 - RNA, 23 nt, synthetic construct
  source 1..23: mol_type = other RNA
  modified_base 1: mod_base = OTHER; note = 2'-O-methyluridine-3'-phosphorothioate
  modified_base 2: mod_base = OTHER; note = 2'-fluorocytidine-3'-phosphorothioate
  modified_base 3: mod_base = OTHER; note = 2'-O-methyluridine-3'-phosphate
  modified_base 4: mod_base = OTHER; note = 2'-O-methyladenosine-3'-phosphate
  modified_base 5: mod_base = OTHER; note = 2'-O-methyladenosine-3'-phosphate
  modified_base 6: mod_base = OTHER; note = 2'-fluoroadenosine-3'-phosphate
  modified_base 7: mod_base = OTHER; note = 2'-O-methylcytidine-3'-phosphate
  modified_base 8: mod_base = OTHER; note = 2'-O-methyluridine-3'-phosphate
  modified_base 9: mod_base = OTHER; note = 2'-O-methyluridine-3'-phosphate
  modified_base 10: mod_base = OTHER; note = 2'-O-methyladenosine-3'-phosphate
  modified_base 11: mod_base = OTHER; note = 2'-O-methylguanosine-3'-phosphate
  modified_base 12: mod_base = OTHER; note = 2'-O-methylguanosine-3'-phosphate
  modified_base 13: mod_base = OTHER; note = 2'-O-methylguanosine-3'-phosphate
  modified_base 14: mod_base = OTHER; note = 2'-fluorouridine-3'-phosphate
  modified_base 15: mod_base = OTHER; note = 2'-O-methyladenosine-3'-phosphate
  modified_base 16: mod_base = OTHER; note = 2'-fluoroadenosine-3'-phosphate
  modified_base 17: mod_base = OTHER; note = 2'-O-methyluridine-3'-phosphate
  modified_base 18: mod_base = OTHER; note = 2'-O-methyladenosine-3'-phosphate
  modified_base 19: mod_base = OTHER; note = 2'-O-methyladenosine-3'-phosphate
  modified_base 20: mod_base = OTHER; note = 2'-O-methylcytidine-3'-phosphate
  modified_base 21: mod_base = OTHER; note = 2'-O-methyluridine-3'-phosphorothioate
  modified_base 22: mod_base = OTHER; note = 2'-O-methyluridine-3'-phosphorothioate
  modified_base 23: mod_base = OTHER; note = 2'-O-methylguanosine
tctaaacttagggtaataacttg

SEQ ID NO: 1118 - RNA, 23 nt, synthetic construct
  source 1..23: mol_type = other RNA
  modified_base 1: mod_base = OTHER; note = 2'-O-methyluridine-3'-phosphorothioate
  modified_base 2: mod_base = OTHER; note = 2'-fluorouridine-3'-phosphorothioate
  modified_base 3: mod_base = OTHER; note = 2'-O-methyladenosine-3'-phosphate
  modified_base 4: mod_base = OTHER; note = 2'-O-methylcytidine-3'-phosphate
  modified_base 5: mod_base = OTHER; note = 2'-O-methyluridine-3'-phosphate
  modified_base 6: mod_base = OTHER; note = 2'-fluorouridine-3'-phosphate
  modified_base 7: mod_base = OTHER; note = 2'-O-methylguanosine-3'-phosphate
  modified_base 8: mod_base = OTHER; note = 2'-O-methyladenosine-3'-phosphate
  modified_base 9: mod_base = OTHER; note = 2'-O-methylcytidine-3'-phosphate
  modified_base 10: mod_base = OTHER; note = 2'-O-methyladenosine-3'-phosphate
  modified_base 11: mod_base = OTHER; note = 2'-O-methylguanosine-3'-phosphate
  modified_base 12: mod_base = OTHER; note = 2'-O-methylcytidine-3'-phosphate
  modified_base 13: mod_base = OTHER; note = 2'-O-methylcytidine-3'-phosphate
  modified_base 14: mod_base = OTHER; note = 2'-fluoroadenosine-3'-phosphate
  modified_base 15: mod_base = OTHER; note = 2'-O-methylguanosine-3'-phosphate
  modified_base 16: mod_base = OTHER; note = 2'-fluoroadenosine-3'-phosphate
  modified_base 17: mod_base = OTHER; note = 2'-O-methyladenosine-3'-phosphate
  modified_base 18: mod_base = OTHER; note = 2'-O-methylguanosine-3'-phosphate
  modified_base 19: mod_base = OTHER; note = 2'-O-methylguanosine-3'-phosphate
  modified_base 20: mod_base = OTHER; note = 2'-O-methyladenosine-3'-phosphate
  modified_base 21: mod_base = OTHER; note = 2'-O-methylguanosine-3'-phosphorothioate
  modified_base 22: mod_base = OTHER; note = 2'-O-methyladenosine-3'-phosphorothioate
  modified_base 23: mod_base = OTHER; note = 2'-O-methylguanosine
ttacttgacagccagaaggagag

SEQ ID NO: 1119 - RNA, 23 nt, synthetic construct
  source 1..23: mol_type = other RNA
  modified_base 1: mod_base = OTHER; note = 2'-O-methyladenosine-3'-phosphorothioate
  modified_base 2: mod_base = OTHER; note = 2'-fluoroguanosine-3'-phosphorothioate
  modified_base 3: mod_base = OTHER; note = 2'-O-methyladenosine-3'-phosphate
  modified_base 4: mod_base = OTHER; note = 2'-O-methyluridine-3'-phosphate
  modified_base 5: mod_base = OTHER; note = 2'-O-methylguanosine-3'-phosphate
  modified_base 6: mod_base = OTHER; note = 2'-fluorouridine-3'-phosphate
  modified_base 7: mod_base = OTHER; note = 2'-O-methylguanosine-3'-phosphate
  modified_base 8: mod_base = OTHER; note = 2'-O-methyladenosine-3'-phosphate
  modified_base 9: mod_base = OTHER; note = 2'-O-methyluridine-3'-phosphate
  modified_base 10: mod_base = OTHER; note = 2'-O-methyladenosine-3'-phosphate
  modified_base 11: mod_base = OTHER; note = 2'-O-methylguanosine-3'-phosphate
  modified_base 12: mod_base = OTHER; note = 2'-O-methylguanosine-3'-phosphate
  modified_base 13: mod_base = OTHER; note = 2'-O-methylguanosine-3'-phosphate
  modified_base 14: mod_base = OTHER; note = 2'-fluorouridine-3'-phosphate
  modified_base 15: mod_base = OTHER; note = 2'-O-methyluridine-3'-phosphate
  modified_base 16: mod_base = OTHER; note = 2'-fluorouridine-3'-phosphate
  modified_base 17: mod_base = OTHER; note = 2'-O-methyluridine-3'-phosphate
  modified_base 18: mod_base = OTHER; note = 2'-O-methyluridine-3'-phosphate
  modified_base 19: mod_base = OTHER; note = 2'-O-methyluridine-3'-phosphate
  modified_base 20: mod_base = OTHER; note = 2'-O-methyladenosine-3'-phosphate
  modified_base 21: mod_base = OTHER; note = 2'-O-methyladenosine-3'-phosphorothioate
  modified_base 22: mod_base = OTHER; note = 2'-O-methyluridine-3'-phosphorothioate
  modified_base 23: mod_base = OTHER; note = 2'-O-methylguanosine
agatgtgatagggttttttaatg

SEQ ID NO: 1120 - RNA, 23 nt, synthetic construct
  source 1..23: mol_type = other RNA
  modified_base 1: mod_base = OTHER; note = 2'-O-methyluridine-3'-phosphorothioate
  modified_base 2: mod_base = OTHER; note = 2'-fluoroadenosine-3'-phosphorothioate
  modified_base 3: mod_base = OTHER; note = 2'-O-methylcytidine-3'-phosphate
  modified_base 4: mod_base = OTHER; note = 2'-O-methyluridine-3'-phosphate
  modified_base 5: mod_base = OTHER; note = 2'-O-methyladenosine-3'-phosphate
  modified_base 6: mod_base = OTHER; note = 2'-fluorocytidine-3'-phosphate
  modified_base 7: mod_base = OTHER; note = 2'-O-methyladenosine-3'-phosphate
  modified_base 8: mod_base = OTHER; note = 2'-O-methylguanosine-3'-phosphate
  modified_base 9: mod_base = OTHER; note = 2'-O-methylguanosine-3'-phosphate
  modified_base 10: mod_base = OTHER; note = 2'-O-methyladenosine-3'-phosphate
  modified_base 11: mod_base = OTHER; note = 2'-O-methylguanosine-3'-phosphate
  modified_base 12: mod_base = OTHER; note = 2'-O-methyladenosine-3'-phosphate
  modified_base 13: mod_base = OTHER; note = 2'-O-methyluridine-3'-phosphate
  modified_base 14: mod_base = OTHER; note = 2'-fluoroguanosine-3'-phosphate
  modified_base 15: mod_base = OTHER; note = 2'-O-methyluridine-3'-phosphate
  modified_base 16: mod_base = OTHER; note = 2'-fluoroguanosine-3'-phosphate
  modified_base 17: mod_base = OTHER; note = 2'-O-methyladenosine-3'-phosphate
  modified_base 18: mod_base = OTHER; note = 2'-O-methyluridine-3'-phosphate
  modified_base 19: mod_base = OTHER; note = 2'-O-methyladenosine-3'-phosphate
  modified_base 20: mod_base = OTHER; note = 2'-O-methylguanosine-3'-phosphate
  modified_base 21: mod_base = OTHER; note = 2'-O-methylguanosine-3'-phosphorothioate
  modified_base 22: mod_base = OTHER; note = 2'-O-methylguanosine-3'-phosphorothioate
  modified_base 23: mod_base = OTHER; note = 2'-O-methyluridine
tactacaggagatgtgatagggt

SEQ ID NO: 1121 - RNA, 23 nt, synthetic construct
  source 1..23: mol_type = other RNA
  modified_base 1: mod_base = OTHER; note = 2'-O-methyluridine-3'-phosphorothioate
  modified_base 2: mod_base = OTHER; note = 2'-fluorouridine-3'-phosphorothioate
  modified_base 3: mod_base = OTHER; note = 2'-O-methylcytidine-3'-phosphate
  modified_base 4: mod_base = OTHER; note = 2'-O-methyladenosine-3'-phosphate
  modified_base 5: mod_base = OTHER; note = 2'-O-methylcytidine-3'-phosphate
  modified_base 6: mod_base = OTHER; note = 2'-fluorouridine-3'-phosphate
  modified_base 7: mod_base = OTHER; note = 2'-O-methyladenosine-3'-phosphate
  modified_base 8: mod_base = OTHER; note = 2'-O-methylcytidine-3'-phosphate
  modified_base 9: mod_base = OTHER; note = 2'-O-methyladenosine-3'-phosphate
  modified_base 10: mod_base = OTHER; note = 2'-O-methylguanosine-3'-phosphate
  modified_base 11: mod_base = OTHER; note = 2'-O-methylguanosine-3'-phosphate
  modified_base 12: mod_base = OTHER; note = 2'-O-methyladenosine-3'-phosphate
  modified_base 13: mod_base = OTHER; note = 2'-O-methylguanosine-3'-phosphate
  modified_base 14: mod_base = OTHER; note = 2'-fluoroadenosine-3'-phosphate
  modified_base 15: mod_base = OTHER; note = 2'-O-methyluridine-3'-phosphate
  modified_base 16: mod_base = OTHER; note = 2'-fluoroguanosine-3'-phosphate
  modified_base 17: mod_base = OTHER; note = 2'-O-methyluridine-3'-phosphate
  modified_base 18: mod_base = OTHER; note = 2'-O-methylguanosine-3'-phosphate
  modified_base 19: mod_base = OTHER; note = 2'-O-methyladenosine-3'-phosphate
  modified_base 20: mod_base = OTHER; note = 2'-O-methyluridine-3'-phosphate
  modified_base 21: mod_base = OTHER; note = 2'-O-methyladenosine-3'-phosphorothioate
  modified_base 22: mod_base = OTHER; note = 2'-O-methylguanosine-3'-phosphorothioate
  modified_base 23: mod_base = OTHER; note = 2'-O-methylguanosine
ttcactacaggagatgtgatagg

SEQ ID NO: 1122 - RNA, 23 nt, synthetic construct
  source 1..23: mol_type = other RNA
  modified_base 1: mod_base = OTHER; note = 2'-O-methyluridine-3'-phosphorothioate
  modified_base 2: mod_base = OTHER; note = 2'-fluoroadenosine-3'-phosphorothioate
  modified_base 3: mod_base = OTHER; note = 2'-O-methylguanosine-3'-phosphate
  modified_base 4: mod_base = OTHER; note = 2'-O-methylguanosine-3'-phosphate
  modified_base 5: mod_base = OTHER; note = 2'-O-methyluridine-3'-phosphate
  modified_base 6: mod_base = OTHER; note = 2'-fluorouridine-3'-phosphate
  modified_base 7: mod_base = OTHER; note = 2'-O-methylcytidine-3'-phosphate
  modified_base 8: mod_base = OTHER; note = 2'-O-methyladenosine-3'-phosphate
  modified_base 9: mod_base = OTHER; note = 2'-O-methylcytidine-3'-phosphate
  modified_base 10: mod_base = OTHER; note = 2'-O-methylguanosine-3'-phosphate
  modified_base 11: mod_base = OTHER; note = 2'-O-methyluridine-3'-phosphate
  modified_base 12: mod_base = OTHER; note = 2'-O-methylcytidine-3'-phosphate
  modified_base 13: mod_base = OTHER; note = 2'-O-methyluridine-3'-phosphate
  modified_base 14: mod_base = OTHER; note = 2'-fluoroadenosine-3'-phosphate
  modified_base 15: mod_base = OTHER; note = 2'-O-methylcytidine-3'-phosphate
  modified_base 16: mod_base = OTHER; note = 2'-fluoroadenosine-3'-phosphate
  modified_base 17: mod_base = OTHER; note = 2'-O-methyladenosine-3'-phosphate
  modified_base 18: mod_base = OTHER; note = 2'-O-methylcytidine-3'-phosphate
  modified_base 19: mod_base = OTHER; note = 2'-O-methyladenosine-3'-phosphate
  modified_base 20: mod_base = OTHER; note = 2'-O-methyladenosine-3'-phosphate
  modified_base 21: mod_base = OTHER; note = 2'-O-methyluridine-3'-phosphorothioate
  modified_base 22: mod_base = OTHER; note = 2'-O-methyluridine-3'-phosphorothioate
  modified_base 23: mod_base = OTHER; note = 2'-O-methylguanosine
taggttcacgtctacaacaattg

SEQ ID NO: 1123 - RNA, 23 nt, synthetic construct
  source 1..23: mol_type = other RNA
  modified_base 1: mod_base = OTHER; note = 2'-O-methyluridine-3'-phosphorothioate
  modified_base 2: mod_base = OTHER; note = 2'-fluorocytidine-3'-phosphorothioate
  modified_base 3: mod_base = OTHER; note = 2'-O-methylguanosine-3'-phosphate
  modified_base 4: mod_base = OTHER; note = 2'-O-methylguanosine-3'-phosphate
  modified_base 5: mod_base = OTHER; note = 2'-O-methyluridine-3'-phosphate
  modified_base 6: mod_base = OTHER; note = 2'-fluorouridine-3'-phosphate
  modified_base 7: mod_base = OTHER; note = 2'-O-methyluridine-3'-phosphate
  modified_base 8: mod_base = OTHER; note = 2'-O-methyladenosine-3'-phosphate
  modified_base 9: mod_base = OTHER; note = 2'-O-methyluridine-3'-phosphate
  modified_base 10: mod_base = OTHER; note = 2'-O-methylcytidine-3'-phosphate
  modified_base 11: mod_base = OTHER; note = 2'-O-methylcytidine-3'-phosphate
  modified_base 12: mod_base = OTHER; note = 2'-O-methylcytidine-3'-phosphate
  modified_base 13: mod_base = OTHER; note = 2'-O-methyluridine-3'-phosphate
  modified_base 14: mod_base = OTHER; note = 2'-fluoroguanosine-3'-phosphate
  modified_base 15: mod_base = OTHER; note = 2'-O-methyluridine-3'-phosphate
  modified_base 16: mod_base = OTHER; note = 2'-fluorocytidine-3'-phosphate
  modified_base 17: mod_base = OTHER; note = 2'-O-methyluridine-3'-phosphate
  modified_base 18: mod_base = OTHER; note = 2'-O-methylcytidine-3'-phosphate
  modified_base 19: mod_base = OTHER; note = 2'-O-methyluridine-3'-phosphate
  modified_base 20: mod_base = OTHER; note = 2'-O-methyluridine-3'-phosphate
  modified_base 21: mod_base = OTHER; note = 2'-O-methylcytidine-3'-phosphorothioate
  modified_base 22: mod_base = OTHER; note = 2'-O-methylcytidine-3'-phosphorothioate
  modified_base 23: mod_base = OTHER; note = 2'-O-methyluridine
tcggtttatccctgtctcttcct

SEQ ID NO: 1124 - RNA, 23 nt, synthetic construct
  source 1..23: mol_type = other RNA
  modified_base 1: mod_base = OTHER; note = 2'-O-methyluridine-3'-phosphorothioate
  modified_base 2: mod_base = OTHER; note = 2'-fluorouridine-3'-phosphorothioate
  modified_base 3: mod_base = OTHER; note = 2'-O-methylcytidine-3'-phosphate
  modified_base 4: mod_base = OTHER; note = 2'-O-methylguanosine-3'-phosphate
  modified_base 5: mod_base = OTHER; note = 2'-O-methylguanosine-3'-phosphate
  modified_base 6: mod_base = OTHER; note = 2'-fluorouridine-3'-phosphate
  modified_base 7: mod_base = OTHER; note = 2'-O-methyluridine-3'-phosphate
  modified_base 8: mod_base = OTHER; note = 2'-O-methyluridine-3'-phosphate
  modified_base 9: mod_base = OTHER; note = 2'-O-methyladenosine-3'-phosphate
  modified_base 10: mod_base = OTHER; note = 2'-O-methyluridine-3'-phosphate
  modified_base 11: mod_base = OTHER; note = 2'-O-methylcytidine-3'-phosphate
  modified_base 12: mod_base = OTHER; note = 2'-O-methylcytidine-3'-phosphate
  modified_base 13: mod_base = OTHER; note = 2'-O-methylcytidine-3'-phosphate
  modified_base 14: mod_base = OTHER; note = 2'-fluorouridine-3'-phosphate
  modified_base 15: mod_base = OTHER; note = 2'-O-methylguanosine-3'-phosphate
  modified_base 16: mod_base = OTHER; note = 2'-fluorouridine-3'-phosphate
  modified_base 17: mod_base = OTHER; note = 2'-O-methylcytidine-3'-phosphate
  modified_base 18: mod_base = OTHER; note = 2'-O-methyluridine-3'-phosphate
  modified_base 19: mod_base = OTHER; note = 2'-O-methylcytidine-3'-phosphate
  modified_base 20: mod_base = OTHER; note = 2'-O-methyluridine-3'-phosphate
  modified_base 21: mod_base = OTHER; note = 2'-O-methyluridine-3'-phosphorothioate
  modified_base 22: mod_base = OTHER; note = 2'-O-methylcytidine-3'-phosphorothioate
  modified_base 23: mod_base = OTHER; note = 2'-O-methylcytidine
ttcggtttatccctgtctcttcc

SEQ ID NO: 1125 - RNA, 23 nt, synthetic construct
  source 1..23: mol_type = other RNA
  modified_base 1: mod_base = OTHER; note = 2'-O-methyluridine-3'-phosphorothioate
  modified_base 2: mod_base = OTHER; note = 2'-fluorouridine-3'-phosphorothioate
  modified_base 3: mod_base = OTHER; note = 2'-O-methyluridine-3'-phosphate
  modified_base 4: mod_base = OTHER; note = 2'-O-methylcytidine-3'-phosphate
  modified_base 5: mod_base = OTHER; note = 2'-O-methyluridine-3'-phosphate
  modified_base 6: mod_base = OTHER; note = 2'-fluorocytidine-3'-phosphate
  modified_base 7: mod_base = OTHER; note = 2'-O-methylguanosine-3'-phosphate
  modified_base 8: mod_base = OTHER; note = 2'-O-methylguanosine-3'-phosphate
  modified_base 9: mod_base = OTHER; note = 2'-O-methyluridine-3'-phosphate
  modified_base 10: mod_base = OTHER; note = 2'-O-methyluridine-3'-phosphate
  modified_base 11: mod_base = OTHER; note = 2'-O-methyluridine-3'-phosphate
  modified_base 12: mod_base = OTHER; note = 2'-O-methyladenosine-3'-phosphate
  modified_base 13: mod_base = OTHER; note = 2'-O-methyluridine-3'-phosphate
  modified_base 14: mod_base = OTHER; note = 2'-fluorocytidine-3'-phosphate
  modified_base 15: mod_base = OTHER; note = 2'-O-methylcytidine-3'-phosphate
  modified_base 16: mod_base = OTHER; note = 2'-fluorocytidine-3'-phosphate
  modified_base 17: mod_base = OTHER; note = 2'-O-methyluridine-3'-phosphate
  modified_base 18: mod_base = OTHER; note = 2'-O-methylguanosine-3'-phosphate
  modified_base 19: mod_base = OTHER; note = 2'-O-methyluridine-3'-phosphate
  modified_base 20: mod_base = OTHER; note = 2'-O-methylcytidine-3'-phosphate
  modified_base 21: mod_base = OTHER; note = 2'-O-methyluridine-3'-phosphorothioate
  modified_base 22: mod_base = OTHER; note = 2'-O-methylcytidine-3'-phosphorothioate
  modified_base 23: mod_base = OTHER; note = 2'-O-methyluridine
tttctcggtttatccctgtctct

SEQ ID NO: 1126 - RNA, 23 nt, synthetic construct
  source 1..23: mol_type = other RNA
  modified_base 1: mod_base = OTHER; note = 2'-O-methyluridine-3'-phosphorothioate
  modified_base 2: mod_base = OTHER; note = 2'-fluorouridine-3'-phosphorothioate
  modified_base 3: mod_base = OTHER; note = 2'-O-methyluridine-3'-phosphate
  modified_base 4: mod_base = OTHER; note = 2'-O-methyluridine-3'-phosphate
  modified_base 5: mod_base = OTHER; note = 2'-O-methylcytidine-3'-phosphate
  modified_base 6: mod_base = OTHER; note = 2'-fluorouridine-3'-phosphate
  modified_base 7: mod_base = OTHER; note = 2'-O-methylcytidine-3'-phosphate
  modified_base 8: mod_base = OTHER; note = 2'-O-methylguanosine-3'-phosphate
  modified_base 9: mod_base = OTHER; note = 2'-O-methylguanosine-3'-phosphate
  modified_base 10: mod_base = OTHER; note = 2'-O-methyluridine-3'-phosphate
  modified_base 11: mod_base = OTHER; note = 2'-O-methyluridine-3'-phosphate
  modified_base 12: mod_base = OTHER; note = 2'-O-methyluridine-3'-phosphate
  modified_base 13: mod_base = OTHER; note = 2'-O-methyladenosine-3'-phosphate
  modified_base 14: mod_base = OTHER; note = 2'-fluorouridine-3'-phosphate
  modified_base 15: mod_base = OTHER; note = 2'-O-methylcytidine-3'-phosphate
  modified_base 16: mod_base = OTHER; note = 2'-fluorocytidine-3'-phosphate
  modified_base 17: mod_base = OTHER; note = 2'-O-methylcytidine-3'-phosphate
  modified_base 18: mod_base = OTHER; note = 2'-O-methyluridine-3'-phosphate
  modified_base 19: mod_base = OTHER; note = 2'-O-methylguanosine-3'-phosphate
  modified_base 20: mod_base = OTHER; note = 2'-O-methyluridine-3'-phosphate
  modified_base 21: mod_base = OTHER; note = 2'-O-methylcytidine-3'-phosphorothioate
  modified_base 22: mod_base = OTHER; note = 2'-O-methyluridine-3'-phosphorothioate
  modified_base 23: mod_base = OTHER; note = 2'-O-methylcytidine
ttttctcggtttatccctgtctc

SEQ ID NO: 1127 - RNA, 23 nt, synthetic construct
  source 1..23: mol_type = other RNA
  modified_base 1: mod_base = OTHER; note = 2'-O-methyluridine-3'-phosphorothioate
  modified_base 2: mod_base = OTHER; note = 2'-fluorouridine-3'-phosphorothioate
  modified_base 3: mod_base = OTHER; note = 2'-O-methyluridine-3'-phosphate
  modified_base 4: mod_base = OTHER; note = 2'-O-methylcytidine-3'-phosphate
  modified_base 5: mod_base = OTHER; note = 2'-O-methyluridine-3'-phosphate
  modified_base 6: mod_base = OTHER; note = 2'-fluorouridine-3'-phosphate
  modified_base 7: mod_base = OTHER; note = 2'-O-methyluridine-3'-phosphate
  modified_base 8: mod_base = OTHER; note = 2'-O-methylcytidine-3'-phosphate
  modified_base 9: mod_base = OTHER; note = 2'-O-methyluridine-3'-phosphate
  modified_base 10: mod_base = OTHER; note = 2'-O-methylcytidine-3'-phosphate
  modified_base 11: mod_base = OTHER; note = 2'-O-methylguanosine-3'-phosphate
  modified_base 12: mod_base = OTHER; note = 2'-O-methylguanosine-3'-phosphate
  modified_base 13: mod_base = OTHER; note = 2'-O-methyluridine-3'-phosphate
  modified_base 14: mod_base = OTHER; note = 2'-fluorouridine-3'-phosphate
  modified_base 15: mod_base = OTHER; note = 2'-O-methyluridine-3'-phosphate
  modified_base 16: mod_base = OTHER; note = 2'-fluoroadenosine-3'-phosphate
  modified_base 17: mod_base = OTHER; note = 2'-O-methyluridine-3'-phosphate
  modified_base 18: mod_base = OTHER; note = 2'-O-methylcytidine-3'-phosphate
  modified_base 19: mod_base = OTHER; note = 2'-O-methylcytidine-3'-phosphate
  modified_base 20: mod_base = OTHER; note = 2'-O-methylcytidine-3'-phosphate
  modified_base 21: mod_base = OTHER; note = 2'-O-methyluridine-3'-phosphorothioate
  modified_base 22: mod_base = OTHER; note = 2'-O-methylguanosine-3'-phosphorothioate
  modified_base 23: mod_base = OTHER; note = 2'-O-methyluridine
tttctttctcggtttatccctgt

SEQ ID NO: 1128 - RNA, 23 nt, synthetic construct
  source 1..23: mol_type = other RNA
  modified_base 1: mod_base = OTHER; note = 2'-O-methyluridine-3'-phosphorothioate
  modified_base 2: mod_base = OTHER; note = 2'-fluorocytidine-3'-phosphorothioate
  modified_base 3: mod_base = OTHER; note = 2'-O-methyladenosine-3'-phosphate
  modified_base 4: mod_base = OTHER; note = 2'-O-methyladenosine-3'-phosphate
  modified_base 5: mod_base = OTHER; note = 2'-O-methylcytidine-3'-phosphate
  modified_base 6: mod_base = OTHER; note = 2'-fluorouridine-3'-phosphate
  modified_base 7: mod_base = OTHER; note = 2'-O-methyluridine-3'-phosphate
  modified_base 8: mod_base = OTHER; note = 2'-O-methyluridine-3'-phosphate
  modified_base 9: mod_base = OTHER; note = 2'-O-methyluridine-3'-phosphate
  modified_base 10: mod_base = OTHER; note = 2'-O-methylcytidine-3'-phosphate
  modified_base 11: mod_base = OTHER; note = 2'-O-methyluridine-3'-phosphate
  modified_base 12: mod_base = OTHER; note = 2'-O-methyluridine-3'-phosphate
  modified_base 13: mod_base = OTHER; note = 2'-O-methyluridine-3'-phosphate
  modified_base 14: mod_base = OTHER; note = 2'-fluorocytidine-3'-phosphate
  modified_base 15: mod_base = OTHER; note = 2'-O-methyluridine-3'-phosphate
  modified_base 16: mod_base = OTHER; note = 2'-fluorocytidine-3'-phosphate
  modified_base 17: mod_base = OTHER; note = 2'-O-methylguanosine-3'-phosphate
  modified_base 18: mod_base = OTHER; note = 2'-O-methylguanosine-3'-phosphate
  modified_base 19: mod_base = OTHER; note = 2'-O-methyluridine-3'-phosphate
  modified_base 20: mod_base = OTHER; note = 2'-O-methyluridine-3'-phosphate
  modified_base 21: mod_base = OTHER; note = 2'-O-methyluridine-3'-phosphorothioate
  modified_base 22: mod_base = OTHER; note = 2'-O-methyladenosine-3'-phosphorothioate
  modified_base 23: mod_base = OTHER; note = 2'-O-methyluridine
tcaacttttctttctcggtttat

SEQ ID NO: 1129 - RNA, 23 nt, synthetic construct
  source 1..23: mol_type = other RNA
  modified_base 1: mod_base = OTHER; note = 2'-O-methyluridine-3'-phosphorothioate
  modified_base 2: mod_base = OTHER; note = 2'-fluoroadenosine-3'-phosphorothioate
  modified_base 3: mod_base = OTHER; note = 2'-O-methyladenosine-3'-phosphate
  modified_base 4: mod_base = OTHER; note = 2'-O-methylguanosine-3'-phosphate
  modified_base 5: mod_base = OTHER; note = 2'-O-methylguanosine-3'-phosphate
  modified_base 6: mod_base = OTHER; note = 2'-fluoroguanosine-3'-phosphate
  modified_base 7: mod_base = OTHER; note = 2'-O-methyluridine-3'-phosphate
  modified_base 8: mod_base = OTHER; note = 2'-O-methyluridine-3'-phosphate
  modified_base 9: mod_base = OTHER; note = 2'-O-methyluridine-3'-phosphate
  modified_base 10: mod_base = OTHER; note = 2'-O-methyluridine-3'-phosphate
  modified_base 11: mod_base = OTHER; note = 2'-O-methyladenosine-3'-phosphate
  modified_base 12: mod_base = OTHER; note = 2'-O-methyluridine-3'-phosphate
  modified_base 13: mod_base = OTHER; note = 2'-O-methyladenosine-3'-phosphate
  modified_base 14: mod_base = OTHER; note = 2'-fluoroadenosine-3'-phosphate
  modified_base 15: mod_base = OTHER; note = 2'-O-methylcytidine-3'-phosphate
  modified_base 16: mod_base = OTHER; note = 2'-fluorocytidine-3'-phosphate
  modified_base 17: mod_base = OTHER; note = 2'-O-methyluridine-3'-phosphate
  modified_base 18: mod_base = OTHER; note = 2'-O-methylcytidine-3'-phosphate
  modified_base 19: mod_base = OTHER; note = 2'-O-methyladenosine-3'-phosphate
  modified_base 20: mod_base = OTHER; note = 2'-O-methyladenosine-3'-phosphate
  modified_base 21: mod_base = OTHER; note = 2'-O-methylcytidine-3'-phosphorothioate
  modified_base 22: mod_base = OTHER; note = 2'-O-methyluridine-3'-phosphorothioate
  modified_base 23: mod_base = OTHER; note = 2'-O-methyluridine
taagggttttataacctcaactt

SEQ ID NO: 1130 - RNA, 23 nt, synthetic construct
  source 1..23: mol_type = other RNA
  modified_base 1: mod_base = OTHER; note = 2'-O-methyluridine-3'-phosphorothioate
  modified_base 2: mod_base = OTHER; note = 2'-fluorocytidine-3'-phosphorothioate
  modified_base 3: mod_base = OTHER; note = 2'-O-methylcytidine-3'-phosphate
  modified_base 4: mod_base = OTHER; note = 2'-O-methyladenosine-3'-phosphate
  modified_base 5: mod_base = OTHER; note = 2'-O-methylcytidine-3'-phosphate
  modified_base 6: mod_base = OTHER; note = 2'-fluorouridine-3'-phosphate
  modified_base 7: mod_base = OTHER; note = 2'-O-methyladenosine-3'-phosphate
  modified_base 8: mod_base = OTHER; note = 2'-O-methyladenosine-3'-phosphate
  modified_base 9: mod_base = OTHER; note = 2'-O-methylguanosine-3'-phosphate
  modified_base 10: mod_base = OTHER; note = 2'-O-methylguanosine-3'-phosphate
  modified_base 11: mod_base = OTHER; note = 2'-O-methylguanosine-3'-phosphate
  modified_base 12: mod_base = OTHER; note = 2'-O-methyluridine-3'-phosphate
  modified_base 13: mod_base = OTHER; note = 2'-O-methyluridine-3'-phosphate
  modified_base 14: mod_base = OTHER; note = 2'-fluorouridine-3'-phosphate
  modified_base 15: mod_base = OTHER; note = 2'-O-methyluridine-3'-phosphate
  modified_base 16: mod_base = OTHER; note = 2'-fluoroadenosine-3'-phosphate
  modified_base 17: mod_base = OTHER; note = 2'-O-methyluridine-3'-phosphate
  modified_base 18: mod_base = OTHER; note = 2'-O-methyladenosine-3'-phosphate
  modified_base 19: mod_base = OTHER; note = 2'-O-methyladenosine-3'-phosphate
  modified_base 20: mod_base = OTHER; note = 2'-O-methylcytidine-3'-phosphate
  modified_base 21: mod_base = OTHER; note = 2'-O-methylcytidine-3'-phosphorothioate
  modified_base 22: mod_base = OTHER; note = 2'-O-methyluridine-3'-phosphorothioate
  modified_base 23: mod_base = OTHER; note = 2'-O-methylcytidine
tccactaagggttttataacctc

SEQ ID NO: 1131 - RNA, 23 nt, synthetic construct
  source 1..23: mol_type = other RNA
  modified_base 1: mod_base = OTHER; note = 2'-O-methyluridine-3'-phosphorothioate
  modified_base 2: mod_base = OTHER; note = 2'-fluorouridine-3'-phosphorothioate
  modified_base 3: mod_base = OTHER; note = 2'-O-methylguanosine-3'-phosphate
  modified_base 4: mod_base = OTHER; note = 2'-O-methyluridine-3'-phosphate
  modified_base 5: mod_base = OTHER; note = 2'-O-methyluridine-3'-phosphate
  modified_base 6: mod_base = OTHER; note = 2'-fluorouridine-3'-phosphate
  modified_base 7: mod_base = OTHER; note = 2'-O-methylcytidine-3'-phosphate
  modified_base 8: mod_base = OTHER; note = 2'-O-methyladenosine-3'-phosphate
  modified_base 9: mod_base = OTHER; note = 2'-O-methylguanosine-3'-phosphate
  modified_base 10: mod_base = OTHER; note = 2'-O-methylcytidine-3'-phosphate
  modified_base 11: mod_base = OTHER; note = 2'-O-methylcytidine-3'-phosphate
  modified_base 12: mod_base = OTHER; note = 2'-O-methyladenosine-3'-phosphate
  modified_base 13: mod_base = OTHER; note = 2'-O-methylcytidine-3'-phosphate
  modified_base 14: mod_base = OTHER; note = 2'-fluorouridine-3'-phosphate
  modified_base 15: mod_base = OTHER; note = 2'-O-methyladenosine-3'-phosphate
  modified_base 16: mod_base = OTHER; note = 2'-fluoroadenosine-3'-phosphate
  modified_base 17: mod_base = OTHER; note = 2'-O-methylguanosine-3'-phosphate
  modified_base 18: mod_base = OTHER; note = 2'-O-methylguanosine-3'-phosphate
  modified_base 19: mod_base = OTHER; note = 2'-O-methylguanosine-3'-phosphate
  modified_base 20: mod_base = OTHER; note = 2'-O-methyluridine-3'-phosphate
  modified_base 21: mod_base = OTHER; note = 2'-O-methyluridine-3'-phosphorothioate
  modified_base 22: mod_base = OTHER; note = 2'-O-methyluridine-3'-phosphorothioate
  modified_base 23: mod_base = OTHER; note = 2'-O-methyluridine
ttgtttcagccactaagggtttt

SEQ ID NO: 1132 - RNA, 23 nt, synthetic construct
  source 1..23: mol_type = other RNA
  modified_base 1: mod_base = OTHER; note = 2'-O-methyluridine-3'-phosphorothioate
  modified_base 2: mod_base = OTHER; note = 2'-fluorocytidine-3'-phosphorothioate
  modified_base 3: mod_base = OTHER; note = 2'-O-methyluridine-3'-phosphate
  modified_base 4: mod_base = OTHER; note = 2'-O-methylguanosine-3'-phosphate
  modified_base 5: mod_base = OTHER; note = 2'-O-methyluridine-3'-phosphate
  modified_base 6: mod_base = OTHER; note = 2'-fluorouridine-3'-phosphate
  modified_base 7: mod_base = OTHER; note = 2'-O-methyluridine-3'-phosphate
  modified_base 8: mod_base = OTHER; note = 2'-O-methylcytidine-3'-phosphate
  modified_base 9: mod_base = OTHER; note = 2'-O-methyladenosine-3'-phosphate
  modified_base 10: mod_base = OTHER; note = 2'-O-methylguanosine-3'-phosphate
  modified_base 11: mod_base = OTHER; note = 2'-O-methylcytidine-3'-phosphate
  modified_base 12: mod_base = OTHER; note = 2'-O-methylcytidine-3'-phosphate
  modified_base 13: mod_base = OTHER; note = 2'-O-methyladenosine-3'-phosphate
  modified_base 14: mod_base = OTHER; note = 2'-fluorocytidine-3'-phosphate
  modified_base 15: mod_base = OTHER; note = 2'-O-methyluridine-3'-phosphate
  modified_base 16: mod_base = OTHER; note = 2'-fluoroadenosine-3'-phosphate
  modified_base 17: mod_base = OTHER; note = 2'-O-methyladenosine-3'-phosphate
  modified_base 18: mod_base = OTHER; note = 2'-O-methylguanosine-3'-phosphate
  modified_base 19: mod_base = OTHER; note = 2'-O-methylguanosine-3'-phosphate
  modified_base 20: mod_base = OTHER; note = 2'-O-methylguanosine-3'-phosphate
  modified_base 21: mod_base = OTHER; note = 2'-O-methyluridine-3'-phosphorothioate
  modified_base 22: mod_base = OTHER; note = 2'-O-methyluridine-3'-phosphorothioate
  modified_base 23: mod_base = OTHER; note = 2'-O-methyluridine
tctgtttcagccactaagggttt

SEQ ID NO: 1133 - RNA, 23 nt, synthetic construct
  source 1..23: mol_type = other RNA
  modified_base 1: mod_base = OTHER; note = 2'-O-methyladenosine-3'-phosphorothioate
  modified_base 2: mod_base = OTHER; note = 2'-fluorouridine-3'-phosphorothioate
  modified_base 3: mod_base = OTHER; note = 2'-O-methylcytidine-3'-phosphate
  modified_base 4: mod_base = OTHER; note = 2'-O-methyluridine-3'-phosphate
  modified_base 5: mod_base = OTHER; note = 2'-O-methylguanosine-3'-phosphate
  modified_base 6: mod_base = OTHER; note = 2'-fluorouridine-3'-phosphate
  modified_base 7: mod_base = OTHER; note = 2'-O-methyluridine-3'-phosphate
  modified_base 8: mod_base = OTHER; note = 2'-O-methyluridine-3'-phosphate
  modified_base 9: mod_base = OTHER; note = 2'-O-methylcytidine-3'-phosphate
  modified_base 10: mod_base = OTHER; note = 2'-O-methyladenosine-3'-phosphate
  modified_base 11: mod_base = OTHER; note = 2'-O-methylguanosine-3'-phosphate
  modified_base 12: mod_base = OTHER; note = 2'-O-methylcytidine-3'-phosphate
  modified_base 13: mod_base = OTHER; note = 2'-O-methylcytidine-3'-phosphate
  modified_base 14: mod_base = OTHER; note = 2'-fluoroadenosine-3'-phosphate
  modified_base 15: mod_base = OTHER; note = 2'-O-methylcytidine-3'-phosphate
  modified_base 16: mod_base = OTHER; note = 2'-fluorouridine-3'-phosphate
  modified_base 17: mod_base = OTHER; note = 2'-O-methyladenosine-3'-phosphate
  modified_base 18: mod_base = OTHER; note = 2'-O-methyladenosine-3'-phosphate
  modified_base 19: mod_base = OTHER; note = 2'-O-methylguanosine-3'-phosphate
  modified_base 20: mod_base = OTHER; note = 2'-O-methylguanosine-3'-phosphate
  modified_base 21: mod_base = OTHER; note = 2'-O-methylguanosine-3'-phosphorothioate
  modified_base 22: mod_base = OTHER; note = 2'-O-methyluridine-3'-phosphorothioate
  modified_base 23: mod_base = OTHER; note = 2'-O-methyluridine
atctgtttcagccactaagggtt

SEQ ID NO: 1134 - RNA, 23 nt, synthetic construct
  source 1..23: mol_type = other RNA
  modified_base 1: mod_base = OTHER; note = 2'-O-methyluridine-3'-phosphorothioate
  modified_base 2: mod_base = OTHER; note = 2'-fluoroadenosine-3'-phosphorothioate
  modified_base 3: mod_base = OTHER; note = 2'-O-methyluridine-3'-phosphate
  modified_base 4: mod_base = OTHER; note = 2'-O-methylcytidine-3'-phosphate
  modified_base 5: mod_base = OTHER; note = 2'-O-methyluridine-3'-phosphate
  modified_base 6: mod_base = OTHER; note = 2'-fluoroguanosine-3'-phosphate
  modified_base 7: mod_base = OTHER; note = 2'-O-methyluridine-3'-phosphate
  modified_base 8: mod_base = OTHER; note = 2'-O-methyluridine-3'-phosphate
  modified_base 9: mod_base = OTHER; note = 2'-O-methyluridine-3'-phosphate
  modified_base 10: mod_base = OTHER; note = 2'-O-methylcytidine-3'-phosphate
  modified_base 11: mod_base = OTHER; note = 2'-O-methyladenosine-3'-phosphate
  modified_base 12: mod_base = OTHER; note = 2'-O-methylguanosine-3'-phosphate
  modified_base 13: mod_base = OTHER; note = 2'-O-methylcytidine-3'-phosphate
  modified_base 14: mod_base = OTHER; note = 2'-fluorocytidine-3'-phosphate
  modified_base 15: mod_base = OTHER; note = 2'-O-methyladenosine-3'-phosphate
  modified_base 16: mod_base = OTHER; note = 2'-fluorocytidine-3'-phosphate
  modified_base 17: mod_base = OTHER; note = 2'-O-methyluridine-3'-phosphate
  modified_base 18: mod_base = OTHER; note = 2'-O-methyladenosine-3'-phosphate
  modified_base 19: mod_base = OTHER; note = 2'-O-methyladenosine-3'-phosphate
  modified_base 20: mod_base = OTHER; note = 2'-O-methylguanosine-3'-phosphate
  modified_base 21: mod_base = OTHER; note = 2'-O-methylguanosine-3'-phosphorothioate
  modified_base 22: mod_base = OTHER; note = 2'-O-methylguanosine-3'-phosphorothioate
  modified_base 23: mod_base = OTHER; note = 2'-O-methyluridine
tatctgtttcagccactaagggt

SEQ ID NO: 1135 - RNA, 23 nt, synthetic construct
  source 1..23: mol_type = other RNA
  modified_base 1: mod_base = OTHER; note = 2'-O-methyluridine-3'-phosphorothioate
  modified_base 2: mod_base = OTHER; note = 2'-fluorocytidine-3'-phosphorothioate
  modified_base 3: mod_base = OTHER; note = 2'-O-methyladenosine-3'-phosphate
  modified_base 4: mod_base = OTHER; note = 2'-O-methyladenosine-3'-phosphate
  modified_base 5: mod_base = OTHER; note = 2'-O-methylcytidine-3'-phosphate
  modified_base 6: mod_base = OTHER; note = 2'-fluorocytidine-3'-phosphate
  modified_base 7: mod_base = OTHER; note = 2'-O-methyladenosine-3'-phosphate
  modified_base 8: mod_base = OTHER; note = 2'-O-methylcytidine-3'-phosphate
  modified_base 9: mod_base = OTHER; note = 2'-O-methyladenosine-3'-phosphate
  modified_base 10: mod_base = OTHER; note = 2'-O-methyladenosine-3'-phosphate
  modified_base 11: mod_base = OTHER; note = 2'-O-methyladenosine-3'-phosphate
  modified_base 12: mod_base = OTHER; note = 2'-O-methyluridine-3'-phosphate
  modified_base 13: mod_base = OTHER; note = 2'-O-methylguanosine-3'-phosphate
  modified_base 14: mod_base = OTHER; note = 2'-fluorouridine-3'-phosphate
  modified_base 15: mod_base = OTHER; note = 2'-O-methyladenosine-3'-phosphate
  modified_base 16: mod_base = OTHER; note = 2'-fluoroguanosine-3'-phosphate
  modified_base 17: mod_base = OTHER; note = 2'-O-methylcytidine-3'-phosphate
  modified_base 18: mod_base = OTHER; note = 2'-O-methyluridine-3'-phosphate
  modified_base 19: mod_base = OTHER; note = 2'-O-methylcytidine-3'-phosphate
  modified_base 20: mod_base = OTHER; note = 2'-O-methyluridine-3'-phosphate
  modified_base 21: mod_base = OTHER; note = 2'-O-methylguanosine-3'-phosphorothioate
  modified_base 22: mod_base = OTHER; note = 2'-O-methyluridine-3'-phosphorothioate
  modified_base 23: mod_base = OTHER; note = 2'-O-methyluridine
tcaaccacaaatgtagctctgtt

SEQ ID NO: 1136 - RNA, 23 nt, synthetic construct
  source 1..23: mol_type = other RNA
  modified_base 1: mod_base = OTHER; note = 2'-O-methyladenosine-3'-phosphorothioate
  modified_base 2: mod_base = OTHER; note = 2'-fluoroadenosine-3'-phosphorothioate
  modified_base 3: mod_base = OTHER; note = 2'-O-methylguanosine-3'-phosphate
  modified_base 4: mod_base = OTHER; note = 2'-O-methyluridine-3'-phosphate
  modified_base 5: mod_base = OTHER; note = 2'-O-methyladenosine-3'-phosphate
  modified_base 6: mod_base = OTHER; note = 2'-fluorouridine-3'-phosphate
  modified_base 7: mod_base = OTHER; note = 2'-O-methylcytidine-3'-phosphate
  modified_base 8: mod_base = OTHER; note = 2'-O-methylguanosine-3'-phosphate
  modified_base 9: mod_base = OTHER; note = 2'-O-methyladenosine-3'-phosphate
  modified_base 10: mod_base = OTHER; note = 2'-O-methylguanosine-3'-phosphate
  modified_base 11: mod_base = OTHER; note = 2'-O-methyluridine-3'-phosphate
  modified_base 12: mod_base = OTHER; note = 2'-O-methyladenosine-3'-phosphate
  modified_base 13: mod_base = OTHER; note = 2'-O-methyladenosine-3'-phosphate
  modified_base 14: mod_base = OTHER; note = 2'-fluoroguanosine-3'-phosphate
  modified_base 15: mod_base = OTHER; note = 2'-O-methylguanosine-3'-phosphate
  modified_base 16: mod_base = OTHER; note = 2'-fluoroadenosine-3'-phosphate
  modified_base 17: mod_base = OTHER; note = 2'-O-methylguanosine-3'-phosphate
  modified_base 18: mod_base = OTHER; note = 2'-O-methylguanosine-3'-phosphate
  modified_base 19: mod_base = OTHER; note = 2'-O-methyladenosine-3'-phosphate
  modified_base 20: mod_base = OTHER; note = 2'-O-methylguanosine-3'-phosphate
  modified_base 21: mod_base = OTHER; note = 2'-O-methyluridine-3'-phosphorothioate
  modified_base 22: mod_base = OTHER; note = 2'-O-methyluridine-3'-phosphorothioate
  modified_base 23: mod_base = OTHER; note = 2'-O-methyladenosine
aagtatcgagtaaggaggagtta

SEQ ID NO: 1137 - RNA, 23 nt, synthetic construct
  source 1..23: mol_type = other RNA
  modified_base 1: mod_base = OTHER; note = 2'-O-methyluridine-3'-phosphorothioate
  modified_base 2: mod_base = OTHER; note = 2'-fluoroadenosine-3'-phosphorothioate
  modified_base 3: mod_base = OTHER; note = 2'-O-methyladenosine-3'-phosphate
  modified_base 4: mod_base = OTHER; note = 2'-O-methylguanosine-3'-phosphate
  modified_base 5: mod_base = OTHER; note = 2'-O-methyluridine-3'-phosphate
  modified_base 6: mod_base = OTHER; note = 2'-fluoroadenosine-3'-phosphate
  modified_base 7: mod_base = OTHER; note = 2'-O-methyluridine-3'-phosphate
  modified_base 8: mod_base = OTHER; note = 2'-O-methylcytidine-3'-phosphate
  modified_base 9: mod_base = OTHER; note = 2'-O-methylguanosine-3'-phosphate
  modified_base 10: mod_base = OTHER; note = 2'-O-methyladenosine-3'-phosphate
  modified_base 11: mod_base = OTHER; note = 2'-O-methylguanosine-3'-phosphate
  modified_base 12: mod_base = OTHER; note = 2'-O-methyluridine-3'-phosphate
  modified_base 13: mod_base = OTHER; note = 2'-O-methyladenosine-3'-phosphate
  modified_base 14: mod_base = OTHER; note = 2'-fluoroadenosine-3'-phosphate
  modified_base 15: mod_base = OTHER; note = 2'-O-methylguanosine-3'-phosphate
  modified_base 16: mod_base = OTHER; note = 2'-fluoroguanosine-3'-phosphate
  modified_base 17: mod_base = OTHER; note = 2'-O-methyladenosine-3'-phosphate
  modified_base 18: mod_base = OTHER; note = 2'-O-methylguanosine-3'-phosphate
  modified_base 19: mod_base = OTHER; note = 2'-O-methylguanosine-3'-phosphate
  modified_base 20: mod_base = OTHER; note = 2'-O-methyladenosine-3'-phosphate
  modified_base 21: mod_base = OTHER; note = 2'-O-methylguanosine-3'-phosphorothioate
  modified_base 22: mod_base = OTHER; note = 2'-O-methyluridine-3'-phosphorothioate
  modified_base 23: mod_base = OTHER; note = 2'-O-methyluridine
taagtatcgagtaaggaggagtt

SEQ ID NO: 1138 - RNA, 23 nt, synthetic construct
  source 1..23: mol_type = other RNA
  modified_base 1: mod_base = OTHER; note = 2'-O-methyluridine-3'-phosphorothioate
  modified_base 2: mod_base = OTHER; note = 2'-fluorouridine-3'-phosphorothioate
  modified_base 3: mod_base = OTHER; note = 2'-O-methyluridine-3'-phosphate
  modified_base 4: mod_base = OTHER; note = 2'-O-methylcytidine-3'-phosphate
  modified_base 5: mod_base = OTHER; note = 2'-O-methyladenosine-3'-phosphate
  modified_base 6: mod_base = OTHER; note = 2'-fluoroguanosine-3'-phosphate
  modified_base 7: mod_base = OTHER; note = 2'-O-methylguanosine-3'-phosphate
  modified_base 8: mod_base = OTHER; note = 2'-O-methyluridine-3'-phosphate
  modified_base 9: mod_base = OTHER; note = 2'-O-methyluridine-3'-phosphate
  modified_base 10: mod_base = OTHER; note = 2'-O-methylcytidine-3'-phosphate
  modified_base 11: mod_base = OTHER; note = 2'-O-methylcytidine-3'-phosphate
  modified_base 12: mod_base = OTHER; note = 2'-O-methyluridine-3'-phosphate
  modified_base 13: mod_base = OTHER; note = 2'-O-methylguanosine-3'-phosphate
  modified_base 14: mod_base = OTHER; note = 2'-fluorouridine-3'-phosphate
  modified_base 15: mod_base = OTHER; note = 2'-O-methylguanosine-3'-phosphate
  modified_base 16: mod_base = OTHER; note = 2'-fluorouridine-3'-phosphate
  modified_base 17: mod_base = OTHER; note = 2'-O-methylcytidine-3'-phosphate
  modified_base 18: mod_base = OTHER; note = 2'-O-methyladenosine-3'-phosphate
  modified_base 19: mod_base = OTHER; note = 2'-O-methylcytidine-3'-phosphate
  modified_base 20: mod_base = OTHER; note = 2'-O-methylcytidine-3'-phosphate
  modified_base 21: mod_base = OTHER; note = 2'-O-methyladenosine-3'-phosphorothioate
  modified_base 22: mod_base = OTHER; note = 2'-O-methylguanosine-3'-phosphorothioate
  modified_base 23: mod_base = OTHER; note = 2'-O-methyluridine
tttcaggttcctgtgtcaccagt

SEQ ID NO: 1139 - RNA, 23 nt, synthetic construct
  source 1..23: mol_type = other RNA
  modified_base 1: mod_base = OTHER; note = 2'-O-methyluridine-3'-phosphorothioate
  modified_base 2: mod_base = OTHER; note = 2'-fluoroadenosine-3'-phosphorothioate
  modified_base 3: mod_base = OTHER; note = 2'-O-methylcytidine-3'-phosphate
  modified_base 4: mod_base = OTHER; note = 2'-O-methyluridine-3'-phosphate
  modified_base 5: mod_base = OTHER; note = 2'-O-methyladenosine-3'-phosphate
  modified_base 6: mod_base = OTHER; note = 2'-fluoroadenosine-3'-phosphate
  modified_base 7: mod_base = OTHER; note = 2'-O-methylguanosine-3'-phosphate
  modified_base 8: mod_base = OTHER; note = 2'-O-methylguanosine-3'-phosphate
  modified_base 9: mod_base = OTHER; note = 2'-O-methyladenosine-3'-phosphate
  modified_base 10: mod_base = OTHER; note = 2'-O-methyladenosine-3'-phosphate
  modified_base 11: mod_base = OTHER; note = 2'-O-methyluridine-3'-phosphate
  modified_base 12: mod_base = OTHER; note = 2'-O-methyluridine-3'-phosphate
  modified_base 13: mod_base = OTHER; note = 2'-O-methyluridine-3'-phosphate
  modified_base 14: mod_base = OTHER; note = 2'-fluorouridine-3'-phosphate
  modified_base 15: mod_base = OTHER; note = 2'-O-methylguanosine-3'-phosphate
  modified_base 16: mod_base = OTHER; note = 2'-fluorocytidine-3'-phosphate
  modified_base 17: mod_base = OTHER; note = 2'-O-methyladenosine-3'-phosphate
  modified_base 18: mod_base = OTHER; note = 2'-O-methylcytidine-3'-phosphate
  modified_base 19: mod_base = OTHER; note = 2'-O-methylcytidine-3'-phosphate
  modified_base 20: mod_base = OTHER; note = 2'-O-methyluridine-3'-phosphate
  modified_base 21: mod_base = OTHER; note = 2'-O-methyluridine-3'-phosphorothioate
  modified_base 22: mod_base = OTHER; note = 2'-O-methyluridine-3'-phosphorothioate
  modified_base 23: mod_base = OTHER; note = 2'-O-methylcytidine
tactaaggaattttgcacctttc

SEQ ID NO: 1140 - RNA, 23 nt, synthetic construct
  source 1..23: mol_type = other RNA
  modified_base 1: mod_base = OTHER; note = 2'-O-methyluridine-3'-phosphorothioate
  modified_base 2: mod_base = OTHER; note = 2'-fluoroadenosine-3'-phosphorothioate
  modified_base 3: mod_base = OTHER; note = 2'-O-methyluridine-3'-phosphate
  modified_base 4: mod_base = OTHER; note = 2'-O-methylcytidine-3'-phosphate
  modified_base 5: mod_base = OTHER; note = 2'-O-methyluridine-3'-phosphate
  modified_base 6: mod_base = OTHER; note = 2'-fluorocytidine-3'-phosphate
  modified_base 7: mod_base = OTHER; note = 2'-O-methyladenosine-3'-phosphate
  modified_base 8: mod_base = OTHER; note = 2'-O-methylguanosine-3'-phosphate
  modified_base 9: mod_base = OTHER; note = 2'-O-methylcytidine-3'-phosphate
  modified_base 10: mod_base = OTHER; note = 2'-O-methyladenosine-3'-phosphate
  modified_base 11: mod_base = OTHER; note = 2'-O-methyluridine-3'-phosphate
  modified_base 12: mod_base = OTHER; note = 2'-O-methylcytidine-3'-phosphate
  modified_base 13: mod_base = OTHER; note = 2'-O-methyladenosine-3'-phosphate
  modified_base 14: mod_base = OTHER; note = 2'-fluorocytidine-3'-phosphate
  modified_base 15: mod_base = OTHER; note = 2'-O-methyluridine-3'-phosphate
  modified_base 16: mod_base = OTHER; note = 2'-fluoroadenosine-3'-phosphate
  modified_base 17: mod_base = OTHER; note = 2'-O-methyladenosine-3'-phosphate
  modified_base 18: mod_base = OTHER; note = 2'-O-methylguanosine-3'-phosphate
  modified_base 19: mod_base = OTHER; note = 2'-O-methylguanosine-3'-phosphate
  modified_base 20: mod_base = OTHER; note = 2'-O-methyladenosine-3'-phosphate
  modified_base 21: mod_base = OTHER; note = 2'-O-methyladenosine-3'-phosphorothioate
  modified_base 22: mod_base = OTHER; note = 2'-O-methyluridine-3'-phosphorothioate
  modified_base 23: mod_base = OTHER; note = 2'-O-methyluridine
tatctcagcatcactaaggaatt

SEQ ID NO: 1141 - RNA, 23 nt, synthetic construct
  source 1..23: mol_type = other RNA
  modified_base 1: mod_base = OTHER; note = 2'-O-methyladenosine-3'-phosphorothioate
  modified_base 2: mod_base = OTHER; note = 2'-fluorocytidine-3'-phosphorothioate
  modified_base 3: mod_base = OTHER; note = 2'-O-methyluridine-3'-phosphate
  modified_base 4: mod_base = OTHER; note = 2'-O-methyladenosine-3'-phosphate
  modified_base 5: mod_base = OTHER; note = 2'-O-methyladenosine-3'-phosphate
  modified_base 6: mod_base = OTHER; note = 2'-fluorocytidine-3'-phosphate
  modified_base 7: mod_base = OTHER; note = 2'-O-methyluridine-3'-phosphate
  modified_base 8: mod_base = OTHER; note = 2'-O-methylguanosine-3'-phosphate
  modified_base 9: mod_base = OTHER; note = 2'-O-methylguanosine-3'-phosphate
  modified_base 10: mod_base = OTHER; note = 2'-O-methyladenosine-3'-phosphate
  modified_base 11: mod_base = OTHER; note = 2'-O-methyluridine-3'-phosphate
  modified_base 12: mod_base = OTHER; note = 2'-O-methylguanosine-3'-phosphate
  modified_base 13: mod_base = OTHER; note = 2'-O-methyladenosine-3'-phosphate
  modified_base 14: mod_base = OTHER; note = 2'-fluorouridine-3'-phosphate
  modified_base 15: mod_base = OTHER; note = 2'-O-methylcytidine-3'-phosphate
  modified_base 16: mod_base = OTHER; note = 2'-fluorouridine-3'-phosphate
  modified_base 17: mod_base = OTHER; note = 2'-O-methylcytidine-3'-phosphate
  modified_base 18: mod_base = OTHER; note = 2'-O-methyladenosine-3'-phosphate
  modified_base 19: mod_base = OTHER; note = 2'-O-methylguanosine-3'-phosphate
  modified_base 20: mod_base = OTHER; note = 2'-O-methylcytidine-3'-phosphate
  modified_base 21: mod_base = OTHER; note = 2'-O-methyladenosine-3'-phosphorothioate
  modified_base 22: mod_base = OTHER; note = 2'-O-methyluridine-3'-phosphorothioate
  modified_base 23: mod_base = OTHER; note = 2'-O-methylcytidine
actaactggatgatctcagcatc

SEQ ID NO: 1142 - RNA, 23 nt, synthetic construct
  source 1..23: mol_type = other RNA
  modified_base 1: mod_base = OTHER; note = 2'-O-methyladenosine-3'-phosphorothioate
  modified_base 2: mod_base = OTHER; note = 2'-fluorocytidine-3'-phosphorothioate
  modified_base 3: mod_base = OTHER; note = 2'-O-methyluridine-3'-phosphate
  modified_base 4: mod_base = OTHER; note = 2'-O-methyladenosine-3'-phosphate
  modified_base 5: mod_base = OTHER; note = 2'-O-methyladenosine-3'-phosphate
  modified_base 6: mod_base = OTHER; note = 2'-fluorocytidine-3'-phosphate
  modified_base 7: mod_base = OTHER; note = 2'-O-methyluridine-3'-phosphate
  modified_base 8: mod_base = OTHER; note = 2'-O-methylguanosine-3'-phosphate
  modified_base 9: mod_base = OTHER; note = 2'-O-methylguanosine-3'-phosphate
  modified_base 10: mod_base = OTHER; note = 2'-O-methyladenosine-3'-phosphate
  modified_base 11: mod_base = OTHER; note = 2'-O-methyluridine-3'-phosphate
  modified_base 12: mod_base = OTHER; note = 2'-O-methylguanosine-3'-phosphate
  modified_base 13: mod_base = OTHER; note = 2'-O-methyladenosine-3'-phosphate
  modified_base 14: mod_base = OTHER; note = 2'-fluorouridine-3'-phosphate
  modified_base 15: mod_base = OTHER; note = 2'-O-methylcytidine-3'-phosphate
  modified_base 16: mod_base = OTHER; note = 2'-fluorouridine-3'-phosphate
  modified_base 17: mod_base = OTHER; note = 2'-O-methylcytidine-3'-phosphate
  modified_base 18: mod_base = OTHER; note = 2'-O-methyladenosine-3'-phosphate
  modified_base 19: mod_base = OTHER; note = 2'-O-methylguanosine-3'-phosphate
  modified_base 20: mod_base = OTHER; note = 2'-O-methylcytidine-3'-phosphate
  modified_base 21: mod_base = OTHER; note = 2'-O-methyladenosine-3'-phosphorothioate
  modified_base 22: mod_base = OTHER; note = 2'-O-methyluridine-3'-phosphorothioate
  modified_base 23: mod_base = OTHER; note = 2'-O-methylcytidine
actaactggatgatctcagcatc

SEQ ID NO: 1143 - RNA, 23 nt, synthetic construct
  source 1..23: mol_type = other RNA
  modified_base 1: mod_base = OTHER; note = 2'-O-methyluridine-3'-phosphorothioate
  modified_base 2: mod_base = OTHER; note = 2'-fluorouridine-3'-phosphorothioate
  modified_base 3: mod_base = OTHER; note = 2'-O-methylguanosine-3'-phosphate
  modified_base 4: mod_base = OTHER; note = 2'-O-methyladenosine-3'-phosphate
  modified_base 5: mod_base = OTHER; note = 2'-O-methylcytidine-3'-phosphate
  modified_base 6: mod_base = OTHER; note = 2'-fluorouridine-3'-phosphate
  modified_base 7: mod_base = OTHER; note = 2'-O-methyladenosine-3'-phosphate
  modified_base 8: mod_base = OTHER; note = 2'-O-methyladenosine-3'-phosphate
  modified_base 9: mod_base = OTHER; note = 2'-O-methylcytidine-3'-phosphate
  modified_base 10: mod_base = OTHER; note = 2'-O-methyluridine-3'-phosphate
  modified_base 11: mod_base = OTHER; note = 2'-O-methylguanosine-3'-phosphate
  modified_base 12: mod_base = OTHER; note = 2'-O-methylguanosine-3'-phosphate
  modified_base 13: mod_base = OTHER; note = 2'-O-methyladenosine-3'-phosphate
  modified_base 14: mod_base = OTHER; note = 2'-fluorouridine-3'-phosphate
  modified_base 15: mod_base = OTHER; note = 2'-O-methylguanosine-3'-phosphate
  modified_base 16: mod_base = OTHER; note = 2'-fluoroadenosine-3'-phosphate
  modified_base 17: mod_base = OTHER; note = 2'-O-methyluridine-3'-phosphate
  modified_base 18: mod_base = OTHER; note = 2'-O-methylcytidine-3'-phosphate
  modified_base 19: mod_base = OTHER; note = 2'-O-methyluridine-3'-phosphate
  modified_base 20: mod_base = OTHER; note = 2'-O-methylcytidine-3'-phosphate
  modified_base 21: mod_base = OTHER; note = 2'-O-methyladenosine-3'-phosphorothioate
  modified_base 22: mod_base = OTHER; note = 2'-O-methylguanosine-3'-phosphorothioate
  modified_base 23: mod_base = OTHER; note = 2'-O-methylcytidine
ttgactaactggatgatctcagc

SEQ ID NO: 1144 - RNA, 23 nt, synthetic construct
  source 1..23: mol_type = other RNA
  modified_base 1: mod_base = OTHER; note = 2'-O-methyluridine-3'-phosphorothioate
  modified_base 2: mod_base = OTHER; note = 2'-fluoroadenosine-3'-phosphorothioate
  modified_base 3: mod_base = OTHER; note = 2'-O-methyluridine-3'-phosphate
  modified_base 4: mod_base = OTHER; note = 2'-O-methyluridine-3'-phosphate
  modified_base 5: mod_base = OTHER; note = 2'-O-methylguanosine-3'-phosphate
  modified_base 6: mod_base = OTHER; note = 2'-fluoroadenosine-3'-phosphate
  modified_base 7: mod_base = OTHER; note = 2'-O-methylcytidine-3'-phosphate
  modified_base 8: mod_base = OTHER; note = 2'-O-methyluridine-3'-phosphate
  modified_base 9: mod_base = OTHER; note = 2'-O-methyladenosine-3'-phosphate
  modified_base 10: mod_base = OTHER; note = 2'-O-methyladenosine-3'-phosphate
  modified_base 11: mod_base = OTHER; note = 2'-O-methylcytidine-3'-phosphate
  modified_base 12: mod_base = OTHER; note = 2'-O-methyluridine-3'-phosphate
  modified_base 13: mod_base = OTHER; note = 2'-O-methylguanosine-3'-phosphate
  modified_base 14: mod_base = OTHER; note = 2'-fluoroguanosine-3'-phosphate
  modified_base 15: mod_base = OTHER; note = 2'-O-methyladenosine-3'-phosphate
  modified_base 16: mod_base = OTHER; note = 2'-fluorouridine-3'-phosphate
  modified_base 17: mod_base = OTHER; note = 2'-O-methylguanosine-3'-phosphate
  modified_base 18: mod_base = OTHER; note = 2'-O-methyladenosine-3'-phosphate
  modified_base 19: mod_base = OTHER; note = 2'-O-methyluridine-3'-phosphate
  modified_base 20: mod_base = OTHER; note = 2'-O-methylcytidine-3'-phosphate
  modified_base 21: mod_base = OTHER; note = 2'-O-methyluridine-3'-phosphorothioate
  modified_base 22: mod_base = OTHER; note = 2'-O-methylcytidine-3'-phosphorothioate
  modified_base 23: mod_base = OTHER; note = 2'-O-methyladenosine
tattgactaactggatgatctca

SEQ ID NO: 1145 - RNA, 23 nt, synthetic construct
  source 1..23: mol_type = other RNA
  modified_base 1: mod_base = OTHER; note = 2'-O-methyladenosine-3'-phosphorothioate
  modified_base 2: mod_base = OTHER; note = 2'-fluoroguanosine-3'-phosphorothioate
  modified_base 3: mod_base = OTHER; note = 2'-O-methylcytidine-3'-phosphate
  modified_base 4: mod_base = OTHER; note = 2'-O-methyladenosine-3'-phosphate
  modified_base 5: mod_base = OTHER; note = 2'-O-methyluridine-3'-phosphate
  modified_base 6: mod_base = OTHER; note = 2'-fluorouridine-3'-phosphate
  modified_base 7: mod_base = OTHER; note = 2'-O-methylguanosine-3'-phosphate
  modified_base 8: mod_base = OTHER; note = 2'-O-methyladenosine-3'-phosphate
  modified_base 9: mod_base = OTHER; note = 2'-O-methylcytidine-3'-phosphate
  modified_base 10: mod_base = OTHER; note = 2'-O-methyluridine-3'-phosphate
  modified_base 11: mod_base = OTHER; note = 2'-O-methyladenosine-3'-phosphate
  modified_base 12: mod_base = OTHER; note = 2'-O-methyladenosine-3'-phosphate
  modified_base 13: mod_base = OTHER; note = 2'-O-methylcytidine-3'-phosphate
  modified_base 14: mod_base = OTHER; note = 2'-fluorouridine-3'-phosphate
  modified_base 15: mod_base = OTHER; note = 2'-O-methylguanosine-3'-phosphate
  modified_base 16: mod_base = OTHER; note = 2'-fluoroguanosine-3'-phosphate
  modified_base 17: mod_base = OTHER; note = 2'-O-methyladenosine-3'-phosphate
  modified_base 18: mod_base = OTHER; note = 2'-O-methyluridine-3'-phosphate
  modified_base 19: mod_base = OTHER; note = 2'-O-methylguanosine-3'-phosphate
  modified_base 20: mod_base = OTHER; note = 2'-O-methyladenosine-3'-phosphate
  modified_base 21: mod_base = OTHER; note = 2'-O-methyluridine-3'-phosphorothioate
  modified_base 22: mod_base = OTHER; note = 2'-O-methylcytidine-3'-phosphorothioate
  modified_base 23: mod_base = OTHER; note = 2'-O-methyluridine
agcattgactaactggatgatct

SEQ ID NO: 1146 - RNA, 23 nt, synthetic construct
  source 1..23: mol_type = other RNA
  modified_base 1: mod_base = OTHER; note = 2'-O-methyluridine-3'-phosphorothioate
  modified_base 2: mod_base = OTHER; note = 2'-fluorocytidine-3'-phosphorothioate
  modified_base 3: mod_base = OTHER; note = 2'-O-methyluridine-3'-phosphate
  modified_base 4: mod_base = OTHER; note = 2'-O-methyluridine-3'-phosphate
  modified_base 5: mod_base = OTHER; note = 2'-O-methyladenosine-3'-phosphate
  modified_base 6: mod_base = OTHER; note = 2'-fluoroguanosine-3'-phosphate
  modified_base 7: mod_base = OTHER; note = 2'-O-methylcytidine-3'-phosphate
  modified_base 8: mod_base = OTHER; note = 2'-O-methyladenosine-3'-phosphate
  modified_base 9: mod_base = OTHER; note = 2'-O-methyluridine-3'-phosphate
  modified_base 10: mod_base = OTHER; note = 2'-O-methyluridine-3'-phosphate
  modified_base 11: mod_base = OTHER; note = 2'-O-methylguanosine-3'-phosphate
  modified_base 12: mod_base = OTHER; note = 2'-O-methyladenosine-3'-phosphate
  modified_base 13: mod_base = OTHER; note = 2'-O-methylcytidine-3'-phosphate
  modified_base 14: mod_base = OTHER; note = 2'-fluorouridine-3'-phosphate
  modified_base 15: mod_base = OTHER; note = 2'-O-methyladenosine-3'-phosphate
  modified_base 16: mod_base = OTHER; note = 2'-fluoroadenosine-3'-phosphate
  modified_base 17: mod_base = OTHER; note = 2'-O-methylcytidine-3'-phosphate
  modified_base 18: mod_base = OTHER; note = 2'-O-methyluridine-3'-phosphate
  modified_base 19: mod_base = OTHER; note = 2'-O-methylguanosine-3'-phosphate
  modified_base 20: mod_base = OTHER; note = 2'-O-methylguanosine-3'-phosphate
  modified_base 21: mod_base = OTHER; note = 2'-O-methyladenosine-3'-phosphorothioate
  modified_base 22: mod_base = OTHER; note = 2'-O-methyluridine-3'-phosphorothioate
  modified_base 23: mod_base = OTHER; note = 2'-O-methylguanosine
tcttagcattgactaactggatg

SEQ ID NO: 1147 - RNA, 23 nt, synthetic construct
  source 1..23: mol_type = other RNA
  modified_base 1: mod_base = OTHER; note = 2'-O-methyluridine-3'-phosphorothioate
  modified_base 2: mod_base = OTHER; note = 2'-fluoroadenosine-3'-phosphorothioate
  modified_base 3: mod_base = OTHER; note = 2'-O-methyluridine-3'-phosphate
  modified_base 4: mod_base = OTHER; note = 2'-O-methylguanosine-3'-phosphate
  modified_base 5: mod_base = OTHER; note = 2'-O-methylcytidine-3'-phosphate
  modified_base 6: mod_base = OTHER; note = 2'-fluorouridine-3'-phosphate
  modified_base 7: mod_base = OTHER; note = 2'-O-methyluridine-3'-phosphate
  modified_base 8: mod_base = OTHER; note = 2'-O-methyladenosine-3'-phosphate
  modified_base 9: mod_base = OTHER; note = 2'-O-methylguanosine-3'-phosphate
  modified_base 10: mod_base = OTHER; note = 2'-O-methylcytidine-3'-phosphate
  modified_base 11: mod_base = OTHER; note = 2'-O-methyladenosine-3'-phosphate
  modified_base 12: mod_base = OTHER; note = 2'-O-methyluridine-3'-phosphate
  modified_base 13: mod_base = OTHER; note = 2'-O-methyluridine-3'-phosphate
  modified_base 14: mod_base = OTHER; note = 2'-fluoroguanosine-3'-phosphate
  modified_base 15: mod_base = OTHER; note = 2'-O-methyladenosine-3'-phosphate
  modified_base 16: mod_base = OTHER; note = 2'-fluorocytidine-3'-phosphate
  modified_base 17: mod_base = OTHER; note = 2'-O-methyluridine-3'-phosphate
  modified_base 18: mod_base = OTHER; note = 2'-O-methyladenosine-3'-phosphate
  modified_base 19: mod_base = OTHER; note = 2'-O-methyladenosine-3'-phosphate
  modified_base 20: mod_base = OTHER; note = 2'-O-methylcytidine-3'-phosphate
  modified_base 21: mod_base = OTHER; note = 2'-O-methyluridine-3'-phosphorothioate
  modified_base 22: mod_base = OTHER; note = 2'-O-methylguanosine-3'-phosphorothioate
  modified_base 23: mod_base = OTHER; note = 2'-O-methylguanosine
tatgcttagcattgactaactgg

SEQ ID NO: 1148 - RNA, 23 nt, synthetic construct
  source 1..23: mol_type = other RNA
  modified_base 1: mod_base = OTHER; note = 2'-O-methyladenosine-3'-phosphorothioate
  modified_base 2: mod_base = OTHER; note = 2'-fluorouridine-3'-phosphorothioate
  modified_base 3: mod_base = OTHER; note = 2'-O-methyladenosine-3'-phosphate
  modified_base 4: mod_base = OTHER; note = 2'-O-methyluridine-3'-phosphate
  modified_base 5: mod_base = OTHER; note = 2'-O-methylguanosine-3'-phosphate
  modified_base 6: mod_base = OTHER; note = 2'-fluorocytidine-3'-phosphate
  modified_base 7: mod_base = OTHER; note = 2'-O-methyluridine-3'-phosphate
  modified_base 8: mod_base = OTHER; note = 2'-O-methyluridine-3'-phosphate
  modified_base 9: mod_base = OTHER; note = 2'-O-methyladenosine-3'-phosphate
  modified_base 10: mod_base = OTHER; note = 2'-O-methylguanosine-3'-phosphate
  modified_base 11: mod_base = OTHER; note = 2'-O-methylcytidine-3'-phosphate
  modified_base 12: mod_base = OTHER; note = 2'-O-methyladenosine-3'-phosphate
  modified_base 13: mod_base = OTHER; note = 2'-O-methyluridine-3'-phosphate
  modified_base 14: mod_base = OTHER; note = 2'-fluorouridine-3'-phosphate
  modified_base 15: mod_base = OTHER; note = 2'-O-methylguanosine-3'-phosphate
  modified_base 16: mod_base = OTHER; note = 2'-fluoroadenosine-3'-phosphate
  modified_base 17: mod_base = OTHER; note = 2'-O-methylcytidine-3'-phosphate
  modified_base 18: mod_base = OTHER; note = 2'-O-methyluridine-3'-phosphate
  modified_base 19: mod_base = OTHER; note = 2'-O-methyladenosine-3'-phosphate
  modified_base 20: mod_base = OTHER; note = 2'-O-methyladenosine-3'-phosphate
  modified_base 21: mod_base = OTHER; note = 2'-O-methylcytidine-3'-phosphorothioate
  modified_base 22: mod_base = OTHER; note = 2'-O-methyluridine-3'-phosphorothioate
  modified_base 23: mod_base = OTHER; note = 2'-O-methylguanosine
atatgcttagcattgactaactg

SEQ ID NO: 1149 - RNA, 23 nt, synthetic construct
  source 1..23: mol_type = other RNA
  modified_base 1: mod_base = OTHER; note = 2'-O-methyluridine-3'-phosphorothioate
  modified_base 2: mod_base = OTHER; note = 2'-fluoroadenosine-3'-phosphorothioate
  modified_base 3: mod_base = OTHER; note = 2'-O-methyluridine-3'-phosphate
  modified_base 4: mod_base = OTHER; note = 2'-O-methyladenosine-3'-phosphate
  modified_base 5: mod_base = OTHER; note = 2'-O-methyluridine-3'-phosphate
  modified_base 6: mod_base = OTHER; note = 2'-fluoroguanosine-3'-phosphate
  modified_base 7: mod_base = OTHER; note = 2'-O-methylcytidine-3'-phosphate
  modified_base 8: mod_base = OTHER; note = 2'-O-methyluridine-3'-phosphate
  modified_base 9: mod_base = OTHER; note = 2'-O-methyluridine-3'-phosphate
  modified_base 10: mod_base = OTHER; note = 2'-O-methyladenosine-3'-phosphate
  modified_base 11: mod_base = OTHER; note = 2'-O-methylguanosine-3'-phosphate
  modified_base 12: mod_base = OTHER; note = 2'-O-methylcytidine-3'-phosphate
  modified_base 13: mod_base = OTHER; note = 2'-O-methyladenosine-3'-phosphate
  modified_base 14: mod_base = OTHER; note = 2'-fluorouridine-3'-phosphate
  modified_base 15: mod_base = OTHER; note = 2'-O-methyluridine-3'-phosphate
  modified_base 16: mod_base = OTHER; note = 2'-fluoroguanosine-3'-phosphate
  modified_base 17: mod_base = OTHER; note = 2'-O-methyladenosine-3'-phosphate
  modified_base 18: mod_base = OTHER; note = 2'-O-methylcytidine-3'-phosphate
  modified_base 19: mod_base = OTHER; note = 2'-O-methyluridine-3'-phosphate
  modified_base 20: mod_base = OTHER; note = 2'-O-methyladenosine-3'-phosphate
  modified_base 21: mod_base = OTHER; note = 2'-O-methyladenosine-3'-phosphorothioate
  modified_base 22: mod_base = OTHER; note = 2'-O-methylcytidine-3'-phosphorothioate
  modified_base 23: mod_base = OTHER; note = 2'-O-methyluridine
tatatgcttagcattgactaact

SEQ ID NO: 1150 - RNA, 23 nt, synthetic construct
  source 1..23: mol_type = other RNA
  modified_base 1: mod_base = OTHER; note = 2'-O-methyluridine-3'-phosphorothioate
  modified_base 2: mod_base = OTHER; note = 2'-fluoroguanosine-3'-phosphorothioate
  modified_base 3: mod_base = OTHER; note = 2'-O-methylguanosine-3'-phosphate
  modified_base 4: mod_base = OTHER; note = 2'-O-methylguanosine-3'-phosphate
  modified_base 5: mod_base = OTHER; note = 2'-O-methyladenosine-3'-phosphate
  modified_base 6: mod_base = OTHER; note = 2'-fluorouridine-3'-phosphate
  modified_base 7: mod_base = OTHER; note = 2'-O-methyladenosine-3'-phosphate
  modified_base 8: mod_base = OTHER; note = 2'-O-methyluridine-3'-phosphate
  modified_base 9: mod_base = OTHER; note = 2'-O-methylguanosine-3'-phosphate
  modified_base 10: mod_base = OTHER; note = 2'-O-methylcytidine-3'-phosphate
  modified_base 11: mod_base = OTHER; note = 2'-O-methyluridine-3'-phosphate
  modified_base 12: mod_base = OTHER; note = 2'-O-methyluridine-3'-phosphate
  modified_base 13: mod_base = OTHER; note = 2'-O-methyladenosine-3'-phosphate
  modified_base 14: mod_base = OTHER; note = 2'-fluoroguanosine-3'-phosphate
  modified_base 15: mod_base = OTHER; note = 2'-O-methylcytidine-3'-phosphate
  modified_base 16: mod_base = OTHER; note = 2'-fluoroadenosine-3'-phosphate
  modified_base 17: mod_base = OTHER; note = 2'-O-methyluridine-3'-phosphate
  modified_base 18: mod_base = OTHER; note = 2'-O-methyluridine-3'-phosphate
  modified_base 19: mod_base = OTHER; note = 2'-O-methylguanosine-3'-phosphate
  modified_base 20: mod_base = OTHER; note = 2'-O-methyladenosine-3'-phosphate
  modified_base 21: mod_base = OTHER; note = 2'-O-methylcytidine-3'-phosphorothioate
  modified_base 22: mod_base = OTHER; note = 2'-O-methyluridine-3'-phosphorothioate
  modified_base 23: mod_base = OTHER; note = 2'-O-methyladenosine
tgggatatgcttagcattgacta

SEQ ID NO: 1151 - RNA, 23 nt, synthetic construct
  source 1..23: mol_type = other RNA
  modified_base 1: mod_base = OTHER; note = 2'-O-methyladenosine-3'-phosphorothioate
  modified_base 2: mod_base = OTHER; note = 2'-fluoroadenosine-3'-phosphorothioate
  modified_base 3: mod_base = OTHER; note = 2'-O-methylcytidine-3'-phosphate
  modified_base 4: mod_base = OTHER; note = 2'-O-methyluridine-3'-phosphate
  modified_base 5: mod_base = OTHER; note = 2'-O-methyluridine-3'-phosphate
  modified_base 6: mod_base = OTHER; note = 2'-fluoroguanosine-3'-phosphate
  modified_base 7: mod_base = OTHER; note = 2'-O-methyluridine-3'-phosphate
  modified_base 8: mod_base = OTHER; note = 2'-O-methyladenosine-3'-phosphate
  modified_base 9: mod_base = OTHER; note = 2'-O-methylguanosine-3'-phosphate
  modified_base 10: mod_base = OTHER; note = 2'-O-methylguanosine-3'-phosphate
  modified_base 11: mod_base = OTHER; note = 2'-O-methylcytidine-3'-phosphate
  modified_base 12: mod_base = OTHER; note = 2'-O-methyluridine-3'-phosphate
  modified_base 13: mod_base = OTHER; note = 2'-O-methylguanosine-3'-phosphate
  modified_base 14: mod_base = OTHER; note = 2'-fluoroguanosine-3'-phosphate
  modified_base 15: mod_base = OTHER; note = 2'-O-methylguanosine-3'-phosphate
  modified_base 16: mod_base = OTHER; note = 2'-fluoroadenosine-3'-phosphate
  modified_base 17: mod_base = OTHER; note = 2'-O-methyluridine-3'-phosphate
  modified_base 18: mod_base = OTHER; note = 2'-O-methyladenosine-3'-phosphate
  modified_base 19: mod_base = OTHER; note = 2'-O-methyluridine-3'-phosphate
  modified_base 20: mod_base = OTHER; note = 2'-O-methylguanosine-3'-phosphate
  modified_base 21: mod_base = OTHER; note = 2'-O-methylcytidine-3'-phosphorothioate
  modified_base 22: mod_base = OTHER; note = 2'-O-methyluridine-3'-phosphorothioate
  modified_base 23: mod_base = OTHER; note = 2'-O-methyluridine
aacttgtaggctgggatatgctt

SEQ ID NO: 1152 - RNA, 23 nt, synthetic construct
  source 1..23: mol_type = other RNA
  modified_base 1: mod_base = OTHER; note = 2'-O-methyluridine-3'-phosphorothioate
  modified_base 2: mod_base = OTHER; note = 2'-fluoroadenosine-3'-phosphorothioate
  modified_base 3: mod_base = OTHER; note = 2'-O-methyladenosine-3'-phosphate
  modified_base 4: mod_base = OTHER; note = 2'-O-methylcytidine-3'-phosphate
  modified_base 5: mod_base = OTHER; note = 2'-O-methyluridine-3'-phosphate
  modified_base 6: mod_base = OTHER; note = 2'-fluorouridine-3'-phosphate
  modified_base 7: mod_base = OTHER; note = 2'-O-methylguanosine-3'-phosphate
  modified_base 8: mod_base = OTHER; note = 2'-O-methyluridine-3'-phosphate
  modified_base 9: mod_base = OTHER; note = 2'-O-methyladenosine-3'-phosphate
  modified_base 10: mod_base = OTHER; note = 2'-O-methylguanosine-3'-phosphate
  modified_base 11: mod_base = OTHER; note = 2'-O-methylguanosine-3'-phosphate
  modified_base 12: mod_base = OTHER; note = 2'-O-methylcytidine-3'-phosphate
  modified_base 13: mod_base = OTHER; note = 2'-O-methyluridine-3'-phosphate
  modified_base 14: mod_base = OTHER; note = 2'-fluoroguanosine-3'-phosphate
  modified_base 15: mod_base = OTHER; note = 2'-O-methylguanosine-3'-phosphate
  modified_base 16: mod_base = OTHER; note = 2'-fluoroguanosine-3'-phosphate
  modified_base 17: mod_base = OTHER; note = 2'-O-methyladenosine-3'-phosphate
  modified_base 18: mod_base = OTHER; note = 2'-O-methyluridine-3'-phosphate
  modified_base 19: mod_base = OTHER; note = 2'-O-methyladenosine-3'-phosphate
  modified_base 20: mod_base = OTHER; note = 2'-O-methyluridine-3'-phosphate
  modified_base 21: mod_base = OTHER; note = 2'-O-methylguanosine-3'-phosphorothioate
  modified_base 22: mod_base = OTHER; note = 2'-O-methylcytidine-3'-phosphorothioate
  modified_base 23: mod_base = OTHER; note = 2'-O-methyluridine
taacttgtaggctgggatatgct

SEQ ID NO: 1153 - RNA, 23 nt, synthetic construct
  source 1..23: mol_type = other RNA
  modified_base 1: mod_base = OTHER; note = 2'-O-methyluridine-3'-phosphorothioate
  modified_base 2: mod_base = OTHER; note = 2'-fluorocytidine-3'-phosphorothioate
  modified_base 3: mod_base = OTHER; note = 2'-O-methyladenosine-3'-phosphate
  modified_base 4: mod_base = OTHER; note = 2'-O-methyladenosine-3'-phosphate
  modified_base 5: mod_base = OTHER; note = 2'-O-methylcytidine-3'-phosphate
  modified_base 6: mod_base = OTHER; note = 2'-fluorouridine-3'-phosphate
  modified_base 7: mod_base = OTHER; note = 2'-O-methyluridine-3'-phosphate
  modified_base 8: mod_base = OTHER; note = 2'-O-methylguanosine-3'-phosphate
  modified_base 9: mod_base = OTHER; note = 2'-O-methyluridine-3'-phosphate
  modified_base 10: mod_base = OTHER; note = 2'-O-methyladenosine-3'-phosphate
  modified_base 11: mod_base = OTHER; note = 2'-O-methylguanosine-3'-phosphate
  modified_base 12: mod_base = OTHER; note = 2'-O-methylguanosine-3'-phosphate
  modified_base 13: mod_base = OTHER; note = 2'-O-methylcytidine-3'-phosphate
  modified_base 14: mod_base = OTHER; note = 2'-fluorouridine-3'-phosphate
  modified_base 15: mod_base = OTHER; note = 2'-O-methylguanosine-3'-phosphate
  modified_base 16: mod_base = OTHER; note = 2'-fluoroguanosine-3'-phosphate
  modified_base 17: mod_base = OTHER; note = 2'-O-methylguanosine-3'-phosphate
  modified_base 18: mod_base = OTHER; note = 2'-O-methyladenosine-3'-phosphate
  modified_base 19: mod_base = OTHER; note = 2'-O-methyluridine-3'-phosphate
  modified_base 20: mod_base = OTHER; note = 2'-O-methyladenosine-3'-phosphate
  modified_base 21: mod_base = OTHER; note = 2'-O-methyluridine-3'-phosphorothioate
  modified_base 22: mod_base = OTHER; note = 2'-O-methylguanosine-3'-phosphorothioate
  modified_base 23: mod_base = OTHER; note = 2'-O-methylcytidine
tcaacttgtaggctgggatatgc

SEQ ID NO: 1154 - RNA, 23 nt, synthetic construct
  source 1..23: mol_type = other RNA
  modified_base 1: mod_base = OTHER; note = 2'-O-methyladenosine-3'-phosphorothioate
  modified_base 2: mod_base = OTHER; note = 2'-fluoroguanosine-3'-phosphorothioate
  modified_base 3: mod_base = OTHER; note = 2'-O-methyladenosine-3'-phosphate
  modified_base 4: mod_base = OTHER; note = 2'-O-methylguanosine-3'-phosphate
  modified_base 5: mod_base = OTHER; note = 2'-O-methyluridine-3'-phosphate
  modified_base 6: mod_base = OTHER; note = 2'-fluorouridine-3'-phosphate
  modified_base 7: mod_base = OTHER; note = 2'-O-methyluridine-3'-phosphate
  modified_base 8: mod_base = OTHER; note = 2'-O-methylcytidine-3'-phosphate
  modified_base 9: mod_base = OTHER; note = 2'-O-methylcytidine-3'-phosphate
  modified_base 10: mod_base = OTHER; note = 2'-O-methyladenosine-3'-phosphate
  modified_base 11: mod_base = OTHER; note = 2'-O-methyladenosine-3'-phosphate
  modified_base 12: mod_base = OTHER; note = 2'-O-methylcytidine-3'-phosphate
  modified_base 13: mod_base = OTHER; note = 2'-O-methyluridine-3'-phosphate
  modified_base 14: mod_base = OTHER; note = 2'-fluorouridine-3'-phosphate
  modified_base 15: mod_base = OTHER; note = 2'-O-methylguanosine-3'-phosphate
  modified_base 16: mod_base = OTHER; note = 2'-fluorouridine-3'-phosphate
  modified_base 17: mod_base = OTHER; note = 2'-O-methyladenosine-3'-phosphate
  modified_base 18: mod_base = OTHER; note = 2'-O-methylguanosine-3'-phosphate
  modified_base 19: mod_base = OTHER; note = 2'-O-methylguanosine-3'-phosphate
  modified_base 20: mod_base = OTHER; note = 2'-O-methylcytidine-3'-phosphate
  modified_base 21: mod_base = OTHER; note = 2'-O-methyluridine-3'-phosphorothioate
  modified_base 22: mod_base = OTHER; note = 2'-O-methylguanosine-3'-phosphorothioate
  modified_base 23: mod_base = OTHER; note = 2'-O-methylguanosine
agagtttccaacttgtaggctgg

SEQ ID NO: 1155 - RNA, 23 nt, synthetic construct
  source 1..23: mol_type = other RNA
  modified_base 1: mod_base = OTHER; note = 2'-O-methyluridine-3'-phosphorothioate
  modified_base 2: mod_base = OTHER; note = 2'-fluorocytidine-3'-phosphorothioate
  modified_base 3: mod_base = OTHER; note = 2'-O-methylcytidine-3'-phosphate
  modified_base 4: mod_base = OTHER; note = 2'-O-methyladenosine-3'-phosphate
  modified_base 5: mod_base = OTHER; note = 2'-O-methyluridine-3'-phosphate
  modified_base 6: mod_base = OTHER; note = 2'-fluorocytidine-3'-phosphate
  modified_base 7: mod_base = OTHER; note = 2'-O-methyladenosine-3'-phosphate
  modified_base 8: mod_base = OTHER; note = 2'-O-methylguanosine-3'-phosphate
  modified_base 9: mod_base = OTHER; note = 2'-O-methyladenosine-3'-phosphate
  modified_base 10: mod_base = OTHER; note = 2'-O-methylguanosine-3'-phosphate
  modified_base 11: mod_base = OTHER; note = 2'-O-methyluridine-3'-phosphate
  modified_base 12: mod_base = OTHER; note = 2'-O-methyluridine-3'-phosphate
  modified_base 13: mod_base = OTHER; note = 2'-O-methyluridine-3'-phosphate
  modified_base 14: mod_base = OTHER; note = 2'-fluorocytidine-3'-phosphate
  modified_base 15: mod_base = OTHER; note = 2'-O-methylcytidine-3'-phosphate
  modified_base 16: mod_base = OTHER; note = 2'-fluoroadenosine-3'-phosphate
  modified_base 17: mod_base = OTHER; note = 2'-O-methyladenosine-3'-phosphate
  modified_base 18: mod_base = OTHER; note = 2'-O-methylcytidine-3'-phosphate
  modified_base 19: mod_base = OTHER; note = 2'-O-methyluridine-3'-phosphate
  modified_base 20: mod_base = OTHER; note = 2'-O-methyluridine-3'-phosphate
  modified_base 21: mod_base = OTHER; note = 2'-O-methylguanosine-3'-phosphorothioate
  modified_base 22: mod_base = OTHER; note = 2'-O-methyluridine-3'-phosphorothioate
  modified_base 23: mod_base = OTHER; note = 2'-O-methyladenosine
tccatcagagtttccaacttgta

SEQ ID NO: 1156 - RNA, 23 nt, synthetic construct
  source 1..23: mol_type = other RNA
  modified_base 1: mod_base = OTHER; note = 2'-O-methyluridine-3'-phosphorothioate
  modified_base 2: mod_base = OTHER; note = 2'-fluorouridine-3'-phosphorothioate
  modified_base 3: mod_base = OTHER; note = 2'-O-methylcytidine-3'-phosphate
  modified_base 4: mod_base = OTHER; note = 2'-O-methylcytidine-3'-phosphate
  modified_base 5: mod_base = OTHER; note = 2'-O-methyladenosine-3'-phosphate
  modified_base 6: mod_base = OTHER; note = 2'-fluorouridine-3'-phosphate
  modified_base 7: mod_base = OTHER; note = 2'-O-methylcytidine-3'-phosphate
  modified_base 8: mod_base = OTHER; note = 2'-O-methyladenosine-3'-phosphate
  modified_base 9: mod_base = OTHER; note = 2'-O-methylguanosine-3'-phosphate
  modified_base 10: mod_base = OTHER; note = 2'-O-methyladenosine-3'-phosphate
  modified_base 11: mod_base = OTHER; note = 2'-O-methylguanosine-3'-phosphate
  modified_base 12: mod_base = OTHER; note = 2'-O-methyluridine-3'-phosphate
  modified_base 13: mod_base = OTHER; note = 2'-O-methyluridine-3'-phosphate
  modified_base 14: mod_base = OTHER; note = 2'-fluorouridine-3'-phosphate
  modified_base 15: mod_base = OTHER; note = 2'-O-methylcytidine-3'-phosphate
  modified_base 16: mod_base = OTHER; note = 2'-fluorocytidine-3'-phosphate
  modified_base 17: mod_base = OTHER; note = 2'-O-methyladenosine-3'-phosphate
  modified_base 18: mod_base = OTHER; note = 2'-O-methyladenosine-3'-phosphate
  modified_base 19: mod_base = OTHER; note = 2'-O-methylcytidine-3'-phosphate
  modified_base 20: mod_base = OTHER; note = 2'-O-methyluridine-3'-phosphate
  modified_base 21: mod_base = OTHER; note = 2'-O-methyluridine-3'-phosphorothioate
  modified_base 22: mod_base = OTHER; note = 2'-O-methylguanosine-3'-phosphorothioate
  modified_base 23: mod_base = OTHER; note = 2'-O-methyluridine
ttccatcagagtttccaacttgt

SEQ ID NO: 1157 - RNA, 23 nt, synthetic construct
  source 1..23: mol_type = other RNA
  modified_base 1: mod_base = OTHER; note = 2'-O-methyluridine-3'-phosphorothioate
  modified_base 2: mod_base = OTHER; note = 2'-fluoroguanosine-3'-phosphorothioate
  modified_base 3: mod_base = OTHER; note = 2'-O-methyladenosine-3'-phosphate
  modified_base 4: mod_base = OTHER; note = 2'-O-methylguanosine-3'-phosphate
  modified_base 5: mod_base = OTHER; note = 2'-O-methyluridine-3'-phosphate
  modified_base 6: mod_base = OTHER; note = 2'-fluorouridine-3'-phosphate
  modified_base 7: mod_base = OTHER; note = 2'-O-methyluridine-3'-phosphate
  modified_base 8: mod_base = OTHER; note = 2'-O-methylcytidine-3'-phosphate
  modified_base 9: mod_base = OTHER; note = 2'-O-methylcytidine-3'-phosphate
  modified_base 10: mod_base = OTHER; note = 2'-O-methyladenosine-3'-phosphate
  modified_base 11: mod_base = OTHER; note = 2'-O-methyluridine-3'-phosphate
  modified_base 12: mod_base = OTHER; note = 2'-O-methylcytidine-3'-phosphate
  modified_base 13: mod_base = OTHER; note = 2'-O-methyladenosine-3'-phosphate
  modified_base 14: mod_base = OTHER; note = 2'-fluoroguanosine-3'-phosphate
  modified_base 15: mod_base = OTHER; note = 2'-O-methyladenosine-3'-phosphate
  modified_base 16: mod_base = OTHER; note = 2'-fluoroguanosine-3'-phosphate
  modified_base 17: mod_base = OTHER; note = 2'-O-methyluridine-3'-phosphate
  modified_base 18: mod_base = OTHER; note = 2'-O-methyluridine-3'-phosphate
  modified_base 19: mod_base = OTHER; note = 2'-O-methyluridine-3'-phosphate
  modified_base 20: mod_base = OTHER; note = 2'-O-methylcytidine-3'-phosphate
  modified_base 21: mod_base = OTHER; note = 2'-O-methylcytidine-3'-phosphorothioate
  modified_base 22: mod_base = OTHER; note = 2'-O-methyladenosine-3'-phosphorothioate
  modified_base 23: mod_base = OTHER; note = 2'-O-methyladenosine
tgagtttccatcagagtttccaa

SEQ ID NO: 1158 - RNA, 23 nt, synthetic construct
  source 1..23: mol_type = other RNA
  modified_base 1: mod_base = OTHER; note = 2'-O-methyluridine-3'-phosphorothioate
  modified_base 2: mod_base = OTHER; note = 2'-fluoroadenosine-3'-phosphorothioate
  modified_base 3: mod_base = OTHER; note = 2'-O-methylcytidine-3'-phosphate
  modified_base 4: mod_base = OTHER; note = 2'-O-methyladenosine-3'-phosphate
  modified_base 5: mod_base = OTHER; note = 2'-O-methylcytidine-3'-phosphate
  modified_base 6: mod_base = OTHER; note = 2'-fluorocytidine-3'-phosphate
  modified_base 7: mod_base = OTHER; note = 2'-O-methyladenosine-3'-phosphate
  modified_base 8: mod_base = OTHER; note = 2'-O-methylcytidine-3'-phosphate
  modified_base 9: mod_base = OTHER; note = 2'-O-methylguanosine-3'-phosphate
  modified_base 10: mod_base = OTHER; note = 2'-O-methylcytidine-3'-phosphate
  modified_base 11: mod_base = OTHER; note = 2'-O-methyluridine-3'-phosphate
  modified_base 12: mod_base = OTHER; note = 2'-O-methylcytidine-3'-phosphate
  modified_base 13: mod_base = OTHER; note = 2'-O-methyladenosine-3'-phosphate
  modified_base 14: mod_base = OTHER; note = 2'-fluorouridine-3'-phosphate
  modified_base 15: mod_base = OTHER; note = 2'-O-methylguanosine-3'-phosphate
  modified_base 16: mod_base = OTHER; note = 2'-fluoroadenosine-3'-phosphate
  modified_base 17: mod_base = OTHER; note = 2'-O-methylguanosine-3'-phosphate
  modified_base 18: mod_base = OTHER; note = 2'-O-methyluridine-3'-phosphate
  modified_base 19: mod_base = OTHER; note = 2'-O-methyluridine-3'-phosphate
  modified_base 20: mod_base = OTHER; note = 2'-O-methyluridine-3'-phosphate
  modified_base 21: mod_base = OTHER; note = 2'-O-methylcytidine-3'-phosphorothioate
  modified_base 22: mod_base = OTHER; note = 2'-O-methylcytidine-3'-phosphorothioate
  modified_base 23: mod_base = OTHER; note = 2'-O-methyladenosine
tacaccacgctcatgagtttcca

SEQ ID NO: 1159 - RNA, 23 nt, synthetic construct
  source 1..23: mol_type = other RNA
  modified_base 1: mod_base = OTHER; note = 2'-O-methyluridine-3'-phosphorothioate
  modified_base 2: mod_base = OTHER; note = 2'-fluoroadenosine-3'-phosphorothioate
  modified_base 3: mod_base = OTHER; note = 2'-O-methyluridine-3'-phosphate
  modified_base 4: mod_base = OTHER; note = 2'-O-methyladenosine-3'-phosphate
  modified_base 5: mod_base = OTHER; note = 2'-O-methylcytidine-3'-phosphate
  modified_base 6: mod_base = OTHER; note = 2'-fluoroadenosine-3'-phosphate
  modified_base 7: mod_base = OTHER; note = 2'-O-methylcytidine-3'-phosphate
  modified_base 8: mod_base = OTHER; note = 2'-O-methylcytidine-3'-phosphate
  modified_base 9: mod_base = OTHER; note = 2'-O-methyladenosine-3'-phosphate
  modified_base 10: mod_base = OTHER; note = 2'-O-methylcytidine-3'-phosphate
  modified_base 11: mod_base = OTHER; note = 2'-O-methylguanosine-3'-phosphate
  modified_base 12: mod_base = OTHER; note = 2'-O-methylcytidine-3'-phosphate
  modified_base 13: mod_base = OTHER; note = 2'-O-methyluridine-3'-phosphate
  modified_base 14: mod_base = OTHER; note = 2'-fluorocytidine-3'-phosphate
  modified_base 15: mod_base = OTHER; note = 2'-O-methyladenosine-3'-phosphate
  modified_base 16: mod_base = OTHER; note = 2'-fluorouridine-3'-phosphate
  modified_base 17: mod_base = OTHER; note = 2'-O-methylguanosine-3'-phosphate
  modified_base 18: mod_base = OTHER; note = 2'-O-methyladenosine-3'-phosphate
  modified_base 19: mod_base = OTHER; note = 2'-O-methylguanosine-3'-phosphate
  modified_base 20: mod_base = OTHER; note = 2'-O-methyluridine-3'-phosphate
  modified_base 21: mod_base = OTHER; note = 2'-O-methyluridine-3'-phosphorothioate
  modified_base 22: mod_base = OTHER; note = 2'-O-methyluridine-3'-phosphorothioate
  modified_base 23: mod_base = OTHER; note = 2'-O-methylcytidine
tatacaccacgctcatgagtttc

SEQ ID NO: 1160 - RNA, 23 nt, synthetic construct
  source 1..23: mol_type = other RNA
  modified_base 1: mod_base = OTHER; note = 2'-O-methyladenosine-3'-phosphorothioate
  modified_base 2: mod_base = OTHER; note = 2'-fluoroguanosine-3'-phosphorothioate
  modified_base 3: mod_base = OTHER; note = 2'-O-methyladenosine-3'-phosphate
  modified_base 4: mod_base = OTHER; note = 2'-O-methyluridine-3'-phosphate
  modified_base 5: mod_base = OTHER; note = 2'-O-methyladenosine-3'-phosphate
  modified_base 6: mod_base = OTHER; note = 2'-fluorocytidine-3'-phosphate
  modified_base 7: mod_base = OTHER; note = 2'-O-methyladenosine-3'-phosphate
  modified_base 8: mod_base = OTHER; note = 2'-O-methylcytidine-3'-phosphate
  modified_base 9: mod_base = OTHER; note = 2'-O-methylcytidine-3'-phosphate
  modified_base 10: mod_base = OTHER; note = 2'-O-methyladenosine-3'-phosphate
  modified_base 11: mod_base = OTHER; note = 2'-O-methylcytidine-3'-phosphate
  modified_base 12: mod_base = OTHER; note = 2'-O-methylguanosine-3'-phosphate
  modified_base 13: mod_base = OTHER; note = 2'-O-methylcytidine-3'-phosphate
  modified_base 14: mod_base = OTHER; note = 2'-fluorouridine-3'-phosphate
  modified_base 15: mod_base = OTHER; note = 2'-O-methylcytidine-3'-phosphate
  modified_base 16: mod_base = OTHER; note = 2'-fluoroadenosine-3'-phosphate
  modified_base 17: mod_base = OTHER; note = 2'-O-methyluridine-3'-phosphate
  modified_base 18: mod_base = OTHER; note = 2'-O-methylguanosine-3'-phosphate
  modified_base 19: mod_base = OTHER; note = 2'-O-methyladenosine-3'-phosphate
  modified_base 20: mod_base = OTHER; note = 2'-O-methylguanosine-3'-phosphate
  modified_base 21: mod_base = OTHER; note = 2'-O-methyluridine-3'-phosphorothioate
  modified_base 22: mod_base = OTHER; note = 2'-O-methyluridine-3'-phosphorothioate
  modified_base 23: mod_base = OTHER; note = 2'-O-methyluridine
agatacaccacgctcatgagttt

SEQ ID NO: 1161 - RNA, 23 nt, synthetic construct
  source 1..23: mol_type = other RNA
  modified_base 1: mod_base = OTHER; note = 2'-O-methyladenosine-3'-phosphorothioate
  modified_base 2: mod_base = OTHER; note = 2'-fluorouridine-3'-phosphorothioate
  modified_base 3: mod_base = OTHER; note = 2'-O-methyladenosine-3'-phosphate
  modified_base 4: mod_base = OTHER; note = 2'-O-methylguanosine-3'-phosphate
  modified_base 5: mod_base = OTHER; note = 2'-O-methyladenosine-3'-phosphate
  modified_base 6: mod_base = OTHER; note = 2'-fluorouridine-3'-phosphate
  modified_base 7: mod_base = OTHER; note = 2'-O-methyladenosine-3'-phosphate
  modified_base 8: mod_base = OTHER; note = 2'-O-methylcytidine-3'-phosphate
  modified_base 9: mod_base = OTHER; note = 2'-O-methyladenosine-3'-phosphate
  modified_base 10: mod_base = OTHER; note = 2'-O-methylcytidine-3'-phosphate
  modified_base 11: mod_base = OTHER; note = 2'-O-methylcytidine-3'-phosphate
  modified_base 12: mod_base = OTHER; note = 2'-O-methyladenosine-3'-phosphate
  modified_base 13: mod_base = OTHER; note = 2'-O-methylcytidine-3'-phosphate
  modified_base 14: mod_base = OTHER; note = 2'-fluoroguanosine-3'-phosphate
  modified_base 15: mod_base = OTHER; note = 2'-O-methylcytidine-3'-phosphate
  modified_base 16: mod_base = OTHER; note = 2'-fluorouridine-3'-phosphate
  modified_base 17: mod_base = OTHER; note = 2'-O-methylcytidine-3'-phosphate
  modified_base 18: mod_base = OTHER; note = 2'-O-methyladenosine-3'-phosphate
  modified_base 19: mod_base = OTHER; note = 2'-O-methyluridine-3'-phosphate
  modified_base 20: mod_base = OTHER; note = 2'-O-methylguanosine-3'-phosphate
  modified_base 21: mod_base = OTHER; note = 2'-O-methyladenosine-3'-phosphorothioate
  modified_base 22: mod_base = OTHER; note = 2'-O-methylguanosine-3'-phosphorothioate
  modified_base 23: mod_base = OTHER; note = 2'-O-methyluridine
atagatacaccacgctcatgagt

SEQ ID NO: 1162 - RNA, 23 nt, synthetic construct
  source 1..23: mol_type = other RNA
  modified_base 1: mod_base = OTHER; note = 2'-O-methyluridine-3'-phosphorothioate
  modified_base 2: mod_base = OTHER; note = 2'-fluoroadenosine-3'-phosphorothioate
  modified_base 3: mod_base = OTHER; note = 2'-O-methyladenosine-3'-phosphate
  modified_base 4: mod_base = OTHER; note = 2'-O-methyluridine-3'-phosphate
  modified_base 5: mod_base = OTHER; note = 2'-O-methyladenosine-3'-phosphate
  modified_base 6: mod_base = OTHER; note = 2'-fluoroguanosine-3'-phosphate
  modified_base 7: mod_base = OTHER; note = 2'-O-methyladenosine-3'-phosphate
  modified_base 8: mod_base = OTHER; note = 2'-O-methyluridine-3'-phosphate
  modified_base 9: mod_base = OTHER; note = 2'-O-methyladenosine-3'-phosphate
  modified_base 10: mod_base = OTHER; note = 2'-O-methylcytidine-3'-phosphate
  modified_base 11: mod_base = OTHER; note = 2'-O-methyladenosine-3'-phosphate
  modified_base 12: mod_base = OTHER; note = 2'-O-methylcytidine-3'-phosphate
  modified_base 13: mod_base = OTHER; note = 2'-O-methylcytidine-3'-phosphate
  modified_base 14: mod_base = OTHER; note = 2'-fluoroadenosine-3'-phosphate
  modified_base 15: mod_base = OTHER; note = 2'-O-methylcytidine-3'-phosphate
  modified_base 16: mod_base = OTHER; note = 2'-fluoroguanosine-3'-phosphate
  modified_base 17: mod_base = OTHER; note = 2'-O-methylcytidine-3'-phosphate
  modified_base 18: mod_base = OTHER; note = 2'-O-methyluridine-3'-phosphate
  modified_base 19: mod_base = OTHER; note = 2'-O-methylcytidine-3'-phosphate
  modified_base 20: mod_base = OTHER; note = 2'-O-methyladenosine-3'-phosphate
  modified_base 21: mod_base = OTHER; note = 2'-O-methyluridine-3'-phosphorothioate
  modified_base 22: mod_base = OTHER; note = 2'-O-methylguanosine-3'-phosphorothioate
  modified_base 23: mod_base = OTHER; note = 2'-O-methyladenosine
taatagatacaccacgctcatga

SEQ ID NO: 1163 - RNA, 23 nt, synthetic construct
  source 1..23: mol_type = other RNA
  modified_base 1: mod_base = OTHER; note = 2'-O-methyluridine-3'-phosphorothioate
  modified_base 2: mod_base = OTHER; note = 2'-fluoroguanosine-3'-phosphorothioate
  modified_base 3: mod_base = OTHER; note = 2'-O-methyladenosine-3'-phosphate
  modified_base 4: mod_base = OTHER; note = 2'-O-methyladenosine-3'-phosphate
  modified_base 5: mod_base = OTHER; note = 2'-O-methyluridine-3'-phosphate
  modified_base 6: mod_base = OTHER; note = 2'-fluoroadenosine-3'-phosphate
  modified_base 7: mod_base = OTHER; note = 2'-O-methylguanosine-3'-phosphate
  modified_base 8: mod_base = OTHER; note = 2'-O-methyladenosine-3'-phosphate
  modified_base 9: mod_base = OTHER; note = 2'-O-methyluridine-3'-phosphate
  modified_base 10: mod_base = OTHER; note = 2'-O-methyladenosine-3'-phosphate
  modified_base 11: mod_base = OTHER; note = 2'-O-methylcytidine-3'-phosphate
  modified_base 12: mod_base = OTHER; note = 2'-O-methyladenosine-3'-phosphate
  modified_base 13: mod_base = OTHER; note = 2'-O-methylcytidine-3'-phosphate
  modified_base 14: mod_base = OTHER; note = 2'-fluorocytidine-3'-phosphate
  modified_base 15: mod_base = OTHER; note = 2'-O-methyladenosine-3'-phosphate
  modified_base 16: mod_base = OTHER; note = 2'-fluorocytidine-3'-phosphate
  modified_base 17: mod_base = OTHER; note = 2'-O-methylguanosine-3'-phosphate
  modified_base 18: mod_base = OTHER; note = 2'-O-methylcytidine-3'-phosphate
  modified_base 19: mod_base = OTHER; note = 2'-O-methyluridine-3'-phosphate
  modified_base 20: mod_base = OTHER; note = 2'-O-methylcytidine-3'-phosphate
  modified_base 21: mod_base = OTHER; note = 2'-O-methyladenosine-3'-phosphorothioate
  modified_base 22: mod_base = OTHER; note = 2'-O-methyluridine-3'-phosphorothioate
  modified_base 23: mod_base = OTHER; note = 2'-O-methylguanosine
tgaatagatacaccacgctcatg

SEQ ID NO: 1164 - RNA, 23 nt, synthetic construct
  source 1..23: mol_type = other RNA
  modified_base 1: mod_base = OTHER; note = 2'-O-methyluridine-3'-phosphorothioate
  modified_base 2: mod_base = OTHER; note = 2'-fluorocytidine-3'-phosphorothioate
  modified_base 3: mod_base = OTHER; note = 2'-O-methylguanosine-3'-phosphate
  modified_base 4: mod_base = OTHER; note = 2'-O-methyladenosine-3'-phosphate
  modified_base 5: mod_base = OTHER; note = 2'-O-methyladenosine-3'-phosphate
  modified_base 6: mod_base = OTHER; note = 2'-fluorouridine-3'-phosphate
  modified_base 7: mod_base = OTHER; note = 2'-O-methyladenosine-3'-phosphate
  modified_base 8: mod_base = OTHER; note = 2'-O-methylguanosine-3'-phosphate
  modified_base 9: mod_base = OTHER; note = 2'-O-methyladenosine-3'-phosphate
  modified_base 10: mod_base = OTHER; note = 2'-O-methyluridine-3'-phosphate
  modified_base 11: mod_base = OTHER; note = 2'-O-methyladenosine-3'-phosphate
  modified_base 12: mod_base = OTHER; note = 2'-O-methylcytidine-3'-phosphate
  modified_base 13: mod_base = OTHER; note = 2'-O-methyladenosine-3'-phosphate
  modified_base 14: mod_base = OTHER; note = 2'-fluorocytidine-3'-phosphate
  modified_base 15: mod_base = OTHER; note = 2'-O-methylcytidine-3'-phosphate
  modified_base 16: mod_base = OTHER; note = 2'-fluoroadenosine-3'-phosphate
  modified_base 17: mod_base = OTHER; note = 2'-O-methylcytidine-3'-phosphate
  modified_base 18: mod_base = OTHER; note = 2'-O-methylguanosine-3'-phosphate
  modified_base 19: mod_base = OTHER; note = 2'-O-methylcytidine-3'-phosphate
  modified_base 20: mod_base = OTHER; note = 2'-O-methyluridine-3'-phosphate
  modified_base 21: mod_base = OTHER; note = 2'-O-methylcytidine-3'-phosphorothioate
  modified_base 22: mod_base = OTHER; note = 2'-O-methyladenosine-3'-phosphorothioate
  modified_base 23: mod_base = OTHER; note = 2'-O-methyluridine
tcgaatagatacaccacgctcat

SEQ ID NO: 1165 - RNA, 23 nt, synthetic construct
  source 1..23: mol_type = other RNA
  modified_base 1: mod_base = OTHER; note = 2'-O-methyluridine-3'-phosphorothioate
  modified_base 2: mod_base = OTHER; note = 2'-fluoroadenosine-3'-phosphorothioate
  modified_base 3: mod_base = OTHER; note = 2'-O-methyluridine-3'-phosphate
  modified_base 4: mod_base = OTHER; note = 2'-O-methyladenosine-3'-phosphate
  modified_base 5: mod_base = OTHER; note = 2'-O-methyladenosine-3'-phosphate
  modified_base 6: mod_base = OTHER; note = 2'-fluorouridine-3'-phosphate
  modified_base 7: mod_base = OTHER; note = 2'-O-methylcytidine-3'-phosphate
  modified_base 8: mod_base = OTHER; note = 2'-O-methylcytidine-3'-phosphate
  modified_base 9: mod_base = OTHER; note = 2'-O-methylcytidine-3'-phosphate
  modified_base 10: mod_base = OTHER; note = 2'-O-methyluridine-3'-phosphate
  modified_base 11: mod_base = OTHER; note = 2'-O-methylguanosine-3'-phosphate
  modified_base 12: mod_base = OTHER; note = 2'-O-methyluridine-3'-phosphate
  modified_base 13: mod_base = OTHER; note = 2'-O-methyladenosine-3'-phosphate
  modified_base 14: mod_base = OTHER; note = 2'-fluoroadenosine-3'-phosphate
  modified_base 15: mod_base = OTHER; note = 2'-O-methylguanosine-3'-phosphate
  modified_base 16: mod_base = OTHER; note = 2'-fluoroguanosine-3'-phosphate
  modified_base 17: mod_base = OTHER; note = 2'-O-methyluridine-3'-phosphate
  modified_base 18: mod_base = OTHER; note = 2'-O-methyladenosine-3'-phosphate
  modified_base 19: mod_base = OTHER; note = 2'-O-methylguanosine-3'-phosphate
  modified_base 20: mod_base = OTHER; note = 2'-O-methylguanosine-3'-phosphate
  modified_base 21: mod_base = OTHER; note = 2'-O-methyluridine-3'-phosphorothioate
  modified_base 22: mod_base = OTHER; note = 2'-O-methyladenosine-3'-phosphorothioate
  modified_base 23: mod_base = OTHER; note = 2'-O-methylcytidine
tataatccctgtaaggtaggtac

SEQ ID NO: 1166 - RNA, 23 nt, synthetic construct
  source 1..23: mol_type = other RNA
  modified_base 1: mod_base = OTHER; note = 2'-O-methyladenosine-3'-phosphorothioate
  modified_base 2: mod_base = OTHER; note = 2'-fluorouridine-3'-phosphorothioate
  modified_base 3: mod_base = OTHER; note = 2'-O-methyluridine-3'-phosphate
  modified_base 4: mod_base = OTHER; note = 2'-O-methyladenosine-3'-phosphate
  modified_base 5: mod_base = OTHER; note = 2'-O-methyluridine-3'-phosphate
  modified_base 6: mod_base = OTHER; note = 2'-fluoroadenosine-3'-phosphate
  modified_base 7: mod_base = OTHER; note = 2'-O-methyladenosine-3'-phosphate
  modified_base 8: mod_base = OTHER; note = 2'-O-methyluridine-3'-phosphate
  modified_base 9: mod_base = OTHER; note = 2'-O-methylcytidine-3'-phosphate
  modified_base 10: mod_base = OTHER; note = 2'-O-methylcytidine-3'-phosphate
  modified_base 11: mod_base = OTHER; note = 2'-O-methylcytidine-3'-phosphate
  modified_base 12: mod_base = OTHER; note = 2'-O-methyluridine-3'-phosphate
  modified_base 13: mod_base = OTHER; note = 2'-O-methylguanosine-3'-phosphate
  modified_base 14: mod_base = OTHER; note = 2'-fluorouridine-3'-phosphate
  modified_base 15: mod_base = OTHER; note = 2'-O-methyladenosine-3'-phosphate
  modified_base 16: mod_base = OTHER; note = 2'-fluoroadenosine-3'-phosphate
  modified_base 17: mod_base = OTHER; note = 2'-O-methylguanosine-3'-phosphate
  modified_base 18: mod_base = OTHER; note = 2'-O-methylguanosine-3'-phosphate
  modified_base 19: mod_base = OTHER; note = 2'-O-methyluridine-3'-phosphate
  modified_base 20: mod_base = OTHER; note = 2'-O-methyladenosine-3'-phosphate
  modified_base 21: mod_base = OTHER; note = 2'-O-methylguanosine-3'-phosphorothioate
  modified_base 22: mod_base = OTHER; note = 2'-O-methylguanosine-3'-phosphorothioate
  modified_base 23: mod_base = OTHER; note = 2'-O-methyluridine
attataatccctgtaaggtaggt

SEQ ID NO: 1167 - RNA, 23 nt, synthetic construct
  source 1..23: mol_type = other RNA
  modified_base 1: mod_base = OTHER; note = 2'-O-methyluridine-3'-phosphorothioate
  modified_base 2: mod_base = OTHER; note = 2'-fluoroguanosine-3'-phosphorothioate
  modified_base 3: mod_base = OTHER; note = 2'-O-methyladenosine-3'-phosphate
  modified_base 4: mod_base = OTHER; note = 2'-O-methylguanosine-3'-phosphate
  modified_base 5: mod_base = OTHER; note = 2'-O-methyluridine-3'-phosphate
  modified_base 6: mod_base = OTHER; note = 2'-fluoroadenosine-3'-phosphate
  modified_base 7: mod_base = OTHER; note = 2'-O-methyladenosine-3'-phosphate
  modified_base 8: mod_base = OTHER; note = 2'-O-methyluridine-3'-phosphate
  modified_base 9: mod_base = OTHER; note = 2'-O-methyluridine-3'-phosphate
  modified_base 10: mod_base = OTHER; note = 2'-O-methyladenosine-3'-phosphate
  modified_base 11: mod_base = OTHER; note = 2'-O-methyluridine-3'-phosphate
  modified_base 12: mod_base = OTHER; note = 2'-O-methyladenosine-3'-phosphate
  modified_base 13: mod_base = OTHER; note = 2'-O-methyladenosine-3'-phosphate
  modified_base 14: mod_base = OTHER; note = 2'-fluorouridine-3'-phosphate
  modified_base 15: mod_base = OTHER; note = 2'-O-methylcytidine-3'-phosphate
  modified_base 16: mod_base = OTHER; note = 2'-fluorocytidine-3'-phosphate
  modified_base 17: mod_base = OTHER; note = 2'-O-methylcytidine-3'-phosphate
  modified_base 18: mod_base = OTHER; note = 2'-O-methyluridine-3'-phosphate
  modified_base 19: mod_base = OTHER; note = 2'-O-methylguanosine-3'-phosphate
  modified_base 20: mod_base = OTHER; note = 2'-O-methyluridine-3'-phosphate
  modified_base 21: mod_base = OTHER; note = 2'-O-methyladenosine-3'-phosphorothioate
  modified_base 22: mod_base = OTHER; note = 2'-O-methyladenosine-3'-phosphorothioate
  modified_base 23: mod_base = OTHER; note = 2'-O-methylguanosine
tgagtaattataatccctgtaag

SEQ ID NO: 1168 - RNA, 23 nt, synthetic construct
  source 1..23: mol_type = other RNA
  modified_base 1: mod_base = OTHER; note = 2'-O-methyladenosine-3'-phosphorothioate
  modified_base 2: mod_base = OTHER; note = 2'-fluorouridine-3'-phosphorothioate
  modified_base 3: mod_base = OTHER; note = 2'-O-methylcytidine-3'-phosphate
  modified_base 4: mod_base = OTHER; note = 2'-O-methyluridine-3'-phosphate
  modified_base 5: mod_base = OTHER; note = 2'-O-methylguanosine-3'-phosphate
  modified_base 6: mod_base = OTHER; note = 2'-fluorocytidine-3'-phosphate
  modified_base 7: mod_base = OTHER; note = 2'-O-methyladenosine-3'-phosphate
  modified_base 8: mod_base = OTHER; note = 2'-O-methyladenosine-3'-phosphate
  modified_base 9: mod_base = OTHER; note = 2'-O-methylguanosine-3'-phosphate
  modified_base 10: mod_base = OTHER; note = 2'-O-methylguanosine-3'-phosphate
  modified_base 11: mod_base = OTHER; note = 2'-O-methyladenosine-3'-phosphate
  modified_base 12: mod_base = OTHER; note = 2'-O-methylcytidine-3'-phosphate
  modified_base 13: mod_base = OTHER; note = 2'-O-methyluridine-3'-phosphate
  modified_base 14: mod_base = OTHER; note = 2'-fluorocytidine-3'-phosphate
  modified_base 15: mod_base = OTHER; note = 2'-O-methylguanosine-3'-phosphate
  modified_base 16: mod_base = OTHER; note = 2'-fluoroguanosine-3'-phosphate
  modified_base 17: mod_base = OTHER; note = 2'-O-methylcytidine-3'-phosphate
  modified_base 18: mod_base = OTHER; note = 2'-O-methyluridine-3'-phosphate
  modified_base 19: mod_base = OTHER; note = 2'-O-methylguanosine-3'-phosphate
  modified_base 20: mod_base = OTHER; note = 2'-O-methylcytidine-3'-phosphate
  modified_base 21: mod_base = OTHER; note = 2'-O-methyluridine-3'-phosphorothioate
  modified_base 22: mod_base = OTHER; note = 2'-O-methylguanosine-3'-phosphorothioate
  modified_base 23: mod_base = OTHER; note = 2'-O-methylguanosine
atctgcaaggactcggctgctgg

SEQ ID NO: 1169 - RNA, 23 nt, synthetic construct
  source 1..23: mol_type = other RNA
  modified_base 1: mod_base = OTHER; note = 2'-O-methyluridine-3'-phosphorothioate
  modified_base 2: mod_base = OTHER; note = 2'-fluoroadenosine-3'-phosphorothioate
  modified_base 3: mod_base = OTHER; note = 2'-O-methylcytidine-3'-phosphate
  modified_base 4: mod_base = OTHER; note = 2'-O-methylguanosine-3'-phosphate
  modified_base 5: mod_base = OTHER; note = 2'-O-methyladenosine-3'-phosphate
  modified_base 6: mod_base = OTHER; note = 2'-fluoroguanosine-3'-phosphate
  modified_base 7: mod_base = OTHER; note = 2'-O-methyluridine-3'-phosphate
  modified_base 8: mod_base = OTHER; note = 2'-O-methylcytidine-3'-phosphate
  modified_base 9: mod_base = OTHER; note = 2'-O-methyladenosine-3'-phosphate
  modified_base 10: mod_base = OTHER; note = 2'-O-methyluridine-3'-phosphate
  modified_base 11: mod_base = OTHER; note = 2'-O-methylcytidine-3'-phosphate
  modified_base 12: mod_base = OTHER; note = 2'-O-methylcytidine-3'-phosphate
  modified_base 13: mod_base = OTHER; note = 2'-O-methylcytidine-3'-phosphate
  modified_base 14: mod_base = OTHER; note = 2'-fluoroadenosine-3'-phosphate
  modified_base 15: mod_base = OTHER; note = 2'-O-methyluridine-3'-phosphate
  modified_base 16: mod_base = OTHER; note = 2'-fluorocytidine-3'-phosphate
  modified_base 17: mod_base = OTHER; note = 2'-O-methyluridine-3'-phosphate
  modified_base 18: mod_base = OTHER; note = 2'-O-methylguanosine-3'-phosphate
  modified_base 19: mod_base = OTHER; note = 2'-O-methylcytidine-3'-phosphate
  modified_base 20: mod_base = OTHER; note = 2'-O-methyladenosine-3'-phosphate
  modified_base 21: mod_base = OTHER; note = 2'-O-methyladenosine-3'-phosphorothioate
  modified_base 22: mod_base = OTHER; note = 2'-O-methylguanosine-3'-phosphorothioate
  modified_base 23: mod_base = OTHER; note = 2'-O-methylguanosine
tacgagtcatcccatctgcaagg

SEQ ID NO: 1170 - RNA, 23 nt, synthetic construct
  source 1..23: mol_type = other RNA
  modified_base 1: mod_base = OTHER; note = 2'-O-methyluridine-3'-phosphorothioate
  modified_base 2: mod_base = OTHER; note = 2'-fluorocytidine-3'-phosphorothioate
  modified_base 3: mod_base = OTHER; note = 2'-O-methyladenosine-3'-phosphate
  modified_base 4: mod_base = OTHER; note = 2'-O-methylcytidine-3'-phosphate
  modified_base 5: mod_base = OTHER; note = 2'-O-methylguanosine-3'-phosphate
  modified_base 6: mod_base = OTHER; note = 2'-fluoroadenosine-3'-phosphate
  modified_base 7: mod_base = OTHER; note = 2'-O-methylguanosine-3'-phosphate
  modified_base 8: mod_base = OTHER; note = 2'-O-methyluridine-3'-phosphate
  modified_base 9: mod_base = OTHER; note = 2'-O-methylcytidine-3'-phosphate
  modified_base 10: mod_base = OTHER; note = 2'-O-methyladenosine-3'-phosphate
  modified_base 11: mod_base = OTHER; note = 2'-O-methyluridine-3'-phosphate
  modified_base 12: mod_base = OTHER; note = 2'-O-methylcytidine-3'-phosphate
  modified_base 13: mod_base = OTHER; note = 2'-O-methylcytidine-3'-phosphate
  modified_base 14: mod_base = OTHER; note = 2'-fluorocytidine-3'-phosphate
  modified_base 15: mod_base = OTHER; note = 2'-O-methyladenosine-3'-phosphate
  modified_base 16: mod_base = OTHER; note = 2'-fluorouridine-3'-phosphate
  modified_base 17: mod_base = OTHER; note = 2'-O-methylcytidine-3'-phosphate
  modified_base 18: mod_base = OTHER; note = 2'-O-methyluridine-3'-phosphate
  modified_base 19: mod_base = OTHER; note = 2'-O-methylguanosine-3'-phosphate
  modified_base 20: mod_base = OTHER; note = 2'-O-methylcytidine-3'-phosphate
  modified_base 21: mod_base = OTHER; note = 2'-O-methyladenosine-3'-phosphorothioate
  modified_base 22: mod_base = OTHER; note = 2'-O-methyladenosine-3'-phosphorothioate
  modified_base 23: mod_base = OTHER; note = 2'-O-methylguanosine
tcacgagtcatcccatctgcaag

SEQ ID NO: 1171 - RNA, 23 nt, synthetic construct
  source 1..23: mol_type = other RNA
  modified_base 1: mod_base = OTHER; note = 2'-O-methyluridine-3'-phosphorothioate
  modified_base 2: mod_base = OTHER; note = 2'-fluoroguanosine-3'-phosphorothioate
  modified_base 3: mod_base = OTHER; note = 2'-O-methylcytidine-3'-phosphate
  modified_base 4: mod_base = OTHER; note = 2'-O-methylcytidine-3'-phosphate
  modified_base 5: mod_base = OTHER; note = 2'-O-methyladenosine-3'-phosphate
  modified_base 6: mod_base = OTHER; note = 2'-fluorocytidine-3'-phosphate
  modified_base 7: mod_base = OTHER; note = 2'-O-methylguanosine-3'-phosphate
  modified_base 8: mod_base = OTHER; note = 2'-O-methyladenosine-3'-phosphate
  modified_base 9: mod_base = OTHER; note = 2'-O-methylguanosine-3'-phosphate
  modified_base 10: mod_base = OTHER; note = 2'-O-methyluridine-3'-phosphate
  modified_base 11: mod_base = OTHER; note = 2'-O-methylcytidine-3'-phosphate
  modified_base 12: mod_base = OTHER; note = 2'-O-methyladenosine-3'-phosphate
  modified_base 13: mod_base = OTHER; note = 2'-O-methyluridine-3'-phosphate
  modified_base 14: mod_base = OTHER; note = 2'-fluorocytidine-3'-phosphate
  modified_base 15: mod_base = OTHER; note = 2'-O-methylcytidine-3'-phosphate
  modified_base 16: mod_base = OTHER; note = 2'-fluorocytidine-3'-phosphate
  modified_base 17: mod_base = OTHER; note = 2'-O-methyladenosine-3'-phosphate
  modified_base 18: mod_base = OTHER; note = 2'-O-methyluridine-3'-phosphate
  modified_base 19: mod_base = OTHER; note = 2'-O-methylcytidine-3'-phosphate
  modified_base 20: mod_base = OTHER; note = 2'-O-methyluridine-3'-phosphate
  modified_base 21: mod_base = OTHER; note = 2'-O-methylguanosine-3'-phosphorothioate
  modified_base 22: mod_base = OTHER; note = 2'-O-methylcytidine-3'-phosphorothioate
  modified_base 23: mod_base = OTHER; note = 2'-O-methyladenosine
tgccacgagtcatcccatctgca

SEQ ID NO: 1172 - RNA, 23 nt, synthetic construct
  source 1..23: mol_type = other RNA
  modified_base 1: mod_base = OTHER; note = 2'-O-methyluridine-3'-phosphorothioate
  modified_base 2: mod_base = OTHER; note = 2'-fluoroguanosine-3'-phosphorothioate
  modified_base 3: mod_base = OTHER; note = 2'-O-methylguanosine-3'-phosphate
  modified_base 4: mod_base = OTHER; note = 2'-O-methylcytidine-3'-phosphate
  modified_base 5: mod_base = OTHER; note = 2'-O-methylcytidine-3'-phosphate
  modified_base 6: mod_base = OTHER; note = 2'-fluoroadenosine-3'-phosphate
  modified_base 7: mod_base = OTHER; note = 2'-O-methylcytidine-3'-phosphate
  modified_base 8: mod_base = OTHER; note = 2'-O-methylguanosine-3'-phosphate
  modified_base 9: mod_base = OTHER; note = 2'-O-methyladenosine-3'-phosphate
  modified_base 10: mod_base = OTHER; note = 2'-O-methylguanosine-3'-phosphate
  modified_base 11: mod_base = OTHER; note = 2'-O-methyluridine-3'-phosphate
  modified_base 12: mod_base = OTHER; note = 2'-O-methylcytidine-3'-phosphate
  modified_base 13: mod_base = OTHER; note = 2'-O-methyladenosine-3'-phosphate
  modified_base 14: mod_base = OTHER; note = 2'-fluorouridine-3'-phosphate
  modified_base 15: mod_base = OTHER; note = 2'-O-methylcytidine-3'-phosphate
  modified_base 16: mod_base = OTHER; note = 2'-fluorocytidine-3'-phosphate
  modified_base 17: mod_base = OTHER; note = 2'-O-methylcytidine-3'-phosphate
  modified_base 18: mod_base = OTHER; note = 2'-O-methyladenosine-3'-phosphate
  modified_base 19: mod_base = OTHER; note = 2'-O-methyluridine-3'-phosphate
  modified_base 20: mod_base = OTHER; note = 2'-O-methylcytidine-3'-phosphate
  modified_base 21: mod_base = OTHER; note = 2'-O-methyluridine-3'-phosphorothioate
  modified_base 22: mod_base = OTHER; note = 2'-O-methylguanosine-3'-phosphorothioate
  modified_base 23: mod_base = OTHER; note = 2'-O-methylcytidine
tggccacgagtcatcccatctgc

SEQ ID NO: 1173 - RNA, 23 nt, synthetic construct
  source 1..23: mol_type = other RNA
  modified_base 1: mod_base = OTHER; note = 2'-O-methyladenosine-3'-phosphorothioate
  modified_base 2: mod_base = OTHER; note = 2'-fluorocytidine-3'-phosphorothioate
  modified_base 3: mod_base = OTHER; note = 2'-O-methylguanosine-3'-phosphate
  modified_base 4: mod_base = OTHER; note = 2'-O-methylcytidine-3'-phosphate
  modified_base 5: mod_base = OTHER; note = 2'-O-methyladenosine-3'-phosphate
  modified_base 6: mod_base = OTHER; note = 2'-fluorocytidine-3'-phosphate
  modified_base 7: mod_base = OTHER; note = 2'-O-methyladenosine-3'-phosphate
  modified_base 8: mod_base = OTHER; note = 2'-O-methyladenosine-3'-phosphate
  modified_base 9: mod_base = OTHER; note = 2'-O-methylcytidine-3'-phosphate
  modified_base 10: mod_base = OTHER; note = 2'-O-methyluridine-3'-phosphate
  modified_base 11: mod_base = OTHER; note = 2'-O-methylguanosine-3'-phosphate
  modified_base 12: mod_base = OTHER; note = 2'-O-methylguanosine-3'-phosphate
  modified_base 13: mod_base = OTHER; note = 2'-O-methylguanosine-3'-phosphate
  modified_base 14: mod_base = OTHER; note = 2'-fluorocytidine-3'-phosphate
  modified_base 15: mod_base = OTHER; note = 2'-O-methylcytidine-3'-phosphate
  modified_base 16: mod_base = OTHER; note = 2'-fluoroadenosine-3'-phosphate
  modified_base 17: mod_base = OTHER; note = 2'-O-methylcytidine-3'-phosphate
  modified_base 18: mod_base = OTHER; note = 2'-O-methylguanosine-3'-phosphate
  modified_base 19: mod_base = OTHER; note = 2'-O-methyladenosine-3'-phosphate
  modified_base 20: mod_base = OTHER; note = 2'-O-methylguanosine-3'-phosphate
  modified_base 21: mod_base = OTHER; note = 2'-O-methyluridine-3'-phosphorothioate
  modified_base 22: mod_base = OTHER; note = 2'-O-methylcytidine-3'-phosphorothioate
  modified_base 23: mod_base = OTHER; note = 2'-O-methyladenosine
acgcacaactgggccacgagtca

SEQ ID NO: 1174 - RNA, 23 nt, synthetic construct
  source 1..23: mol_type = other RNA
  modified_base 1: mod_base = OTHER; note = 2'-O-methyladenosine-3'-phosphorothioate
  modified_base 2: mod_base = OTHER; note = 2'-fluorocytidine-3'-phosphorothioate
  modified_base 3: mod_base = OTHER; note = 2'-O-methylguanosine-3'-phosphate
  modified_base 4: mod_base = OTHER; note = 2'-O-methyluridine-3'-phosphate
  modified_base 5: mod_base = OTHER; note = 2'-O-methylguanosine-3'-phosphate
  modified_base 6: mod_base = OTHER; note = 2'-fluoroguanosine-3'-phosphate
  modified_base 7: mod_base = OTHER; note = 2'-O-methyladenosine-3'-phosphate
  modified_base 8: mod_base = OTHER; note = 2'-O-methyladenosine-3'-phosphate
  modified_base 9: mod_base = OTHER; note = 2'-O-methylguanosine-3'-phosphate
  modified_base 10: mod_base = OTHER; note = 2'-O-methyladenosine-3'-phosphate
  modified_base 11: mod_base = OTHER; note = 2'-O-methylcytidine-3'-phosphate
  modified_base 12: mod_base = OTHER; note = 2'-O-methylguanosine-3'-phosphate
  modified_base 13: mod_base = OTHER; note = 2'-O-methylcytidine-3'-phosphate
  modified_base 14: mod_base = OTHER; note = 2'-fluoroadenosine-3'-phosphate
  modified_base 15: mod_base = OTHER; note = 2'-O-methylcytidine-3'-phosphate
  modified_base 16: mod_base = OTHER; note = 2'-fluoroadenosine-3'-phosphate
  modified_base 17: mod_base = OTHER; note = 2'-O-methyladenosine-3'-phosphate
  modified_base 18: mod_base = OTHER; note = 2'-O-methylcytidine-3'-phosphate
  modified_base 19: mod_base = OTHER; note = 2'-O-methyluridine-3'-phosphate
  modified_base 20: mod_base = OTHER; note = 2'-O-methylguanosine-3'-phosphate
  modified_base 21: mod_base = OTHER; note = 2'-O-methylguanosine-3'-phosphorothioate
  modified_base 22: mod_base = OTHER; note = 2'-O-methylguanosine-3'-phosphorothioate
  modified_base 23: mod_base = OTHER; note = 2'-O-methylcytidine
acgtggaagacgcacaactgggc

SEQ ID NO: 1175 - RNA, 23 nt, synthetic construct
  source 1..23: mol_type = other RNA
  modified_base 1: mod_base = OTHER; note = 2'-O-methyladenosine-3'-phosphorothioate
  modified_base 2: mod_base = OTHER; note = 2'-fluoroguanosine-3'-phosphorothioate
  modified_base 3: mod_base = OTHER; note = 2'-O-methylcytidine-3'-phosphate
  modified_base 4: mod_base = OTHER; note = 2'-O-methyladenosine-3'-phosphate
  modified_base 5: mod_base = OTHER; note = 2'-O-methylcytidine-3'-phosphate
  modified_base 6: mod_base = OTHER; note = 2'-fluoroguanosine-3'-phosphate
  modified_base 7: mod_base = OTHER; note = 2'-O-methyluridine-3'-phosphate
  modified_base 8: mod_base = OTHER; note = 2'-O-methylguanosine-3'-phosphate
  modified_base 9: mod_base = OTHER; note = 2'-O-methylguanosine-3'-phosphate
  modified_base 10: mod_base = OTHER; note = 2'-O-methyladenosine-3'-phosphate
  modified_base 11: mod_base = OTHER; note = 2'-O-methyladenosine-3'-phosphate
  modified_base 12: mod_base = OTHER; note = 2'-O-methylguanosine-3'-phosphate
  modified_base 13: mod_base = OTHER; note = 2'-O-methyladenosine-3'-phosphate
  modified_base 14: mod_base = OTHER; note = 2'-fluorocytidine-3'-phosphate
  modified_base 15: mod_base = OTHER; note = 2'-O-methylguanosine-3'-phosphate
  modified_base 16: mod_base = OTHER; note = 2'-fluorocytidine-3'-phosphate
  modified_base 17: mod_base = OTHER; note = 2'-O-methyladenosine-3'-phosphate
  modified_base 18: mod_base = OTHER; note = 2'-O-methylcytidine-3'-phosphate
  modified_base 19: mod_base = OTHER; note = 2'-O-methyladenosine-3'-phosphate
  modified_base 20: mod_base = OTHER; note = 2'-O-methyladenosine-3'-phosphate
  modified_base 21: mod_base = OTHER; note = 2'-O-methylcytidine-3'-phosphorothioate
  modified_base 22: mod_base = OTHER; note = 2'-O-methyluridine-3'-phosphorothioate
  modified_base 23: mod_base = OTHER; note = 2'-O-methylguanosine
agcacgtggaagacgcacaactg

SEQ ID NO: 1176 - RNA, 23 nt, synthetic construct
  source 1..23: mol_type = other RNA
  modified_base 1: mod_base = OTHER; note = 2'-O-methyluridine-3'-phosphorothioate
  modified_base 2: mod_base = OTHER; note = 2'-fluorouridine-3'-phosphorothioate
  modified_base 3: mod_base = OTHER; note = 2'-O-methyluridine-3'-phosphate
  modified_base 4: mod_base = OTHER; note = 2'-O-methyluridine-3'-phosphate
  modified_base 5: mod_base = OTHER; note = 2'-O-methylcytidine-3'-phosphate
  modified_base 6: mod_base = OTHER; note = 2'-fluoroguanosine-3'-phosphate
  modified_base 7: mod_base = OTHER; note = 2'-O-methyladenosine-3'-phosphate
  modified_base 8: mod_base = OTHER; note = 2'-O-methylguanosine-3'-phosphate
  modified_base 9: mod_base = OTHER; note = 2'-O-methylcytidine-3'-phosphate
  modified_base 10: mod_base = OTHER; note = 2'-O-methylcytidine-3'-phosphate
  modified_base 11: mod_base = OTHER; note = 2'-O-methyladenosine-3'-phosphate
  modified_base 12: mod_base = OTHER; note = 2'-O-methylguanosine-3'-phosphate
  modified_base 13: mod_base = OTHER; note = 2'-O-methylguanosine-3'-phosphate
  modified_base 14: mod_base = OTHER; note = 2'-fluorocytidine-3'-phosphate
  modified_base 15: mod_base = OTHER; note = 2'-O-methyluridine-3'-phosphate
  modified_base 16: mod_base = OTHER; note = 2'-fluorouridine-3'-phosphate
  modified_base 17: mod_base = OTHER; note = 2'-O-methyluridine-3'-phosphate
  modified_base 18: mod_base = OTHER; note = 2'-O-methylcytidine-3'-phosphate
  modified_base 19: mod_base = OTHER; note = 2'-O-methyladenosine-3'-phosphate
  modified_base 20: mod_base = OTHER; note = 2'-O-methylcytidine-3'-phosphate
  modified_base 21: mod_base = OTHER; note = 2'-O-methyluridine-3'-phosphorothioate
  modified_base 22: mod_base = OTHER; note = 2'-O-methyluridine-3'-phosphorothioate
  modified_base 23: mod_base = OTHER; note = 2'-O-methylcytidine
ttttcgagccaggctttcacttc

SEQ ID NO: 1177 - RNA, 23 nt, synthetic construct
  source 1..23: mol_type = other RNA
  modified_base 1: mod_base = OTHER; note = 2'-O-methyluridine-3'-phosphorothioate
  modified_base 2: mod_base = OTHER; note = 2'-fluorocytidine-3'-phosphorothioate
  modified_base 3: mod_base = OTHER; note = 2'-O-methyluridine-3'-phosphate
  modified_base 4: mod_base = OTHER; note = 2'-O-methyluridine-3'-phosphate
  modified_base 5: mod_base = OTHER; note = 2'-O-methylcytidine-3'-phosphate
  modified_base 6: mod_base = OTHER; note = 2'-fluoroadenosine-3'-phosphate
  modified_base 7: mod_base = OTHER; note = 2'-O-methylguanosine-3'-phosphate
  modified_base 8: mod_base = OTHER; note = 2'-O-methyladenosine-3'-phosphate
  modified_base 9: mod_base = OTHER; note = 2'-O-methyluridine-3'-phosphate
  modified_base 10: mod_base = OTHER; note = 2'-O-methylguanosine-3'-phosphate
  modified_base 11: mod_base = OTHER; note = 2'-O-methyluridine-3'-phosphate
  modified_base 12: mod_base = OTHER; note = 2'-O-methyluridine-3'-phosphate
  modified_base 13: mod_base = OTHER; note = 2'-O-methyluridine-3'-phosphate
  modified_base 14: mod_base = OTHER; note = 2'-fluorocytidine-3'-phosphate
  modified_base 15: mod_base = OTHER; note = 2'-O-methylguanosine-3'-phosphate
  modified_base 16: mod_base = OTHER; note = 2'-fluoroadenosine-3'-phosphate
  modified_base 17: mod_base = OTHER; note = 2'-O-methylguanosine-3'-phosphate
  modified_base 18: mod_base = OTHER; note = 2'-O-methylcytidine-3'-phosphate
  modified_base 19: mod_base = OTHER; note = 2'-O-methylcytidine-3'-phosphate
  modified_base 20: mod_base = OTHER; note = 2'-O-methyladenosine-3'-phosphate
  modified_base 21: mod_base = OTHER; note = 2'-O-methylguanosine-3'-phosphorothioate
  modified_base 22: mod_base = OTHER; note = 2'-O-methylguanosine-3'-phosphorothioate
  modified_base 23: mod_base = OTHER; note = 2'-O-methylcytidine
tcttcagatgtttcgagccaggc

SEQ ID NO: 1178 - RNA, 23 nt, synthetic construct
  source 1..23: mol_type = other RNA
  modified_base 1: mod_base = OTHER; note = 2'-O-methyluridine-3'-phosphorothioate
  modified_base 2: mod_base = OTHER; note = 2'-fluoroguanosine-3'-phosphorothioate
  modified_base 3: mod_base = OTHER; note = 2'-O-methylcytidine-3'-phosphate
  modified_base 4: mod_base = OTHER; note = 2'-O-methylguanosine-3'-phosphate
  modified_base 5: mod_base = OTHER; note = 2'-O-methyladenosine-3'-phosphate
  modified_base 6: mod_base = OTHER; note = 2'-fluoroadenosine-3'-phosphate
  modified_base 7: mod_base = OTHER; note = 2'-O-methylcytidine-3'-phosphate
  modified_base 8: mod_base = OTHER; note = 2'-O-methylcytidine-3'-phosphate
  modified_base 9: mod_base = OTHER; note = 2'-O-methylcytidine-3'-phosphate
  modified_base 10: mod_base = OTHER; note = 2'-O-methyluridine-3'-phosphate
  modified_base 11: mod_base = OTHER; note = 2'-O-methyluridine-3'-phosphate
  modified_base 12: mod_base = OTHER; note = 2'-O-methylcytidine-3'-phosphate
  modified_base 13: mod_base = OTHER; note = 2'-O-methyladenosine-3'-phosphate
  modified_base 14: mod_base = OTHER; note = 2'-fluoroguanosine-3'-phosphate
  modified_base 15: mod_base = OTHER; note = 2'-O-methyladenosine-3'-phosphate
  modified_base 16: mod_base = OTHER; note = 2'-fluorouridine-3'-phosphate
  modified_base 17: mod_base = OTHER; note = 2'-O-methylguanosine-3'-phosphate
  modified_base 18: mod_base = OTHER; note = 2'-O-methyluridine-3'-phosphate
  modified_base 19: mod_base = OTHER; note = 2'-O-methyluridine-3'-phosphate
  modified_base 20: mod_base = OTHER; note = 2'-O-methyluridine-3'-phosphate
  modified_base 21: mod_base = OTHER; note = 2'-O-methylcytidine-3'-phosphorothioate
  modified_base 22: mod_base = OTHER; note = 2'-O-methylguanosine-3'-phosphorothioate
  modified_base 23: mod_base = OTHER; note = 2'-O-methyladenosine
tgcgaacccttcagatgtttcga

SEQ ID NO: 1179 - RNA, 23 nt, synthetic construct
  source 1..23: mol_type = other RNA
  modified_base 1: mod_base = OTHER; note = 2'-O-methyluridine-3'-phosphorothioate
  modified_base 2: mod_base = OTHER; note = 2'-fluorouridine-3'-phosphorothioate
  modified_base 3: mod_base = OTHER; note = 2'-O-methylguanosine-3'-phosphate
  modified_base 4: mod_base = OTHER; note = 2'-O-methylcytidine-3'-phosphate
  modified_base 5: mod_base = OTHER; note = 2'-O-methylguanosine-3'-phosphate
  modified_base 6: mod_base = OTHER; note = 2'-fluoroadenosine-3'-phosphate
  modified_base 7: mod_base = OTHER; note = 2'-O-methyladenosine-3'-phosphate
  modified_base 8: mod_base = OTHER; note = 2'-O-methylcytidine-3'-phosphate
  modified_base 9: mod_base = OTHER; note = 2'-O-methylcytidine-3'-phosphate
  modified_base 10: mod_base = OTHER; note = 2'-O-methylcytidine-3'-phosphate
  modified_base 11: mod_base = OTHER; note = 2'-O-methyluridine-3'-phosphate
  modified_base 12: mod_base = OTHER; note = 2'-O-methyluridine-3'-phosphate
  modified_base 13: mod_base = OTHER; note = 2'-O-methylcytidine-3'-phosphate
  modified_base 14: mod_base = OTHER; note = 2'-fluoroadenosine-3'-phosphate
  modified_base 15: mod_base = OTHER; note = 2'-O-methylguanosine-3'-phosphate
  modified_base 16: mod_base = OTHER; note = 2'-fluoroadenosine-3'-phosphate
  modified_base 17: mod_base = OTHER; note = 2'-O-methyluridine-3'-phosphate
  modified_base 18: mod_base = OTHER; note = 2'-O-methylguanosine-3'-phosphate
  modified_base 19: mod_base = OTHER; note = 2'-O-methyluridine-3'-phosphate
  modified_base 20: mod_base = OTHER; note = 2'-O-methyluridine-3'-phosphate
  modified_base 21: mod_base = OTHER; note = 2'-O-methyluridine-3'-phosphorothioate
  modified_base 22: mod_base = OTHER; note = 2'-O-methylcytidine-3'-phosphorothioate
  modified_base 23: mod_base = OTHER; note = 2'-O-methylguanosine
ttgcgaacccttcagatgtttcg

SEQ ID NO: 1180 - RNA, 23 nt, synthetic construct
  source 1..23: mol_type = other RNA
  modified_base 1: mod_base = OTHER; note = 2'-O-methyluridine-3'-phosphorothioate
  modified_base 2: mod_base = OTHER; note = 2'-fluorouridine-3'-phosphorothioate
  modified_base 3: mod_base = OTHER; note = 2'-O-methyladenosine-3'-phosphate
  modified_base 4: mod_base = OTHER; note = 2'-O-methyluridine-3'-phosphate
  modified_base 5: mod_base = OTHER; note = 2'-O-methylcytidine-3'-phosphate
  modified_base 6: mod_base = OTHER; note = 2'-fluoroadenosine-3'-phosphate
  modified_base 7: mod_base = OTHER; note = 2'-O-methylcytidine-3'-phosphate
  modified_base 8: mod_base = OTHER; note = 2'-O-methyluridine-3'-phosphate
  modified_base 9: mod_base = OTHER; note = 2'-O-methylguanosine-3'-phosphate
  modified_base 10: mod_base = OTHER; note = 2'-O-methylcytidine-3'-phosphate
  modified_base 11: mod_base = OTHER; note = 2'-O-methylguanosine-3'-phosphate
  modified_base 12: mod_base = OTHER; note = 2'-O-methyladenosine-3'-phosphate
  modified_base 13: mod_base = OTHER; note = 2'-O-methyladenosine-3'-phosphate
  modified_base 14: mod_base = OTHER; note = 2'-fluorocytidine-3'-phosphate
  modified_base 15: mod_base = OTHER; note = 2'-O-methylcytidine-3'-phosphate
  modified_base 16: mod_base = OTHER; note = 2'-fluorocytidine-3'-phosphate
  modified_base 17: mod_base = OTHER; note = 2'-O-methyluridine-3'-phosphate
  modified_base 18: mod_base = OTHER; note = 2'-O-methyluridine-3'-phosphate
  modified_base 19: mod_base = OTHER; note = 2'-O-methylcytidine-3'-phosphate
  modified_base 20: mod_base = OTHER; note = 2'-O-methyladenosine-3'-phosphate
  modified_base 21: mod_base = OTHER; note = 2'-O-methylguanosine-3'-phosphorothioate
  modified_base 22: mod_base = OTHER; note = 2'-O-methyladenosine-3'-phosphorothioate
  modified_base 23: mod_base = OTHER; note = 2'-O-methyluridine
ttatcactgcgaacccttcagat

SEQ ID NO: 1181 - RNA, 23 nt, synthetic construct
  source 1..23: mol_type = other RNA
  modified_base 1: mod_base = OTHER; note = 2'-O-methyluridine-3'-phosphorothioate
  modified_base 2: mod_base = OTHER; note = 2'-fluorouridine-3'-phosphorothioate
  modified_base 3: mod_base = OTHER; note = 2'-O-methyluridine-3'-phosphate
  modified_base 4: mod_base = OTHER; note = 2'-O-methyluridine-3'-phosphate
  modified_base 5: mod_base = OTHER; note = 2'-O-methyladenosine-3'-phosphate
  modified_base 6: mod_base = OTHER; note = 2'-fluorouridine-3'-phosphate
  modified_base 7: mod_base = OTHER; note = 2'-O-methylcytidine-3'-phosphate
  modified_base 8: mod_base = OTHER; note = 2'-O-methyladenosine-3'-phosphate
  modified_base 9: mod_base = OTHER; note = 2'-O-methylcytidine-3'-phosphate
  modified_base 10: mod_base = OTHER; note = 2'-O-methyluridine-3'-phosphate
  modified_base 11: mod_base = OTHER; note = 2'-O-methylguanosine-3'-phosphate
  modified_base 12: mod_base = OTHER; note = 2'-O-methylcytidine-3'-phosphate
  modified_base 13: mod_base = OTHER; note = 2'-O-methylguanosine-3'-phosphate
  modified_base 14: mod_base = OTHER; note = 2'-fluoroadenosine-3'-phosphate
  modified_base 15: mod_base = OTHER; note = 2'-O-methyladenosine-3'-phosphate
  modified_base 16: mod_base = OTHER; note = 2'-fluorocytidine-3'-phosphate
  modified_base 17: mod_base = OTHER; note = 2'-O-methylcytidine-3'-phosphate
  modified_base 18: mod_base = OTHER; note = 2'-O-methylcytidine-3'-phosphate
  modified_base 19: mod_base = OTHER; note = 2'-O-methyluridine-3'-phosphate
  modified_base 20: mod_base = OTHER; note = 2'-O-methyluridine-3'-phosphate
  modified_base 21: mod_base = OTHER; note = 2'-O-methylcytidine-3'-phosphorothioate
  modified_base 22: mod_base = OTHER; note = 2'-O-methyladenosine-3'-phosphorothioate
  modified_base 23: mod_base = OTHER; note = 2'-O-methylguanosine
ttttatcactgcgaacccttcag

SEQ ID NO: 1182 - RNA, 23 nt, synthetic construct
  source 1..23: mol_type = other RNA
  modified_base 1: mod_base = OTHER; note = 2'-O-methyluridine-3'-phosphorothioate
  modified_base 2: mod_base = OTHER; note = 2'-fluorocytidine-3'-phosphorothioate
  modified_base 3: mod_base = OTHER; note = 2'-O-methyluridine-3'-phosphate
  modified_base 4: mod_base = OTHER; note = 2'-O-methylguanosine-3'-phosphate
  modified_base 5: mod_base = OTHER; note = 2'-O-methylcytidine-3'-phosphate
  modified_base 6: mod_base = OTHER; note = 2'-fluorouridine-3'-phosphate
  modified_base 7: mod_base = OTHER; note = 2'-O-methyladenosine-3'-phosphate
  modified_base 8: mod_base = OTHER; note = 2'-O-methylguanosine-3'-phosphate
  modified_base 9: mod_base = OTHER; note = 2'-O-methyluridine-3'-phosphate
  modified_base 10: mod_base = OTHER; note = 2'-O-methylguanosine-3'-phosphate
  modified_base 11: mod_base = OTHER; note = 2'-O-methylcytidine-3'-phosphate
  modified_base 12: mod_base = OTHER; note = 2'-O-methyluridine-3'-phosphate
  modified_base 13: mod_base = OTHER; note = 2'-O-methylguanosine-3'-phosphate
  modified_base 14: mod_base = OTHER; note = 2'-fluorouridine-3'-phosphate
  modified_base 15: mod_base = OTHER; note = 2'-O-methylcytidine-3'-phosphate
  modified_base 16: mod_base = OTHER; note = 2'-fluoroadenosine-3'-phosphate
  modified_base 17: mod_base = OTHER; note = 2'-O-methyladenosine-3'-phosphate
  modified_base 18: mod_base = OTHER; note = 2'-O-methyladenosine-3'-phosphate
  modified_base 19: mod_base = OTHER; note = 2'-O-methyluridine-3'-phosphate
  modified_base 20: mod_base = OTHER; note = 2'-O-methylguanosine-3'-phosphate
  modified_base 21: mod_base = OTHER; note = 2'-O-methylcytidine-3'-phosphorothioate
  modified_base 22: mod_base = OTHER; note = 2'-O-methylcytidine-3'-phosphorothioate
  modified_base 23: mod_base = OTHER; note = 2'-O-methyluridine
tctgctagtgctgtcaaatgcct

SEQ ID NO: 1183 - RNA, 23 nt, synthetic construct
  source 1..23: mol_type = other RNA
  modified_base 1: mod_base = OTHER; note = 2'-O-methyluridine-3'-phosphorothioate
  modified_base 2: mod_base = OTHER; note = 2'-fluoroadenosine-3'-phosphorothioate
  modified_base 3: mod_base = OTHER; note = 2'-O-methyladenosine-3'-phosphate
  modified_base 4: mod_base = OTHER; note = 2'-O-methyladenosine-3'-phosphate
  modified_base 5: mod_base = OTHER; note = 2'-O-methyluridine-3'-phosphate
  modified_base 6: mod_base = OTHER; note = 2'-fluorocytidine-3'-phosphate
  modified_base 7: mod_base = OTHER; note = 2'-O-methyluridine-3'-phosphate
  modified_base 8: mod_base = OTHER; note = 2'-O-methylguanosine-3'-phosphate
  modified_base 9: mod_base = OTHER; note = 2'-O-methylcytidine-3'-phosphate
  modified_base 10: mod_base = OTHER; note = 2'-O-methyluridine-3'-phosphate
  modified_base 11: mod_base = OTHER; note = 2'-O-methyladenosine-3'-phosphate
  modified_base 12: mod_base = OTHER; note = 2'-O-methylguanosine-3'-phosphate
  modified_base 13: mod_base = OTHER; note = 2'-O-methyluridine-3'-phosphate
  modified_base 14: mod_base = OTHER; note = 2'-fluoroguanosine-3'-phosphate
  modified_base 15: mod_base = OTHER; note = 2'-O-methylcytidine-3'-phosphate
  modified_base 16: mod_base = OTHER; note = 2'-fluorouridine-3'-phosphate
  modified_base 17: mod_base = OTHER; note = 2'-O-methylguanosine-3'-phosphate
  modified_base 18: mod_base = OTHER; note = 2'-O-methyluridine-3'-phosphate
  modified_base 19: mod_base = OTHER; note = 2'-O-methylcytidine-3'-phosphate
  modified_base 20: mod_base = OTHER; note = 2'-O-methyladenosine-3'-phosphate
  modified_base 21: mod_base = OTHER; note = 2'-O-methyladenosine-3'-phosphorothioate
  modified_base 22: mod_base = OTHER; note = 2'-O-methyladenosine-3'-phosphorothioate
  modified_base 23: mod_base = OTHER; note = 2'-O-methyluridine
taaatctgctagtgctgtcaaat

SEQ ID NO: 1184 - RNA, 23 nt, synthetic construct
  source 1..23: mol_type = other RNA
  modified_base 1: mod_base = OTHER; note = 2'-O-methyluridine-3'-phosphorothioate
  modified_base 2: mod_base = OTHER; note = 2'-fluoroadenosine-3'-phosphorothioate
  modified_base 3: mod_base = OTHER; note = 2'-O-methylcytidine-3'-phosphate
  modified_base 4: mod_base = OTHER; note = 2'-O-methylguanosine-3'-phosphate
  modified_base 5: mod_base = OTHER; note = 2'-O-methyluridine-3'-phosphate
  modified_base 6: mod_base = OTHER; note = 2'-fluoroguanosine-3'-phosphate
  modified_base 7: mod_base = OTHER; note = 2'-O-methylcytidine-3'-phosphate
  modified_base 8: mod_base = OTHER; note = 2'-O-methyladenosine-3'-phosphate
  modified_base 9: mod_base = OTHER; note = 2'-O-methyladenosine-3'-phosphate
  modified_base 10: mod_base = OTHER; note = 2'-O-methyladenosine-3'-phosphate
  modified_base 11: mod_base = OTHER; note = 2'-O-methyluridine-3'-phosphate
  modified_base 12: mod_base = OTHER; note = 2'-O-methylcytidine-3'-phosphate
  modified_base 13: mod_base = OTHER; note = 2'-O-methyluridine-3'-phosphate
  modified_base 14: mod_base = OTHER; note = 2'-fluoroguanosine-3'-phosphate
  modified_base 15: mod_base = OTHER; note = 2'-O-methylcytidine-3'-phosphate
  modified_base 16: mod_base = OTHER; note = 2'-fluorouridine-3'-phosphate
  modified_base 17: mod_base = OTHER; note = 2'-O-methyladenosine-3'-phosphate
  modified_base 18: mod_base = OTHER; note = 2'-O-methylguanosine-3'-phosphate
  modified_base 19: mod_base = OTHER; note = 2'-O-methyluridine-3'-phosphate
  modified_base 20: mod_base = OTHER; note = 2'-O-methylguanosine-3'-phosphate
  modified_base 21: mod_base = OTHER; note = 2'-O-methylcytidine-3'-phosphorothioate
  modified_base 22: mod_base = OTHER; note = 2'-O-methyluridine-3'-phosphorothioate
  modified_base 23: mod_base = OTHER; note = 2'-O-methylguanosine
tacgtgcaaatctgctagtgctg

SEQ ID NO: 1185 - RNA, 23 nt, synthetic construct
  source 1..23: mol_type = other RNA
  modified_base 1: mod_base = OTHER; note = 2'-O-methyladenosine-3'-phosphorothioate
  modified_base 2: mod_base = OTHER; note = 2'-fluoroguanosine-3'-phosphorothioate
  modified_base 3: mod_base = OTHER; note = 2'-O-methyladenosine-3'-phosphate
  modified_base 4: mod_base = OTHER; note = 2'-O-methylcytidine-3'-phosphate
  modified_base 5: mod_base = OTHER; note = 2'-O-methylguanosine-3'-phosphate
  modified_base 6: mod_base = OTHER; note = 2'-fluorouridine-3'-phosphate
  modified_base 7: mod_base = OTHER; note = 2'-O-methylguanosine-3'-phosphate
  modified_base 8: mod_base = OTHER; note = 2'-O-methylcytidine-3'-phosphate
  modified_base 9: mod_base = OTHER; note = 2'-O-methyladenosine-3'-phosphate
  modified_base 10: mod_base = OTHER; note = 2'-O-methyladenosine-3'-phosphate
  modified_base 11: mod_base = OTHER; note = 2'-O-methyladenosine-3'-phosphate
  modified_base 12: mod_base = OTHER; note = 2'-O-methyluridine-3'-phosphate
  modified_base 13: mod_base = OTHER; note = 2'-O-methylcytidine-3'-phosphate
  modified_base 14: mod_base = OTHER; note = 2'-fluorouridine-3'-phosphate
  modified_base 15: mod_base = OTHER; note = 2'-O-methylguanosine-3'-phosphate
  modified_base 16: mod_base = OTHER; note = 2'-fluorocytidine-3'-phosphate
  modified_base 17: mod_base = OTHER; note = 2'-O-methyluridine-3'-phosphate
  modified_base 18: mod_base = OTHER; note = 2'-O-methyladenosine-3'-phosphate
  modified_base 19: mod_base = OTHER; note = 2'-O-methylguanosine-3'-phosphate
  modified_base 20: mod_base = OTHER; note = 2'-O-methyluridine-3'-phosphate
  modified_base 21: mod_base = OTHER; note = 2'-O-methylguanosine-3'-phosphorothioate
  modified_base 22: mod_base = OTHER; note = 2'-O-methylcytidine-3'-phosphorothioate
  modified_base 23: mod_base = OTHER; note = 2'-O-methyluridine
agacgtgcaaatctgctagtgct

SEQ ID NO: 1186 - RNA, 23 nt, synthetic construct
  source 1..23: mol_type = other RNA
  modified_base 1: mod_base = OTHER; note = 2'-O-methyluridine-3'-phosphorothioate
  modified_base 2: mod_base = OTHER; note = 2'-fluorouridine-3'-phosphorothioate
  modified_base 3: mod_base = OTHER; note = 2'-O-methyladenosine-3'-phosphate
  modified_base 4: mod_base = OTHER; note = 2'-O-methylguanosine-3'-phosphate
  modified_base 5: mod_base = OTHER; note = 2'-O-methyladenosine-3'-phosphate
  modified_base 6: mod_base = OTHER; note = 2'-fluorocytidine-3'-phosphate
  modified_base 7: mod_base = OTHER; note = 2'-O-methylguanosine-3'-phosphate
  modified_base 8: mod_base = OTHER; note = 2'-O-methyluridine-3'-phosphate
  modified_base 9: mod_base = OTHER; note = 2'-O-methylguanosine-3'-phosphate
  modified_base 10: mod_base = OTHER; note = 2'-O-methylcytidine-3'-phosphate
  modified_base 11: mod_base = OTHER; note = 2'-O-methyladenosine-3'-phosphate
  modified_base 12: mod_base = OTHER; note = 2'-O-methyladenosine-3'-phosphate
  modified_base 13: mod_base = OTHER; note = 2'-O-methyladenosine-3'-phosphate
  modified_base 14: mod_base = OTHER; note = 2'-fluorouridine-3'-phosphate
  modified_base 15: mod_base = OTHER; note = 2'-O-methylcytidine-3'-phosphate
  modified_base 16: mod_base = OTHER; note = 2'-fluorouridine-3'-phosphate
  modified_base 17: mod_base = OTHER; note = 2'-O-methylguanosine-3'-phosphate
  modified_base 18: mod_base = OTHER; note = 2'-O-methylcytidine-3'-phosphate
  modified_base 19: mod_base = OTHER; note = 2'-O-methyluridine-3'-phosphate
  modified_base 20: mod_base = OTHER; note = 2'-O-methyladenosine-3'-phosphate
  modified_base 21: mod_base = OTHER; note = 2'-O-methylguanosine-3'-phosphorothioate
  modified_base 22: mod_base = OTHER; note = 2'-O-methyluridine-3'-phosphorothioate
  modified_base 23: mod_base = OTHER; note = 2'-O-methylguanosine
ttagacgtgcaaatctgctagtg

SEQ ID NO: 1187 - RNA, 23 nt, synthetic construct
  source 1..23: mol_type = other RNA
  modified_base 1: mod_base = OTHER; note = 2'-O-methyluridine-3'-phosphorothioate
  modified_base 2: mod_base = OTHER; note = 2'-fluoroguanosine-3'-phosphorothioate
  modified_base 3: mod_base = OTHER; note = 2'-O-methyluridine-3'-phosphate
  modified_base 4: mod_base = OTHER; note = 2'-O-methyladenosine-3'-phosphate
  modified_base 5: mod_base = OTHER; note = 2'-O-methylguanosine-3'-phosphate
  modified_base 6: mod_base = OTHER; note = 2'-fluoroadenosine-3'-phosphate
  modified_base 7: mod_base = OTHER; note = 2'-O-methylcytidine-3'-phosphate
  modified_base 8: mod_base = OTHER; note = 2'-O-methylguanosine-3'-phosphate
  modified_base 9: mod_base = OTHER; note = 2'-O-methyluridine-3'-phosphate
  modified_base 10: mod_base = OTHER; note = 2'-O-methylguanosine-3'-phosphate
  modified_base 11: mod_base = OTHER; note = 2'-O-methylcytidine-3'-phosphate
  modified_base 12: mod_base = OTHER; note = 2'-O-methyladenosine-3'-phosphate
  modified_base 13: mod_base = OTHER; note = 2'-O-methyladenosine-3'-phosphate
  modified_base 14: mod_base = OTHER; note = 2'-fluoroadenosine-3'-phosphate
  modified_base 15: mod_base = OTHER; note = 2'-O-methyluridine-3'-phosphate
  modified_base 16: mod_base = OTHER; note = 2'-fluorocytidine-3'-phosphate
  modified_base 17: mod_base = OTHER; note = 2'-O-methyluridine-3'-phosphate
  modified_base 18: mod_base = OTHER; note = 2'-O-methylguanosine-3'-phosphate
  modified_base 19: mod_base = OTHER; note = 2'-O-methylcytidine-3'-phosphate
  modified_base 20: mod_base = OTHER; note = 2'-O-methyluridine-3'-phosphate
  modified_base 21: mod_base = OTHER; note = 2'-O-methyladenosine-3'-phosphorothioate
  modified_base 22: mod_base = OTHER; note = 2'-O-methylguanosine-3'-phosphorothioate
  modified_base 23: mod_base = OTHER; note = 2'-O-methyluridine
tgtagacgtgcaaatctgctagt

SEQ ID NO: 1188 - RNA, 23 nt, synthetic construct
  source 1..23: mol_type = other RNA
  modified_base 1: mod_base = OTHER; note = 2'-O-methyluridine-3'-phosphorothioate
  modified_base 2: mod_base = OTHER; note = 2'-fluorouridine-3'-phosphorothioate
  modified_base 3: mod_base = OTHER; note = 2'-O-methylguanosine-3'-phosphate
  modified_base 4: mod_base = OTHER; note = 2'-O-methyluridine-3'-phosphate
  modified_base 5: mod_base = OTHER; note = 2'-O-methyladenosine-3'-phosphate
  modified_base 6: mod_base = OTHER; note = 2'-fluoroguanosine-3'-phosphate
  modified_base 7: mod_base = OTHER; note = 2'-O-methyladenosine-3'-phosphate
  modified_base 8: mod_base = OTHER; note = 2'-O-methylcytidine-3'-phosphate
  modified_base 9: mod_base = OTHER; note = 2'-O-methylguanosine-3'-phosphate
  modified_base 10: mod_base = OTHER; note = 2'-O-methyluridine-3'-phosphate
  modified_base 11: mod_base = OTHER; note = 2'-O-methylguanosine-3'-phosphate
  modified_base 12: mod_base = OTHER; note = 2'-O-methylcytidine-3'-phosphate
  modified_base 13: mod_base = OTHER; note = 2'-O-methyladenosine-3'-phosphate
  modified_base 14: mod_base = OTHER; note = 2'-fluoroadenosine-3'-phosphate
  modified_base 15: mod_base = OTHER; note = 2'-O-methyladenosine-3'-phosphate
  modified_base 16: mod_base = OTHER; note = 2'-fluorouridine-3'-phosphate
  modified_base 17: mod_base = OTHER; note = 2'-O-methylcytidine-3'-phosphate
  modified_base 18: mod_base = OTHER; note = 2'-O-methyluridine-3'-phosphate
  modified_base 19: mod_base = OTHER; note = 2'-O-methylguanosine-3'-phosphate
  modified_base 20: mod_base = OTHER; note = 2'-O-methylcytidine-3'-phosphate
  modified_base 21: mod_base = OTHER; note = 2'-O-methyluridine-3'-phosphorothioate
  modified_base 22: mod_base = OTHER; note = 2'-O-methyladenosine-3'-phosphorothioate
  modified_base 23: mod_base = OTHER; note = 2'-O-methylguanosine
ttgtagacgtgcaaatctgctag

SEQ ID NO: 1189 - RNA, 23 nt, synthetic construct
  source 1..23: mol_type = other RNA
  modified_base 1: mod_base = OTHER; note = 2'-O-methyluridine-3'-phosphorothioate
  modified_base 2: mod_base = OTHER; note = 2'-fluorouridine-3'-phosphorothioate
  modified_base 3: mod_base = OTHER; note = 2'-O-methyluridine-3'-phosphate
  modified_base 4: mod_base = OTHER; note = 2'-O-methyluridine-3'-phosphate
  modified_base 5: mod_base = OTHER; note = 2'-O-methylcytidine-3'-phosphate
  modified_base 6: mod_base = OTHER; note = 2'-fluorouridine-3'-phosphate
  modified_base 7: mod_base = OTHER; note = 2'-O-methylguanosine-3'-phosphate
  modified_base 8: mod_base = OTHER; note = 2'-O-methyluridine-3'-phosphate
  modified_base 9: mod_base = OTHER; note = 2'-O-methyladenosine-3'-phosphate
  modified_base 10: mod_base = OTHER; note = 2'-O-methylguanosine-3'-phosphate
  modified_base 11: mod_base = OTHER; note = 2'-O-methyladenosine-3'-phosphate
  modified_base 12: mod_base = OTHER; note = 2'-O-methylcytidine-3'-phosphate
  modified_base 13: mod_base = OTHER; note = 2'-O-methylguanosine-3'-phosphate
  modified_base 14: mod_base = OTHER; note = 2'-fluorouridine-3'-phosphate
  modified_base 15: mod_base = OTHER; note = 2'-O-methylguanosine-3'-phosphate
  modified_base 16: mod_base = OTHER; note = 2'-fluorocytidine-3'-phosphate
  modified_base 17: mod_base = OTHER; note = 2'-O-methyladenosine-3'-phosphate
  modified_base 18: mod_base = OTHER; note = 2'-O-methyladenosine-3'-phosphate
  modified_base 19: mod_base = OTHER; note = 2'-O-methyladenosine-3'-phosphate
  modified_base 20: mod_base = OTHER; note = 2'-O-methyluridine-3'-phosphate
  modified_base 21: mod_base = OTHER; note = 2'-O-methylcytidine-3'-phosphorothioate
  modified_base 22: mod_base = OTHER; note = 2'-O-methyluridine-3'-phosphorothioate
  modified_base 23: mod_base = OTHER; note = 2'-O-methylguanosine
ttttctgtagacgtgcaaatctg

SEQ ID NO: 1190 - RNA, 23 nt, synthetic construct
  source 1..23: mol_type = other RNA
  modified_base 1: mod_base = OTHER; note = 2'-O-methyladenosine-3'-phosphorothioate
  modified_base 2: mod_base = OTHER; note = 2'-fluoroadenosine-3'-phosphorothioate
  modified_base 3: mod_base = OTHER; note = 2'-O-methylguanosine-3'-phosphate
  modified_base 4: mod_base = OTHER; note = 2'-O-methyluridine-3'-phosphate
  modified_base 5: mod_base = OTHER; note = 2'-O-methyluridine-3'-phosphate
  modified_base 6: mod_base = OTHER; note = 2'-fluorouridine-3'-phosphate
  modified_base 7: mod_base = OTHER; note = 2'-O-methylcytidine-3'-phosphate
  modified_base 8: mod_base = OTHER; note = 2'-O-methyluridine-3'-phosphate
  modified_base 9: mod_base = OTHER; note = 2'-O-methylguanosine-3'-phosphate
  modified_base 10: mod_base = OTHER; note = 2'-O-methyluridine-3'-phosphate
  modified_base 11: mod_base = OTHER; note = 2'-O-methyladenosine-3'-phosphate
  modified_base 12: mod_base = OTHER; note = 2'-O-methylguanosine-3'-phosphate
  modified_base 13: mod_base = OTHER; note = 2'-O-methyladenosine-3'-phosphate
  modified_base 14: mod_base = OTHER; note = 2'-fluorocytidine-3'-phosphate
  modified_base 15: mod_base = OTHER; note = 2'-O-methylguanosine-3'-phosphate
  modified_base 16: mod_base = OTHER; note = 2'-fluorouridine-3'-phosphate
  modified_base 17: mod_base = OTHER; note = 2'-O-methylguanosine-3'-phosphate
  modified_base 18: mod_base = OTHER; note = 2'-O-methylcytidine-3'-phosphate
  modified_base 19: mod_base = OTHER; note = 2'-O-methyladenosine-3'-phosphate
  modified_base 20: mod_base = OTHER; note = 2'-O-methyladenosine-3'-phosphate
  modified_base 21: mod_base = OTHER; note = 2'-O-methyladenosine-3'-phosphorothioate
  modified_base 22: mod_base = OTHER; note = 2'-O-methyluridine-3'-phosphorothioate
  modified_base 23: mod_base = OTHER; note = 2'-O-methylcytidine
aagtttctgtagacgtgcaaatc

SEQ ID NO: 1191 - RNA, 23 nt, synthetic construct
  source 1..23: mol_type = other RNA
  modified_base 1: mod_base = OTHER; note = 2'-O-methyluridine-3'-phosphorothioate
  modified_base 2: mod_base = OTHER; note = 2'-fluoroadenosine-3'-phosphorothioate
  modified_base 3: mod_base = OTHER; note = 2'-O-methyladenosine-3'-phosphate
  modified_base 4: mod_base = OTHER; note = 2'-O-methylguanosine-3'-phosphate
  modified_base 5: mod_base = OTHER; note = 2'-O-methyluridine-3'-phosphate
  modified_base 6: mod_base = OTHER; note = 2'-fluorouridine-3'-phosphate
  modified_base 7: mod_base = OTHER; note = 2'-O-methyluridine-3'-phosphate
  modified_base 8: mod_base = OTHER; note = 2'-O-methylcytidine-3'-phosphate
  modified_base 9: mod_base = OTHER; note = 2'-O-methyluridine-3'-phosphate
  modified_base 10: mod_base = OTHER; note = 2'-O-methylguanosine-3'-phosphate
  modified_base 11: mod_base = OTHER; note = 2'-O-methyluridine-3'-phosphate
  modified_base 12: mod_base = OTHER; note = 2'-O-methyladenosine-3'-phosphate
  modified_base 13: mod_base = OTHER; note = 2'-O-methylguanosine-3'-phosphate
  modified_base 14: mod_base = OTHER; note = 2'-fluoroadenosine-3'-phosphate
  modified_base 15: mod_base = OTHER; note = 2'-O-methylcytidine-3'-phosphate
  modified_base 16: mod_base = OTHER; note = 2'-fluoroguanosine-3'-phosphate
  modified_base 17: mod_base = OTHER; note = 2'-O-methyluridine-3'-phosphate
  modified_base 18: mod_base = OTHER; note = 2'-O-methylguanosine-3'-phosphate
  modified_base 19: mod_base = OTHER; note = 2'-O-methylcytidine-3'-phosphate
  modified_base 20: mod_base = OTHER; note = 2'-O-methyladenosine-3'-phosphate
  modified_base 21: mod_base = OTHER; note = 2'-O-methyladenosine-3'-phosphorothioate
  modified_base 22: mod_base = OTHER; note = 2'-O-methyladenosine-3'-phosphorothioate
  modified_base 23: mod_base = OTHER; note = 2'-O-methyluridine
taagtttctgtagacgtgcaaat

SEQ ID NO: 1192 - RNA, 23 nt, synthetic construct
  source 1..23: mol_type = other RNA
  modified_base 1: mod_base = OTHER; note = 2'-O-methyluridine-3'-phosphorothioate
  modified_base 2: mod_base = OTHER; note = 2'-fluoroguanosine-3'-phosphorothioate
  modified_base 3: mod_base = OTHER; note = 2'-O-methyladenosine-3'-phosphate
  modified_base 4: mod_base = OTHER; note = 2'-O-methyluridine-3'-phosphate
  modified_base 5: mod_base = OTHER; note = 2'-O-methyladenosine-3'-phosphate
  modified_base 6: mod_base = OTHER; note = 2'-fluorouridine-3'-phosphate
  modified_base 7: mod_base = OTHER; note = 2'-O-methyladenosine-3'-phosphate
  modified_base 8: mod_base = OTHER; note = 2'-O-methyladenosine-3'-phosphate
  modified_base 9: mod_base = OTHER; note = 2'-O-methyladenosine-3'-phosphate
  modified_base 10: mod_base = OTHER; note = 2'-O-methylguanosine-3'-phosphate
  modified_base 11: mod_base = OTHER; note = 2'-O-methylguanosine-3'-phosphate
  modified_base 12: mod_base = OTHER; note = 2'-O-methyluridine-3'-phosphate
  modified_base 13: mod_base = OTHER; note = 2'-O-methyluridine-3'-phosphate
  modified_base 14: mod_base = OTHER; note = 2'-fluoroguanosine-3'-phosphate
  modified_base 15: mod_base = OTHER; note = 2'-O-methylcytidine-3'-phosphate
  modified_base 16: mod_base = OTHER; note = 2'-fluoroguanosine-3'-phosphate
  modified_base 17: mod_base = OTHER; note = 2'-O-methyluridine-3'-phosphate
  modified_base 18: mod_base = OTHER; note = 2'-O-methylcytidine-3'-phosphate
  modified_base 19: mod_base = OTHER; note = 2'-O-methylcytidine-3'-phosphate
  modified_base 20: mod_base = OTHER; note = 2'-O-methyladenosine-3'-phosphate
  modified_base 21: mod_base = OTHER; note = 2'-O-methylguanosine-3'-phosphorothioate
  modified_base 22: mod_base = OTHER; note = 2'-O-methylcytidine-3'-phosphorothioate
  modified_base 23: mod_base = OTHER; note = 2'-O-methyluridine
tgatataaaggttgcgtccagct

SEQ ID NO: 1193 - RNA, 23 nt, synthetic construct
  source 1..23: mol_type = other RNA
  modified_base 1: mod_base = OTHER; note = 2'-O-methyladenosine-3'-phosphorothioate
  modified_base 2: mod_base = OTHER; note = 2'-fluorocytidine-3'-phosphorothioate
  modified_base 3: mod_base = OTHER; note = 2'-O-methylguanosine-3'-phosphate
  modified_base 4: mod_base = OTHER; note = 2'-O-methylguanosine-3'-phosphate
  modified_base 5: mod_base = OTHER; note = 2'-O-methyladenosine-3'-phosphate
  modified_base 6: mod_base = OTHER; note = 2'-fluorouridine-3'-phosphate
  modified_base 7: mod_base = OTHER; note = 2'-O-methyladenosine-3'-phosphate
  modified_base 8: mod_base = OTHER; note = 2'-O-methyluridine-3'-phosphate
  modified_base 9: mod_base = OTHER; note = 2'-O-methyladenosine-3'-phosphate
  modified_base 10: mod_base = OTHER; note = 2'-O-methyladenosine-3'-phosphate
  modified_base 11: mod_base = OTHER; note = 2'-O-methyladenosine-3'-phosphate
  modified_base 12: mod_base = OTHER; note = 2'-O-methylguanosine-3'-phosphate
  modified_base 13: mod_base = OTHER; note = 2'-O-methylguanosine-3'-phosphate
  modified_base 14: mod_base = OTHER; note = 2'-fluorouridine-3'-phosphate
  modified_base 15: mod_base = OTHER; note = 2'-O-methyluridine-3'-phosphate
  modified_base 16: mod_base = OTHER; note = 2'-fluoroguanosine-3'-phosphate
  modified_base 17: mod_base = OTHER; note = 2'-O-methylcytidine-3'-phosphate
  modified_base 18: mod_base = OTHER; note = 2'-O-methylguanosine-3'-phosphate
  modified_base 19: mod_base = OTHER; note = 2'-O-methyluridine-3'-phosphate
  modified_base 20: mod_base = OTHER; note = 2'-O-methylcytidine-3'-phosphate
  modified_base 21: mod_base = OTHER; note = 2'-O-methylcytidine-3'-phosphorothioate
  modified_base 22: mod_base = OTHER; note = 2'-O-methyladenosine-3'-phosphorothioate
  modified_base 23: mod_base = OTHER; note = 2'-O-methylguanosine
acggatataaaggttgcgtccag

SEQ ID NO: 1194 - RNA, 23 nt, synthetic construct
  source 1..23: mol_type = other RNA
  modified_base 1: mod_base = OTHER; note = 2'-O-methyladenosine-3'-phosphorothioate
  modified_base 2: mod_base = OTHER; note = 2'-fluoroadenosine-3'-phosphorothioate
  modified_base 3: mod_base = OTHER; note = 2'-O-methylcytidine-3'-phosphate
  modified_base 4: mod_base = OTHER; note = 2'-O-methylguanosine-3'-phosphate
  modified_base 5: mod_base = OTHER; note = 2'-O-methylguanosine-3'-phosphate
  modified_base 6: mod_base = OTHER; note = 2'-fluoroadenosine-3'-phosphate
  modified_base 7: mod_base = OTHER; note = 2'-O-methyluridine-3'-phosphate
  modified_base 8: mod_base = OTHER; note = 2'-O-methyladenosine-3'-phosphate
  modified_base 9: mod_base = OTHER; note = 2'-O-methyluridine-3'-phosphate
  modified_base 10: mod_base = OTHER; note = 2'-O-methyladenosine-3'-phosphate
  modified_base 11: mod_base = OTHER; note = 2'-O-methyladenosine-3'-phosphate
  modified_base 12: mod_base = OTHER; note = 2'-O-methyladenosine-3'-phosphate
  modified_base 13: mod_base = OTHER; note = 2'-O-methylguanosine-3'-phosphate
  modified_base 14: mod_base = OTHER; note = 2'-fluoroguanosine-3'-phosphate
  modified_base 15: mod_base = OTHER; note = 2'-O-methyluridine-3'-phosphate
  modified_base 16: mod_base = OTHER; note = 2'-fluorouridine-3'-phosphate
  modified_base 17: mod_base = OTHER; note = 2'-O-methylguanosine-3'-phosphate
  modified_base 18: mod_base = OTHER; note = 2'-O-methylcytidine-3'-phosphate
  modified_base 19: mod_base = OTHER; note = 2'-O-methylguanosine-3'-phosphate
  modified_base 20: mod_base = OTHER; note = 2'-O-methyluridine-3'-phosphate
  modified_base 21: mod_base = OTHER; note = 2'-O-methylcytidine-3'-phosphorothioate
  modified_base 22: mod_base = OTHER; note = 2'-O-methylcytidine-3'-phosphorothioate
  modified_base 23: mod_base = OTHER; note = 2'-O-methyladenosine
aacggatataaaggttgcgtcca

SEQ ID NO: 1195 - RNA, 23 nt, synthetic construct
  source 1..23: mol_type = other RNA
  modified_base 1: mod_base = OTHER; note = 2'-O-methyluridine-3'-phosphorothioate
  modified_base 2: mod_base = OTHER; note = 2'-fluorouridine-3'-phosphorothioate
  modified_base 3: mod_base = OTHER; note = 2'-O-methyladenosine-3'-phosphate
  modified_base 4: mod_base = OTHER; note = 2'-O-methylcytidine-3'-phosphate
  modified_base 5: mod_base = OTHER; note = 2'-O-methyladenosine-3'-phosphate
  modified_base 6: mod_base = OTHER; note = 2'-fluoroadenosine-3'-phosphate
  modified_base 7: mod_base = OTHER; note = 2'-O-methyluridine-3'-phosphate
  modified_base 8: mod_base = OTHER; note = 2'-O-methyladenosine-3'-phosphate
  modified_base 9: mod_base = OTHER; note = 2'-O-methylguanosine-3'-phosphate
  modified_base 10: mod_base = OTHER; note = 2'-O-methyluridine-3'-phosphate
  modified_base 11: mod_base = OTHER; note = 2'-O-methyluridine-3'-phosphate
  modified_base 12: mod_base = OTHER; note = 2'-O-methyladenosine-3'-phosphate
  modified_base 13: mod_base = OTHER; note = 2'-O-methylcytidine-3'-phosphate
  modified_base 14: mod_base = OTHER; note = 2'-fluorocytidine-3'-phosphate
  modified_base 15: mod_base = OTHER; note = 2'-O-methyladenosine-3'-phosphate
  modified_base 16: mod_base = OTHER; note = 2'-fluorocytidine-3'-phosphate
  modified_base 17: mod_base = OTHER; note = 2'-O-methyluridine-3'-phosphate
  modified_base 18: mod_base = OTHER; note = 2'-O-methyladenosine-3'-phosphate
  modified_base 19: mod_base = OTHER; note = 2'-O-methyladenosine-3'-phosphate
  modified_base 20: mod_base = OTHER; note = 2'-O-methylcytidine-3'-phosphate
  modified_base 21: mod_base = OTHER; note = 2'-O-methylguanosine-3'-phosphorothioate
  modified_base 22: mod_base = OTHER; note = 2'-O-methylguanosine-3'-phosphorothioate
  modified_base 23: mod_base = OTHER; note = 2'-O-methylcytidine
ttacaatagttaccactaacggc

SEQ ID NO: 1196 - RNA, 23 nt, synthetic construct
  source 1..23: mol_type = other RNA
  modified_base 1: mod_base = OTHER; note = 2'-O-methyluridine-3'-phosphorothioate
  modified_base 2: mod_base = OTHER; note = 2'-fluoroadenosine-3'-phosphorothioate
  modified_base 3: mod_base = OTHER; note = 2'-O-methylguanosine-3'-phosphate
  modified_base 4: mod_base = OTHER; note = 2'-O-methyluridine-3'-phosphate
  modified_base 5: mod_base = OTHER; note = 2'-O-methyladenosine-3'-phosphate
  modified_base 6: mod_base = OTHER; note = 2'-fluorocytidine-3'-phosphate
  modified_base 7: mod_base = OTHER; note = 2'-O-methyladenosine-3'-phosphate
  modified_base 8: mod_base = OTHER; note = 2'-O-methyladenosine-3'-phosphate
  modified_base 9: mod_base = OTHER; note = 2'-O-methyluridine-3'-phosphate
  modified_base 10: mod_base = OTHER; note = 2'-O-methyladenosine-3'-phosphate
  modified_base 11: mod_base = OTHER; note = 2'-O-methylguanosine-3'-phosphate
  modified_base 12: mod_base = OTHER; note = 2'-O-methyluridine-3'-phosphate
  modified_base 13: mod_base = OTHER; note = 2'-O-methyluridine-3'-phosphate
  modified_base 14: mod_base = OTHER; note = 2'-fluoroadenosine-3'-phosphate
  modified_base 15: mod_base = OTHER; note = 2'-O-methylcytidine-3'-phosphate
  modified_base 16: mod_base = OTHER; note = 2'-fluorocytidine-3'-phosphate
  modified_base 17: mod_base = OTHER; note = 2'-O-methyladenosine-3'-phosphate
  modified_base 18: mod_base = OTHER; note = 2'-O-methylcytidine-3'-phosphate
  modified_base 19: mod_base = OTHER; note = 2'-O-methyluridine-3'-phosphate
  modified_base 20: mod_base = OTHER; note = 2'-O-methyladenosine-3'-phosphate
  modified_base 21: mod_base = OTHER; note = 2'-O-methyladenosine-3'-phosphorothioate
  modified_base 22: mod_base = OTHER; note = 2'-O-methylcytidine-3'-phosphorothioate
  modified_base 23: mod_base = OTHER; note = 2'-O-methylguanosine
tagtacaatagttaccactaacg

SEQ ID NO: 1197 - RNA, 23 nt, synthetic construct
  source 1..23: mol_type = other RNA
  modified_base 1: mod_base = OTHER; note = 2'-O-methyluridine-3'-phosphorothioate
  modified_base 2: mod_base = OTHER; note = 2'-fluorouridine-3'-phosphorothioate
  modified_base 3: mod_base = OTHER; note = 2'-O-methylcytidine-3'-phosphate
  modified_base 4: mod_base = OTHER; note = 2'-O-methyluridine-3'-phosphate
  modified_base 5: mod_base = OTHER; note = 2'-O-methyluridine-3'-phosphate
  modified_base 6: mod_base = OTHER; note = 2'-fluoroguanosine-3'-phosphate
  modified_base 7: mod_base = OTHER; note = 2'-O-methyluridine-3'-phosphate
  modified_base 8: mod_base = OTHER; note = 2'-O-methylcytidine-3'-phosphate
  modified_base 9: mod_base = OTHER; note = 2'-O-methyladenosine-3'-phosphate
  modified_base 10: mod_base = OTHER; note = 2'-O-methylguanosine-3'-phosphate
  modified_base 11: mod_base = OTHER; note = 2'-O-methyluridine-3'-phosphate
  modified_base 12: mod_base = OTHER; note = 2'-O-methyladenosine-3'-phosphate
  modified_base 13: mod_base = OTHER; note = 2'-O-methylcytidine-3'-phosphate
  modified_base 14: mod_base = OTHER; note = 2'-fluoroadenosine-3'-phosphate
  modified_base 15: mod_base = OTHER; note = 2'-O-methyladenosine-3'-phosphate
  modified_base 16: mod_base = OTHER; note = 2'-fluorouridine-3'-phosphate
  modified_base 17: mod_base = OTHER; note = 2'-O-methyladenosine-3'-phosphate
  modified_base 18: mod_base = OTHER; note = 2'-O-methylguanosine-3'-phosphate
  modified_base 19: mod_base = OTHER; note = 2'-O-methyluridine-3'-phosphate
  modified_base 20: mod_base = OTHER; note = 2'-O-methyluridine-3'-phosphate
  modified_base 21: mod_base = OTHER; note = 2'-O-methyladenosine-3'-phosphorothioate
  modified_base 22: mod_base = OTHER; note = 2'-O-methylcytidine-3'-phosphorothioate
  modified_base 23: mod_base = OTHER; note = 2'-O-methylcytidine
ttcttgtcagtacaatagttacc

SEQ ID NO: 1198 - RNA, 23 nt, synthetic construct
  source 1..23: mol_type = other RNA
  modified_base 1: mod_base = OTHER; note = 2'-O-methyladenosine-3'-phosphorothioate
  modified_base 2: mod_base = OTHER; note = 2'-fluoroguanosine-3'-phosphorothioate
  modified_base 3: mod_base = OTHER; note = 2'-O-methylguanosine-3'-phosphate
  modified_base 4: mod_base = OTHER; note = 2'-O-methyluridine-3'-phosphate
  modified_base 5: mod_base = OTHER; note = 2'-O-methyluridine-3'-phosphate
  modified_base 6: mod_base = OTHER; note = 2'-fluorouridine-3'-phosphate
  modified_base 7: mod_base = OTHER; note = 2'-O-methylcytidine-3'-phosphate
  modified_base 8: mod_base = OTHER; note = 2'-O-methyluridine-3'-phosphate
  modified_base 9: mod_base = OTHER; note = 2'-O-methyluridine-3'-phosphate
  modified_base 10: mod_base = OTHER; note = 2'-O-methylguanosine-3'-phosphate
  modified_base 11: mod_base = OTHER; note = 2'-O-methyluridine-3'-phosphate
  modified_base 12: mod_base = OTHER; note = 2'-O-methylcytidine-3'-phosphate
  modified_base 13: mod_base = OTHER; note = 2'-O-methyladenosine-3'-phosphate
  modified_base 14: mod_base = OTHER; note = 2'-fluoroguanosine-3'-phosphate
  modified_base 15: mod_base = OTHER; note = 2'-O-methyluridine-3'-phosphate
  modified_base 16: mod_base = OTHER; note = 2'-fluoroadenosine-3'-phosphate
  modified_base 17: mod_base = OTHER; note = 2'-O-methylcytidine-3'-phosphate
  modified_base 18: mod_base = OTHER; note = 2'-O-methyladenosine-3'-phosphate
  modified_base 19: mod_base = OTHER; note = 2'-O-methyladenosine-3'-phosphate
  modified_base 20: mod_base = OTHER; note = 2'-O-methyluridine-3'-phosphate
  modified_base 21: mod_base = OTHER; note = 2'-O-methyladenosine-3'-phosphorothioate
  modified_base 22: mod_base = OTHER; note = 2'-O-methylguanosine-3'-phosphorothioate
  modified_base 23: mod_base = OTHER; note = 2'-O-methyluridine
aggtttcttgtcagtacaatagt

SEQ ID NO: 1199 - RNA, 23 nt, synthetic construct
  source 1..23: mol_type = other RNA
  modified_base 1: mod_base = OTHER; note = 2'-O-methyluridine-3'-phosphorothioate
  modified_base 2: mod_base = OTHER; note = 2'-fluorouridine-3'-phosphorothioate
  modified_base 3: mod_base = OTHER; note = 2'-O-methyladenosine-3'-phosphate
  modified_base 4: mod_base = OTHER; note = 2'-O-methyluridine-3'-phosphate
  modified_base 5: mod_base = OTHER; note = 2'-O-methyladenosine-3'-phosphate
  modified_base 6: mod_base = OTHER; note = 2'-fluoroguanosine-3'-phosphate
  modified_base 7: mod_base = OTHER; note = 2'-O-methylcytidine-3'-phosphate
  modified_base 8: mod_base = OTHER; note = 2'-O-methyladenosine-3'-phosphate
  modified_base 9: mod_base = OTHER; note = 2'-O-methylguanosine-3'-phosphate
  modified_base 10: mod_base = OTHER; note = 2'-O-methylcytidine-3'-phosphate
  modified_base 11: mod_base = OTHER; note = 2'-O-methyladenosine-3'-phosphate
  modified_base 12: mod_base = OTHER; note = 2'-O-methylguanosine-3'-phosphate
  modified_base 13: mod_base = OTHER; note = 2'-O-methylguanosine-3'-phosphate
  modified_base 14: mod_base = OTHER; note = 2'-fluorouridine-3'-phosphate
  modified_base 15: mod_base = OTHER; note = 2'-O-methyluridine-3'-phosphate
  modified_base 16: mod_base = OTHER; note = 2'-fluorouridine-3'-phosphate
  modified_base 17: mod_base = OTHER; note = 2'-O-methylcytidine-3'-phosphate
  modified_base 18: mod_base = OTHER; note = 2'-O-methyluridine-3'-phosphate
  modified_base 19: mod_base = OTHER; note = 2'-O-methyluridine-3'-phosphate
  modified_base 20: mod_base = OTHER; note = 2'-O-methylguanosine-3'-phosphate
  modified_base 21: mod_base = OTHER; note = 2'-O-methyluridine-3'-phosphorothioate
  modified_base 22: mod_base = OTHER; note = 2'-O-methylcytidine-3'-phosphorothioate
  modified_base 23: mod_base = OTHER; note = 2'-O-methyladenosine
ttatagcagcaggtttcttgtca

SEQ ID NO: 1200 - RNA, 23 nt, synthetic construct
  source 1..23: mol_type = other RNA
  modified_base 1: mod_base = OTHER; note = 2'-O-methyluridine-3'-phosphorothioate
  modified_base 2: mod_base = OTHER; note = 2'-fluoroadenosine-3'-phosphorothioate
  modified_base 3: mod_base = OTHER; note = 2'-O-methylcytidine-3'-phosphate
  modified_base 4: mod_base = OTHER; note = 2'-O-methyluridine-3'-phosphate
  modified_base 5: mod_base = OTHER; note = 2'-O-methyluridine-3'-phosphate
  modified_base 6: mod_base = OTHER; note = 2'-fluorocytidine-3'-phosphate
  modified_base 7: mod_base = OTHER; note = 2'-O-methyluridine-3'-phosphate
  modified_base 8: mod_base = OTHER; note = 2'-O-methylcytidine-3'-phosphate
  modified_base 9: mod_base = OTHER; note = 2'-O-methyluridine-3'-phosphate
  modified_base 10: mod_base = OTHER; note = 2'-O-methylguanosine-3'-phosphate
  modified_base 11: mod_base = OTHER; note = 2'-O-methyladenosine-3'-phosphate
  modified_base 12: mod_base = OTHER; note = 2'-O-methylcytidine-3'-phosphate
  modified_base 13: mod_base = OTHER; note = 2'-O-methyladenosine-3'-phosphate
  modified_base 14: mod_base = OTHER; note = 2'-fluoroadenosine-3'-phosphate
  modified_base 15: mod_base = OTHER; note = 2'-O-methylcytidine-3'-phosphate
  modified_base 16: mod_base = OTHER; note = 2'-fluorocytidine-3'-phosphate
  modified_base 17: mod_base = OTHER; note = 2'-O-methyluridine-3'-phosphate
  modified_base 18: mod_base = OTHER; note = 2'-O-methyluridine-3'-phosphate
  modified_base 19: mod_base = OTHER; note = 2'-O-methylguanosine-3'-phosphate
  modified_base 20: mod_base = OTHER; note = 2'-O-methylguanosine-3'-phosphate
  modified_base 21: mod_base = OTHER; note = 2'-O-methylcytidine-3'-phosphorothioate
  modified_base 22: mod_base = OTHER; note = 2'-O-methyluridine-3'-phosphorothioate
  modified_base 23: mod_base = OTHER; note = 2'-O-methylguanosine
tacttctctgacaaccttggctg

SEQ ID NO: 1201 - RNA, 23 nt, synthetic construct
  source 1..23: mol_type = other RNA
  modified_base 1: mod_base = OTHER; note = 2'-O-methyladenosine-3'-phosphorothioate
  modified_base 2: mod_base = OTHER; note = 2'-fluoroadenosine-3'-phosphorothioate
  modified_base 3: mod_base = OTHER; note = 2'-O-methyluridine-3'-phosphate
  modified_base 4: mod_base = OTHER; note = 2'-O-methyladenosine-3'-phosphate
  modified_base 5: mod_base = OTHER; note = 2'-O-methylcytidine-3'-phosphate
  modified_base 6: mod_base = OTHER; note = 2'-fluorouridine-3'-phosphate
  modified_base 7: mod_base = OTHER; note = 2'-O-methyluridine-3'-phosphate
  modified_base 8: mod_base = OTHER; note = 2'-O-methylcytidine-3'-phosphate
  modified_base 9: mod_base = OTHER; note = 2'-O-methyluridine-3'-phosphate
  modified_base 10: mod_base = OTHER; note = 2'-O-methylcytidine-3'-phosphate
  modified_base 11: mod_base = OTHER; note = 2'-O-methyluridine-3'-phosphate
  modified_base 12: mod_base = OTHER; note = 2'-O-methylguanosine-3'-phosphate
  modified_base 13: mod_base = OTHER; note = 2'-O-methyladenosine-3'-phosphate
  modified_base 14: mod_base = OTHER; note = 2'-fluorocytidine-3'-phosphate
  modified_base 15: mod_base = OTHER; note = 2'-O-methyladenosine-3'-phosphate
  modified_base 16: mod_base = OTHER; note = 2'-fluoroadenosine-3'-phosphate
  modified_base 17: mod_base = OTHER; note = 2'-O-methylcytidine-3'-phosphate
  modified_base 18: mod_base = OTHER; note = 2'-O-methylcytidine-3'-phosphate
  modified_base 19: mod_base = OTHER; note = 2'-O-methyluridine-3'-phosphate
  modified_base 20: mod_base = OTHER; note = 2'-O-methyluridine-3'-phosphate
  modified_base 21: mod_base = OTHER; note = 2'-O-methylguanosine-3'-phosphorothioate
  modified_base 22: mod_base = OTHER; note = 2'-O-methylguanosine-3'-phosphorothioate
  modified_base 23: mod_base = OTHER; note = 2'-O-methylcytidine
aatacttctctgacaaccttggc

SEQ ID NO: 1202 - RNA, 23 nt, synthetic construct
  source 1..23: mol_type = other RNA
  modified_base 1: mod_base = OTHER; note = 2'-O-methyluridine-3'-phosphorothioate
  modified_base 2: mod_base = OTHER; note = 2'-fluorouridine-3'-phosphorothioate
  modified_base 3: mod_base = OTHER; note = 2'-O-methyluridine-3'-phosphate
  modified_base 4: mod_base = OTHER; note = 2'-O-methyladenosine-3'-phosphate
  modified_base 5: mod_base = OTHER; note = 2'-O-methyladenosine-3'-phosphate
  modified_base 6: mod_base = OTHER; note = 2'-fluorouridine-3'-phosphate
  modified_base 7: mod_base = OTHER; note = 2'-O-methyladenosine-3'-phosphate
  modified_base 8: mod_base = OTHER; note = 2'-O-methylcytidine-3'-phosphate
  modified_base 9: mod_base = OTHER; note = 2'-O-methyluridine-3'-phosphate
  modified_base 10: mod_base = OTHER; note = 2'-O-methyluridine-3'-phosphate
  modified_base 11: mod_base = OTHER; note = 2'-O-methylcytidine-3'-phosphate
  modified_base 12: mod_base = OTHER; note = 2'-O-methyluridine-3'-phosphate
  modified_base 13: mod_base = OTHER; note = 2'-O-methylcytidine-3'-phosphate
  modified_base 14: mod_base = OTHER; note = 2'-fluorouridine-3'-phosphate
  modified_base 15: mod_base = OTHER; note = 2'-O-methylguanosine-3'-phosphate
  modified_base 16: mod_base = OTHER; note = 2'-fluoroadenosine-3'-phosphate
  modified_base 17: mod_base = OTHER; note = 2'-O-methylcytidine-3'-phosphate
  modified_base 18: mod_base = OTHER; note = 2'-O-methyladenosine-3'-phosphate
  modified_base 19: mod_base = OTHER; note = 2'-O-methyladenosine-3'-phosphate
  modified_base 20: mod_base = OTHER; note = 2'-O-methylcytidine-3'-phosphate
  modified_base 21: mod_base = OTHER; note = 2'-O-methylcytidine-3'-phosphorothioate
  modified_base 22: mod_base = OTHER; note = 2'-O-methyluridine-3'-phosphorothioate
  modified_base 23: mod_base = OTHER; note = 2'-O-methyluridine
tttaatacttctctgacaacctt

SEQ ID NO: 1203 - RNA, 23 nt, synthetic construct
  source 1..23: mol_type = other RNA
  modified_base 1: mod_base = OTHER; note = 2'-O-methyluridine-3'-phosphorothioate
  modified_base 2: mod_base = OTHER; note = 2'-fluoroadenosine-3'-phosphorothioate
  modified_base 3: mod_base = OTHER; note = 2'-O-methylguanosine-3'-phosphate
  modified_base 4: mod_base = OTHER; note = 2'-O-methyluridine-3'-phosphate
  modified_base 5: mod_base = OTHER; note = 2'-O-methylcytidine-3'-phosphate
  modified_base 6: mod_base = OTHER; note = 2'-fluorouridine-3'-phosphate
  modified_base 7: mod_base = OTHER; note = 2'-O-methyluridine-3'-phosphate
  modified_base 8: mod_base = OTHER; note = 2'-O-methyluridine-3'-phosphate
  modified_base 9: mod_base = OTHER; note = 2'-O-methyladenosine-3'-phosphate
  modified_base 10: mod_base = OTHER; note = 2'-O-methyladenosine-3'-phosphate
  modified_base 11: mod_base = OTHER; note = 2'-O-methyluridine-3'-phosphate
  modified_base 12: mod_base = OTHER; note = 2'-O-methyladenosine-3'-phosphate
  modified_base 13: mod_base = OTHER; note = 2'-O-methylcytidine-3'-phosphate
  modified_base 14: mod_base = OTHER; note = 2'-fluorouridine-3'-phosphate
  modified_base 15: mod_base = OTHER; note = 2'-O-methyluridine-3'-phosphate
  modified_base 16: mod_base = OTHER; note = 2'-fluorocytidine-3'-phosphate
  modified_base 17: mod_base = OTHER; note = 2'-O-methyluridine-3'-phosphate
  modified_base 18: mod_base = OTHER; note = 2'-O-methylcytidine-3'-phosphate
  modified_base 19: mod_base = OTHER; note = 2'-O-methyluridine-3'-phosphate
  modified_base 20: mod_base = OTHER; note = 2'-O-methylguanosine-3'-phosphate
  modified_base 21: mod_base = OTHER; note = 2'-O-methyladenosine-3'-phosphorothioate
  modified_base 22: mod_base = OTHER; note = 2'-O-methylcytidine-3'-phosphorothioate
  modified_base 23: mod_base = OTHER; note = 2'-O-methyladenosine
tagtctttaatacttctctgaca

SEQ ID NO: 1204 - RNA, 23 nt, synthetic construct
  source 1..23: mol_type = other RNA
  modified_base 1: mod_base = OTHER; note = 2'-O-methyluridine-3'-phosphorothioate
  modified_base 2: mod_base = OTHER; note = 2'-fluoroguanosine-3'-phosphorothioate
  modified_base 3: mod_base = OTHER; note = 2'-O-methyluridine-3'-phosphate
  modified_base 4: mod_base = OTHER; note = 2'-O-methyladenosine-3'-phosphate
  modified_base 5: mod_base = OTHER; note = 2'-O-methylguanosine-3'-phosphate
  modified_base 6: mod_base = OTHER; note = 2'-fluorouridine-3'-phosphate
  modified_base 7: mod_base = OTHER; note = 2'-O-methylcytidine-3'-phosphate
  modified_base 8: mod_base = OTHER; note = 2'-O-methyluridine-3'-phosphate
  modified_base 9: mod_base = OTHER; note = 2'-O-methyluridine-3'-phosphate
  modified_base 10: mod_base = OTHER; note = 2'-O-methyluridine-3'-phosphate
  modified_base 11: mod_base = OTHER; note = 2'-O-methyladenosine-3'-phosphate
  modified_base 12: mod_base = OTHER; note = 2'-O-methyladenosine-3'-phosphate
  modified_base 13: mod_base = OTHER; note = 2'-O-methyluridine-3'-phosphate
  modified_base 14: mod_base = OTHER; note = 2'-fluoroadenosine-3'-phosphate
  modified_base 15: mod_base = OTHER; note = 2'-O-methylcytidine-3'-phosphate
  modified_base 16: mod_base = OTHER; note = 2'-fluorouridine-3'-phosphate
  modified_base 17: mod_base = OTHER; note = 2'-O-methyluridine-3'-phosphate
  modified_base 18: mod_base = OTHER; note = 2'-O-methylcytidine-3'-phosphate
  modified_base 19: mod_base = OTHER; note = 2'-O-methyluridine-3'-phosphate
  modified_base 20: mod_base = OTHER; note = 2'-O-methylcytidine-3'-phosphate
  modified_base 21: mod_base = OTHER; note = 2'-O-methyluridine-3'-phosphorothioate
  modified_base 22: mod_base = OTHER; note = 2'-O-methylguanosine-3'-phosphorothioate
  modified_base 23: mod_base = OTHER; note = 2'-O-methyladenosine
tgtagtctttaatacttctctga

SEQ ID NO: 1205 - RNA, 23 nt, synthetic construct
  source 1..23: mol_type = other RNA
  modified_base 1: mod_base = OTHER; note = 2'-O-methyluridine-3'-phosphorothioate
  modified_base 2: mod_base = OTHER; note = 2'-fluoroguanosine-3'-phosphorothioate
  modified_base 3: mod_base = OTHER; note = 2'-O-methylguanosine-3'-phosphate
  modified_base 4: mod_base = OTHER; note = 2'-O-methyluridine-3'-phosphate
  modified_base 5: mod_base = OTHER; note = 2'-O-methyladenosine-3'-phosphate
  modified_base 6: mod_base = OTHER; note = 2'-fluoroguanosine-3'-phosphate
  modified_base 7: mod_base = OTHER; note = 2'-O-methyluridine-3'-phosphate
  modified_base 8: mod_base = OTHER; note = 2'-O-methylcytidine-3'-phosphate
  modified_base 9: mod_base = OTHER; note = 2'-O-methyluridine-3'-phosphate
  modified_base 10: mod_base = OTHER; note = 2'-O-methyluridine-3'-phosphate
  modified_base 11: mod_base = OTHER; note = 2'-O-methyluridine-3'-phosphate
  modified_base 12: mod_base = OTHER; note = 2'-O-methyladenosine-3'-phosphate
  modified_base 13: mod_base = OTHER; note = 2'-O-methyladenosine-3'-phosphate
  modified_base 14: mod_base = OTHER; note = 2'-fluorouridine-3'-phosphate
  modified_base 15: mod_base = OTHER; note = 2'-O-methyladenosine-3'-phosphate
  modified_base 16: mod_base = OTHER; note = 2'-fluorocytidine-3'-phosphate
  modified_base 17: mod_base = OTHER; note = 2'-O-methyluridine-3'-phosphate
  modified_base 18: mod_base = OTHER; note = 2'-O-methyluridine-3'-phosphate
  modified_base 19: mod_base = OTHER; note = 2'-O-methylcytidine-3'-phosphate
  modified_base 20: mod_base = OTHER; note = 2'-O-methyluridine-3'-phosphate
  modified_base 21: mod_base = OTHER; note = 2'-O-methylcytidine-3'-phosphorothioate
  modified_base 22: mod_base = OTHER; note = 2'-O-methyluridine-3'-phosphorothioate
  modified_base 23: mod_base = OTHER; note = 2'-O-methylguanosine
tggtagtctttaatacttctctg

SEQ ID NO: 1206 - RNA, 23 nt, synthetic construct
  source 1..23: mol_type = other RNA
  modified_base 1: mod_base = OTHER; note = 2'-O-methyluridine-3'-phosphorothioate
  modified_base 2: mod_base = OTHER; note = 2'-fluorouridine-3'-phosphorothioate
  modified_base 3: mod_base = OTHER; note = 2'-O-methylguanosine-3'-phosphate
  modified_base 4: mod_base = OTHER; note = 2'-O-methylguanosine-3'-phosphate
  modified_base 5: mod_base = OTHER; note = 2'-O-methyluridine-3'-phosphate
  modified_base 6: mod_base = OTHER; note = 2'-fluoroadenosine-3'-phosphate
  modified_base 7: mod_base = OTHER; note = 2'-O-methylguanosine-3'-phosphate
  modified_base 8: mod_base = OTHER; note = 2'-O-methyluridine-3'-phosphate
  modified_base 9: mod_base = OTHER; note = 2'-O-methylcytidine-3'-phosphate
  modified_base 10: mod_base = OTHER; note = 2'-O-methyluridine-3'-phosphate
  modified_base 11: mod_base = OTHER; note = 2'-O-methyluridine-3'-phosphate
  modified_base 12: mod_base = OTHER; note = 2'-O-methyluridine-3'-phosphate
  modified_base 13: mod_base = OTHER; note = 2'-O-methyladenosine-3'-phosphate
  modified_base 14: mod_base = OTHER; note = 2'-fluoroadenosine-3'-phosphate
  modified_base 15: mod_base = OTHER; note = 2'-O-methyluridine-3'-phosphate
  modified_base 16: mod_base = OTHER; note = 2'-fluoroadenosine-3'-phosphate
  modified_base 17: mod_base = OTHER; note = 2'-O-methylcytidine-3'-phosphate
  modified_base 18: mod_base = OTHER; note = 2'-O-methyluridine-3'-phosphate
  modified_base 19: mod_base = OTHER; note = 2'-O-methyluridine-3'-phosphate
  modified_base 20: mod_base = OTHER; note = 2'-O-methylcytidine-3'-phosphate
  modified_base 21: mod_base = OTHER; note = 2'-O-methyluridine-3'-phosphorothioate
  modified_base 22: mod_base = OTHER; note = 2'-O-methylcytidine-3'-phosphorothioate
  modified_base 23: mod_base = OTHER; note = 2'-O-methyluridine
ttggtagtctttaatacttctct

SEQ ID NO: 1207 - RNA, 23 nt, synthetic construct
  source 1..23: mol_type = other RNA
  modified_base 1: mod_base = OTHER; note = 2'-O-methyluridine-3'-phosphorothioate
  modified_base 2: mod_base = OTHER; note = 2'-fluorouridine-3'-phosphorothioate
  modified_base 3: mod_base = OTHER; note = 2'-O-methyluridine-3'-phosphate
  modified_base 4: mod_base = OTHER; note = 2'-O-methylguanosine-3'-phosphate
  modified_base 5: mod_base = OTHER; note = 2'-O-methyladenosine-3'-phosphate
  modified_base 6: mod_base = OTHER; note = 2'-fluorocytidine-3'-phosphate
  modified_base 7: mod_base = OTHER; note = 2'-O-methylcytidine-3'-phosphate
  modified_base 8: mod_base = OTHER; note = 2'-O-methyluridine-3'-phosphate
  modified_base 9: mod_base = OTHER; note = 2'-O-methylcytidine-3'-phosphate
  modified_base 10: mod_base = OTHER; note = 2'-O-methyladenosine-3'-phosphate
  modified_base 11: mod_base = OTHER; note = 2'-O-methyladenosine-3'-phosphate
  modified_base 12: mod_base = OTHER; note = 2'-O-methyluridine-3'-phosphate
  modified_base 13: mod_base = OTHER; note = 2'-O-methylcytidine-3'-phosphate
  modified_base 14: mod_base = OTHER; note = 2'-fluoroadenosine-3'-phosphate
  modified_base 15: mod_base = OTHER; note = 2'-O-methyluridine-3'-phosphate
  modified_base 16: mod_base = OTHER; note = 2'-fluoroadenosine-3'-phosphate
  modified_base 17: mod_base = OTHER; note = 2'-O-methylguanosine-3'-phosphate
  modified_base 18: mod_base = OTHER; note = 2'-O-methylcytidine-3'-phosphate
  modified_base 19: mod_base = OTHER; note = 2'-O-methylcytidine-3'-phosphate
  modified_base 20: mod_base = OTHER; note = 2'-O-methyluridine-3'-phosphate
  modified_base 21: mod_base = OTHER; note = 2'-O-methylcytidine-3'-phosphorothioate
  modified_base 22: mod_base = OTHER; note = 2'-O-methyluridine-3'-phosphorothioate
  modified_base 23: mod_base = OTHER; note = 2'-O-methylguanosine
tttgacctcaatcatagcctctg

SEQ ID NO: 1208 - RNA, 23 nt, synthetic construct
  source 1..23: mol_type = other RNA
  modified_base 1: mod_base = OTHER; note = 2'-O-methyluridine-3'-phosphorothioate
  modified_base 2: mod_base = OTHER; note = 2'-fluoroguanosine-3'-phosphorothioate
  modified_base 3: mod_base = OTHER; note = 2'-O-methyluridine-3'-phosphate
  modified_base 4: mod_base = OTHER; note = 2'-O-methyluridine-3'-phosphate
  modified_base 5: mod_base = OTHER; note = 2'-O-methylguanosine-3'-phosphate
  modified_base 6: mod_base = OTHER; note = 2'-fluoroadenosine-3'-phosphate
  modified_base 7: mod_base = OTHER; note = 2'-O-methylcytidine-3'-phosphate
  modified_base 8: mod_base = OTHER; note = 2'-O-methylcytidine-3'-phosphate
  modified_base 9: mod_base = OTHER; note = 2'-O-methyluridine-3'-phosphate
  modified_base 10: mod_base = OTHER; note = 2'-O-methylcytidine-3'-phosphate
  modified_base 11: mod_base = OTHER; note = 2'-O-methyladenosine-3'-phosphate
  modified_base 12: mod_base = OTHER; note = 2'-O-methyladenosine-3'-phosphate
  modified_base 13: mod_base = OTHER; note = 2'-O-methyluridine-3'-phosphate
  modified_base 14: mod_base = OTHER; note = 2'-fluorocytidine-3'-phosphate
  modified_base 15: mod_base = OTHER; note = 2'-O-methyladenosine-3'-phosphate
  modified_base 16: mod_base = OTHER; note = 2'-fluorouridine-3'-phosphate
  modified_base 17: mod_base = OTHER; note = 2'-O-methyladenosine-3'-phosphate
  modified_base 18: mod_base = OTHER; note = 2'-O-methylguanosine-3'-phosphate
  modified_base 19: mod_base = OTHER; note = 2'-O-methylcytidine-3'-phosphate
  modified_base 20: mod_base = OTHER; note = 2'-O-methylcytidine-3'-phosphate
  modified_base 21: mod_base = OTHER; note = 2'-O-methyluridine-3'-phosphorothioate
  modified_base 22: mod_base = OTHER; note = 2'-O-methylcytidine-3'-phosphorothioate
  modified_base 23: mod_base = OTHER; note = 2'-O-methyluridine
tgttgacctcaatcatagcctct

SEQ ID NO: 1209 - RNA, 23 nt, synthetic construct
  source 1..23: mol_type = other RNA
  modified_base 1: mod_base = OTHER; note = 2'-O-methyluridine-3'-phosphorothioate
  modified_base 2: mod_base = OTHER; note = 2'-fluorouridine-3'-phosphorothioate
  modified_base 3: mod_base = OTHER; note = 2'-O-methyladenosine-3'-phosphate
  modified_base 4: mod_base = OTHER; note = 2'-O-methyladenosine-3'-phosphate
  modified_base 5: mod_base = OTHER; note = 2'-O-methyluridine-3'-phosphate
  modified_base 6: mod_base = OTHER; note = 2'-fluoroguanosine-3'-phosphate
  modified_base 7: mod_base = OTHER; note = 2'-O-methyluridine-3'-phosphate
  modified_base 8: mod_base = OTHER; note = 2'-O-methyluridine-3'-phosphate
  modified_base 9: mod_base = OTHER; note = 2'-O-methylguanosine-3'-phosphate
  modified_base 10: mod_base = OTHER; note = 2'-O-methyladenosine-3'-phosphate
  modified_base 11: mod_base = OTHER; note = 2'-O-methylcytidine-3'-phosphate
  modified_base 12: mod_base = OTHER; note = 2'-O-methylcytidine-3'-phosphate
  modified_base 13: mod_base = OTHER; note = 2'-O-methyluridine-3'-phosphate
  modified_base 14: mod_base = OTHER; note = 2'-fluorocytidine-3'-phosphate
  modified_base 15: mod_base = OTHER; note = 2'-O-methyladenosine-3'-phosphate
  modified_base 16: mod_base = OTHER; note = 2'-fluoroadenosine-3'-phosphate
  modified_base 17: mod_base = OTHER; note = 2'-O-methyluridine-3'-phosphate
  modified_base 18: mod_base = OTHER; note = 2'-O-methylcytidine-3'-phosphate
  modified_base 19: mod_base = OTHER; note = 2'-O-methyladenosine-3'-phosphate
  modified_base 20: mod_base = OTHER; note = 2'-O-methyluridine-3'-phosphate
  modified_base 21: mod_base = OTHER; note = 2'-O-methyladenosine-3'-phosphorothioate
  modified_base 22: mod_base = OTHER; note = 2'-O-methylguanosine-3'-phosphorothioate
  modified_base 23: mod_base = OTHER; note = 2'-O-methylcytidine
ttaatgttgacctcaatcatagc

SEQ ID NO: 1210 - RNA, 23 nt, synthetic construct
  source 1..23: mol_type = other RNA
  modified_base 1: mod_base = OTHER; note = 2'-O-methyluridine-3'-phosphorothioate
  modified_base 2: mod_base = OTHER; note = 2'-fluorouridine-3'-phosphorothioate
  modified_base 3: mod_base = OTHER; note = 2'-O-methyluridine-3'-phosphate
  modified_base 4: mod_base = OTHER; note = 2'-O-methyladenosine-3'-phosphate
  modified_base 5: mod_base = OTHER; note = 2'-O-methyladenosine-3'-phosphate
  modified_base 6: mod_base = OTHER; note = 2'-fluorouridine-3'-phosphate
  modified_base 7: mod_base = OTHER; note = 2'-O-methylguanosine-3'-phosphate
  modified_base 8: mod_base = OTHER; note = 2'-O-methyluridine-3'-phosphate
  modified_base 9: mod_base = OTHER; note = 2'-O-methyluridine-3'-phosphate
  modified_base 10: mod_base = OTHER; note = 2'-O-methylguanosine-3'-phosphate
  modified_base 11: mod_base = OTHER; note = 2'-O-methyladenosine-3'-phosphate
  modified_base 12: mod_base = OTHER; note = 2'-O-methylcytidine-3'-phosphate
  modified_base 13: mod_base = OTHER; note = 2'-O-methylcytidine-3'-phosphate
  modified_base 14: mod_base = OTHER; note = 2'-fluorouridine-3'-phosphate
  modified_base 15: mod_base = OTHER; note = 2'-O-methylcytidine-3'-phosphate
  modified_base 16: mod_base = OTHER; note = 2'-fluoroadenosine-3'-phosphate
  modified_base 17: mod_base = OTHER; note = 2'-O-methyladenosine-3'-phosphate
  modified_base 18: mod_base = OTHER; note = 2'-O-methyluridine-3'-phosphate
  modified_base 19: mod_base = OTHER; note = 2'-O-methylcytidine-3'-phosphate
  modified_base 20: mod_base = OTHER; note = 2'-O-methyladenosine-3'-phosphate
  modified_base 21: mod_base = OTHER; note = 2'-O-methyluridine-3'-phosphorothioate
  modified_base 22: mod_base = OTHER; note = 2'-O-methyladenosine-3'-phosphorothioate
  modified_base 23: mod_base = OTHER; note = 2'-O-methylguanosine
tttaatgttgacctcaatcatag

SEQ ID NO: 1211 - RNA, 23 nt, synthetic construct
  source 1..23: mol_type = other RNA
  modified_base 1: mod_base = OTHER; note = 2'-O-methyluridine-3'-phosphorothioate
  modified_base 2: mod_base = OTHER; note = 2'-fluorocytidine-3'-phosphorothioate
  modified_base 3: mod_base = OTHER; note = 2'-O-methylcytidine-3'-phosphate
  modified_base 4: mod_base = OTHER; note = 2'-O-methyladenosine-3'-phosphate
  modified_base 5: mod_base = OTHER; note = 2'-O-methylcytidine-3'-phosphate
  modified_base 6: mod_base = OTHER; note = 2'-fluorouridine-3'-phosphate
  modified_base 7: mod_base = OTHER; note = 2'-O-methyladenosine-3'-phosphate
  modified_base 8: mod_base = OTHER; note = 2'-O-methyladenosine-3'-phosphate
  modified_base 9: mod_base = OTHER; note = 2'-O-methyladenosine-3'-phosphate
  modified_base 10: mod_base = OTHER; note = 2'-O-methyluridine-3'-phosphate
  modified_base 11: mod_base = OTHER; note = 2'-O-methyluridine-3'-phosphate
  modified_base 12: mod_base = OTHER; note = 2'-O-methylcytidine-3'-phosphate
  modified_base 13: mod_base = OTHER; note = 2'-O-methyluridine-3'-phosphate
  modified_base 14: mod_base = OTHER; note = 2'-fluorouridine-3'-phosphate
  modified_base 15: mod_base = OTHER; note = 2'-O-methylguanosine-3'-phosphate
  modified_base 16: mod_base = OTHER; note = 2'-fluorouridine-3'-phosphate
  modified_base 17: mod_base = OTHER; note = 2'-O-methyluridine-3'-phosphate
  modified_base 18: mod_base = OTHER; note = 2'-O-methyladenosine-3'-phosphate
  modified_base 19: mod_base = OTHER; note = 2'-O-methyladenosine-3'-phosphate
  modified_base 20: mod_base = OTHER; note = 2'-O-methyluridine-3'-phosphate
  modified_base 21: mod_base = OTHER; note = 2'-O-methylguanosine-3'-phosphorothioate
  modified_base 22: mod_base = OTHER; note = 2'-O-methyluridine-3'-phosphorothioate
  modified_base 23: mod_base = OTHER; note = 2'-O-methyluridine
tccactaaattcttgttaatgtt

SEQ ID NO: 1212 - RNA, 23 nt, synthetic construct
  source 1..23: mol_type = other RNA
  modified_base 1: mod_base = OTHER; note = 2'-O-methyluridine-3'-phosphorothioate
  modified_base 2: mod_base = OTHER; note = 2'-fluoroadenosine-3'-phosphorothioate
  modified_base 3: mod_base = OTHER; note = 2'-O-methylguanosine-3'-phosphate
  modified_base 4: mod_base = OTHER; note = 2'-O-methylcytidine-3'-phosphate
  modified_base 5: mod_base = OTHER; note = 2'-O-methylcytidine-3'-phosphate
  modified_base 6: mod_base = OTHER; note = 2'-fluorocytidine-3'-phosphate
  modified_base 7: mod_base = OTHER; note = 2'-O-methyladenosine-3'-phosphate
  modified_base 8: mod_base = OTHER; note = 2'-O-methylcytidine-3'-phosphate
  modified_base 9: mod_base = OTHER; note = 2'-O-methyluridine-3'-phosphate
  modified_base 10: mod_base = OTHER; note = 2'-O-methyladenosine-3'-phosphate
  modified_base 11: mod_base = OTHER; note = 2'-O-methyladenosine-3'-phosphate
  modified_base 12: mod_base = OTHER; note = 2'-O-methyladenosine-3'-phosphate
  modified_base 13: mod_base = OTHER; note = 2'-O-methyluridine-3'-phosphate
  modified_base 14: mod_base = OTHER; note = 2'-fluorouridine-3'-phosphate
  modified_base 15: mod_base = OTHER; note = 2'-O-methylcytidine-3'-phosphate
  modified_base 16: mod_base = OTHER; note = 2'-fluorouridine-3'-phosphate
  modified_base 17: mod_base = OTHER; note = 2'-O-methyluridine-3'-phosphate
  modified_base 18: mod_base = OTHER; note = 2'-O-methylguanosine-3'-phosphate
  modified_base 19: mod_base = OTHER; note = 2'-O-methyluridine-3'-phosphate
  modified_base 20: mod_base = OTHER; note = 2'-O-methyluridine-3'-phosphate
  modified_base 21: mod_base = OTHER; note = 2'-O-methyladenosine-3'-phosphorothioate
  modified_base 22: mod_base = OTHER; note = 2'-O-methyladenosine-3'-phosphorothioate
  modified_base 23: mod_base = OTHER; note = 2'-O-methyluridine
tagcccactaaattcttgttaat

SEQ ID NO: 1213 - RNA, 23 nt, synthetic construct
  source 1..23: mol_type = other RNA
  modified_base 1: mod_base = OTHER; note = 2'-O-methyluridine-3'-phosphorothioate
  modified_base 2: mod_base = OTHER; note = 2'-fluoroguanosine-3'-phosphorothioate
  modified_base 3: mod_base = OTHER; note = 2'-O-methylguanosine-3'-phosphate
  modified_base 4: mod_base = OTHER; note = 2'-O-methylcytidine-3'-phosphate
  modified_base 5: mod_base = OTHER; note = 2'-O-methyladenosine-3'-phosphate
  modified_base 6: mod_base = OTHER; note = 2'-fluoroguanosine-3'-phosphate
  modified_base 7: mod_base = OTHER; note = 2'-O-methyladenosine-3'-phosphate
  modified_base 8: mod_base = OTHER; note = 2'-O-methylguanosine-3'-phosphate
  modified_base 9: mod_base = OTHER; note = 2'-O-methylcytidine-3'-phosphate
  modified_base 10: mod_base = OTHER; note = 2'-O-methylcytidine-3'-phosphate
  modified_base 11: mod_base = OTHER; note = 2'-O-methylcytidine-3'-phosphate
  modified_base 12: mod_base = OTHER; note = 2'-O-methyladenosine-3'-phosphate
  modified_base 13: mod_base = OTHER; note = 2'-O-methylcytidine-3'-phosphate
  modified_base 14: mod_base = OTHER; note = 2'-fluorouridine-3'-phosphate
  modified_base 15: mod_base = OTHER; note = 2'-O-methyladenosine-3'-phosphate
  modified_base 16: mod_base = OTHER; note = 2'-fluoroadenosine-3'-phosphate
  modified_base 17: mod_base = OTHER; note = 2'-O-methyladenosine-3'-phosphate
  modified_base 18: mod_base = OTHER; note = 2'-O-methyluridine-3'-phosphate
  modified_base 19: mod_base = OTHER; note = 2'-O-methyluridine-3'-phosphate
  modified_base 20: mod_base = OTHER; note = 2'-O-methylcytidine-3'-phosphate
  modified_base 21: mod_base = OTHER; note = 2'-O-methyluridine-3'-phosphorothioate
  modified_base 22: mod_base = OTHER; note = 2'-O-methyluridine-3'-phosphorothioate
  modified_base 23: mod_base = OTHER; note = 2'-O-methylguanosine
tggcagagcccactaaattcttg

SEQ ID NO: 1214 - RNA, 23 nt, synthetic construct
  source 1..23: mol_type = other RNA
  modified_base 1: mod_base = OTHER; note = 2'-O-methyluridine-3'-phosphorothioate
  modified_base 2: mod_base = OTHER; note = 2'-fluorocytidine-3'-phosphorothioate
  modified_base 3: mod_base = OTHER; note = 2'-O-methyluridine-3'-phosphate
  modified_base 4: mod_base = OTHER; note = 2'-O-methyladenosine-3'-phosphate
  modified_base 5: mod_base = OTHER; note = 2'-O-methyluridine-3'-phosphate
  modified_base 6: mod_base = OTHER; note = 2'-fluoroguanosine-3'-phosphate
  modified_base 7: mod_base = OTHER; note = 2'-O-methylcytidine-3'-phosphate
  modified_base 8: mod_base = OTHER; note = 2'-O-methyluridine-3'-phosphate
  modified_base 9: mod_base = OTHER; note = 2'-O-methylcytidine-3'-phosphate
  modified_base 10: mod_base = OTHER; note = 2'-O-methylcytidine-3'-phosphate
  modified_base 11: mod_base = OTHER; note = 2'-O-methylcytidine-3'-phosphate
  modified_base 12: mod_base = OTHER; note = 2'-O-methyladenosine-3'-phosphate
  modified_base 13: mod_base = OTHER; note = 2'-O-methylguanosine-3'-phosphate
  modified_base 14: mod_base = OTHER; note = 2'-fluorocytidine-3'-phosphate
  modified_base 15: mod_base = OTHER; note = 2'-O-methylcytidine-3'-phosphate
  modified_base 16: mod_base = OTHER; note = 2'-fluoroadenosine-3'-phosphate
  modified_base 17: mod_base = OTHER; note = 2'-O-methyluridine-3'-phosphate
  modified_base 18: mod_base = OTHER; note = 2'-O-methylguanosine-3'-phosphate
  modified_base 19: mod_base = OTHER; note = 2'-O-methylguanosine-3'-phosphate
  modified_base 20: mod_base = OTHER; note = 2'-O-methylcytidine-3'-phosphate
  modified_base 21: mod_base = OTHER; note = 2'-O-methyladenosine-3'-phosphorothioate
  modified_base 22: mod_base = OTHER; note = 2'-O-methylguanosine-3'-phosphorothioate
  modified_base 23: mod_base = OTHER; note = 2'-O-methyladenosine
tctatgctcccagccatggcaga

SEQ ID NO: 1215 - RNA, 23 nt, synthetic construct
  source 1..23: mol_type = other RNA
  modified_base 1: mod_base = OTHER; note = 2'-O-methyluridine-3'-phosphorothioate
  modified_base 2: mod_base = OTHER; note = 2'-fluorocytidine-3'-phosphorothioate
  modified_base 3: mod_base = OTHER; note = 2'-O-methylcytidine-3'-phosphate
  modified_base 4: mod_base = OTHER; note = 2'-O-methyluridine-3'-phosphate
  modified_base 5: mod_base = OTHER; note = 2'-O-methyladenosine-3'-phosphate
  modified_base 6: mod_base = OTHER; note = 2'-fluorouridine-3'-phosphate
  modified_base 7: mod_base = OTHER; note = 2'-O-methylguanosine-3'-phosphate
  modified_base 8: mod_base = OTHER; note = 2'-O-methylcytidine-3'-phosphate
  modified_base 9: mod_base = OTHER; note = 2'-O-methyluridine-3'-phosphate
  modified_base 10: mod_base = OTHER; note = 2'-O-methylcytidine-3'-phosphate
  modified_base 11: mod_base = OTHER; note = 2'-O-methylcytidine-3'-phosphate
  modified_base 12: mod_base = OTHER; note = 2'-O-methylcytidine-3'-phosphate
  modified_base 13: mod_base = OTHER; note = 2'-O-methyladenosine-3'-phosphate
  modified_base 14: mod_base = OTHER; note = 2'-fluoroguanosine-3'-phosphate
  modified_base 15: mod_base = OTHER; note = 2'-O-methylcytidine-3'-phosphate
  modified_base 16: mod_base = OTHER; note = 2'-fluorocytidine-3'-phosphate
  modified_base 17: mod_base = OTHER; note = 2'-O-methyladenosine-3'-phosphate
  modified_base 18: mod_base = OTHER; note = 2'-O-methyluridine-3'-phosphate
  modified_base 19: mod_base = OTHER; note = 2'-O-methylguanosine-3'-phosphate
  modified_base 20: mod_base = OTHER; note = 2'-O-methylguanosine-3'-phosphate
  modified_base 21: mod_base = OTHER; note = 2'-O-methylcytidine-3'-phosphorothioate
  modified_base 22: mod_base = OTHER; note = 2'-O-methyladenosine-3'-phosphorothioate
  modified_base 23: mod_base = OTHER; note = 2'-O-methylguanosine
tcctatgctcccagccatggcag

SEQ ID NO: 1216 - RNA, 23 nt, synthetic construct
  source 1..23: mol_type = other RNA
  modified_base 1: mod_base = OTHER; note = 2'-O-methyluridine-3'-phosphorothioate
  modified_base 2: mod_base = OTHER; note = 2'-fluoroguanosine-3'-phosphorothioate
  modified_base 3: mod_base = OTHER; note = 2'-O-methylcytidine-3'-phosphate
  modified_base 4: mod_base = OTHER; note = 2'-O-methylguanosine-3'-phosphate
  modified_base 5: mod_base = OTHER; note = 2'-O-methyluridine-3'-phosphate
  modified_base 6: mod_base = OTHER; note = 2'-fluorouridine-3'-phosphate
  modified_base 7: mod_base = OTHER; note = 2'-O-methylguanosine-3'-phosphate
  modified_base 8: mod_base = OTHER; note = 2'-O-methyluridine-3'-phosphate
  modified_base 9: mod_base = OTHER; note = 2'-O-methyladenosine-3'-phosphate
  modified_base 10: mod_base = OTHER; note = 2'-O-methylguanosine-3'-phosphate
  modified_base 11: mod_base = OTHER; note = 2'-O-methylcytidine-3'-phosphate
  modified_base 12: mod_base = OTHER; note = 2'-O-methylcytidine-3'-phosphate
  modified_base 13: mod_base = OTHER; note = 2'-O-methyluridine-3'-phosphate
  modified_base 14: mod_base = OTHER; note = 2'-fluorocytidine-3'-phosphate
  modified_base 15: mod_base = OTHER; note = 2'-O-methylcytidine-3'-phosphate
  modified_base 16: mod_base = OTHER; note = 2'-fluorouridine-3'-phosphate
  modified_base 17: mod_base = OTHER; note = 2'-O-methyladenosine-3'-phosphate
  modified_base 18: mod_base = OTHER; note = 2'-O-methyluridine-3'-phosphate
  modified_base 19: mod_base = OTHER; note = 2'-O-methylguanosine-3'-phosphate
  modified_base 20: mod_base = OTHER; note = 2'-O-methylcytidine-3'-phosphate
  modified_base 21: mod_base = OTHER; note = 2'-O-methyluridine-3'-phosphorothioate
  modified_base 22: mod_base = OTHER; note = 2'-O-methylcytidine-3'-phosphorothioate
  modified_base 23: mod_base = OTHER; note = 2'-O-methylcytidine
tgcgttgtagcctcctatgctcc

SEQ ID NO: 1217 - RNA, 23 nt, synthetic construct
  source 1..23: mol_type = other RNA
  modified_base 1: mod_base = OTHER; note = 2'-O-methyluridine-3'-phosphorothioate
  modified_base 2: mod_base = OTHER; note = 2'-fluoroguanosine-3'-phosphorothioate
  modified_base 3: mod_base = OTHER; note = 2'-O-methylguanosine-3'-phosphate
  modified_base 4: mod_base = OTHER; note = 2'-O-methylcytidine-3'-phosphate
  modified_base 5: mod_base = OTHER; note = 2'-O-methylguanosine-3'-phosphate
  modified_base 6: mod_base = OTHER; note = 2'-fluorouridine-3'-phosphate
  modified_base 7: mod_base = OTHER; note = 2'-O-methyluridine-3'-phosphate
  modified_base 8: mod_base = OTHER; note = 2'-O-methylguanosine-3'-phosphate
  modified_base 9: mod_base = OTHER; note = 2'-O-methyluridine-3'-phosphate
  modified_base 10: mod_base = OTHER; note = 2'-O-methyladenosine-3'-phosphate
  modified_base 11: mod_base = OTHER; note = 2'-O-methylguanosine-3'-phosphate
  modified_base 12: mod_base = OTHER; note = 2'-O-methylcytidine-3'-phosphate
  modified_base 13: mod_base = OTHER; note = 2'-O-methylcytidine-3'-phosphate
  modified_base 14: mod_base = OTHER; note = 2'-fluorouridine-3'-phosphate
  modified_base 15: mod_base = OTHER; note = 2'-O-methylcytidine-3'-phosphate
  modified_base 16: mod_base = OTHER; note = 2'-fluorocytidine-3'-phosphate
  modified_base 17: mod_base = OTHER; note = 2'-O-methyluridine-3'-phosphate
  modified_base 18: mod_base = OTHER; note = 2'-O-methyladenosine-3'-phosphate
  modified_base 19: mod_base = OTHER; note = 2'-O-methyluridine-3'-phosphate
  modified_base 20: mod_base = OTHER; note = 2'-O-methylguanosine-3'-phosphate
  modified_base 21: mod_base = OTHER; note = 2'-O-methylcytidine-3'-phosphorothioate
  modified_base 22: mod_base = OTHER; note = 2'-O-methyluridine-3'-phosphorothioate
  modified_base 23: mod_base = OTHER; note = 2'-O-methylcytidine
tggcgttgtagcctcctatgctc

SEQ ID NO: 1218 - RNA, 23 nt, synthetic construct
  source 1..23: mol_type = other RNA
  modified_base 1: mod_base = OTHER; note = 2'-O-methyluridine-3'-phosphorothioate
  modified_base 2: mod_base = OTHER; note = 2'-fluorocytidine-3'-phosphorothioate
  modified_base 3: mod_base = OTHER; note = 2'-O-methyladenosine-3'-phosphate
  modified_base 4: mod_base = OTHER; note = 2'-O-methyluridine-3'-phosphate
  modified_base 5: mod_base = OTHER; note = 2'-O-methylguanosine-3'-phosphate
  modified_base 6: mod_base = OTHER; note = 2'-fluoroguanosine-3'-phosphate
  modified_base 7: mod_base = OTHER; note = 2'-O-methylguanosine-3'-phosphate
  modified_base 8: mod_base = OTHER; note = 2'-O-methylcytidine-3'-phosphate
  modified_base 9: mod_base = OTHER; note = 2'-O-methylguanosine-3'-phosphate
  modified_base 10: mod_base = OTHER; note = 2'-O-methyluridine-3'-phosphate
  modified_base 11: mod_base = OTHER; note = 2'-O-methyluridine-3'-phosphate
  modified_base 12: mod_base = OTHER; note = 2'-O-methylguanosine-3'-phosphate
  modified_base 13: mod_base = OTHER; note = 2'-O-methyluridine-3'-phosphate
  modified_base 14: mod_base = OTHER; note = 2'-fluoroadenosine-3'-phosphate
  modified_base 15: mod_base = OTHER; note = 2'-O-methylguanosine-3'-phosphate
  modified_base 16: mod_base = OTHER; note = 2'-fluorocytidine-3'-phosphate
  modified_base 17: mod_base = OTHER; note = 2'-O-methylcytidine-3'-phosphate
  modified_base 18: mod_base = OTHER; note = 2'-O-methyluridine-3'-phosphate
  modified_base 19: mod_base = OTHER; note = 2'-O-methylcytidine-3'-phosphate
  modified_base 20: mod_base = OTHER; note = 2'-O-methylcytidine-3'-phosphate
  modified_base 21: mod_base = OTHER; note = 2'-O-methyluridine-3'-phosphorothioate
  modified_base 22: mod_base = OTHER; note = 2'-O-methyladenosine-3'-phosphorothioate
  modified_base 23: mod_base = OTHER; note = 2'-O-methyluridine
tcatgggcgttgtagcctcctat

SEQ ID NO: 1219 - RNA, 23 nt, synthetic construct
  source 1..23: mol_type = other RNA
  modified_base 1: mod_base = OTHER; note = 2'-O-methyluridine-3'-phosphorothioate
  modified_base 2: mod_base = OTHER; note = 2'-fluorouridine-3'-phosphorothioate
  modified_base 3: mod_base = OTHER; note = 2'-O-methyluridine-3'-phosphate
  modified_base 4: mod_base = OTHER; note = 2'-O-methylguanosine-3'-phosphate
  modified_base 5: mod_base = OTHER; note = 2'-O-methylcytidine-3'-phosphate
  modified_base 6: mod_base = OTHER; note = 2'-fluorouridine-3'-phosphate
  modified_base 7: mod_base = OTHER; note = 2'-O-methylguanosine-3'-phosphate
  modified_base 8: mod_base = OTHER; note = 2'-O-methylcytidine-3'-phosphate
  modified_base 9: mod_base = OTHER; note = 2'-O-methyladenosine-3'-phosphate
  modified_base 10: mod_base = OTHER; note = 2'-O-methyluridine-3'-phosphate
  modified_base 11: mod_base = OTHER; note = 2'-O-methylguanosine-3'-phosphate
  modified_base 12: mod_base = OTHER; note = 2'-O-methylguanosine-3'-phosphate
  modified_base 13: mod_base = OTHER; note = 2'-O-methylguanosine-3'-phosphate
  modified_base 14: mod_base = OTHER; note = 2'-fluorocytidine-3'-phosphate
  modified_base 15: mod_base = OTHER; note = 2'-O-methylguanosine-3'-phosphate
  modified_base 16: mod_base = OTHER; note = 2'-fluorouridine-3'-phosphate
  modified_base 17: mod_base = OTHER; note = 2'-O-methyluridine-3'-phosphate
  modified_base 18: mod_base = OTHER; note = 2'-O-methylguanosine-3'-phosphate
  modified_base 19: mod_base = OTHER; note = 2'-O-methyluridine-3'-phosphate
  modified_base 20: mod_base = OTHER; note = 2'-O-methyladenosine-3'-phosphate
  modified_base 21: mod_base = OTHER; note = 2'-O-methylguanosine-3'-phosphorothioate
  modified_base 22: mod_base = OTHER; note = 2'-O-methylcytidine-3'-phosphorothioate
  modified_base 23: mod_base = OTHER; note = 2'-O-methylcytidine
tttgctgcatgggcgttgtagcc

SEQ ID NO: 1220 - RNA, 23 nt, synthetic construct
  source 1..23: mol_type = other RNA
  modified_base 1: mod_base = OTHER; note = 2'-O-methyluridine-3'-phosphorothioate
  modified_base 2: mod_base = OTHER; note = 2'-fluoroguanosine-3'-phosphorothioate
  modified_base 3: mod_base = OTHER; note = 2'-O-methyluridine-3'-phosphate
  modified_base 4: mod_base = OTHER; note = 2'-O-methyluridine-3'-phosphate
  modified_base 5: mod_base = OTHER; note = 2'-O-methyluridine-3'-phosphate
  modified_base 6: mod_base = OTHER; note = 2'-fluoroguanosine-3'-phosphate
  modified_base 7: mod_base = OTHER; note = 2'-O-methylcytidine-3'-phosphate
  modified_base 8: mod_base = OTHER; note = 2'-O-methyluridine-3'-phosphate
  modified_base 9: mod_base = OTHER; note = 2'-O-methylguanosine-3'-phosphate
  modified_base 10: mod_base = OTHER; note = 2'-O-methylcytidine-3'-phosphate
  modified_base 11: mod_base = OTHER; note = 2'-O-methyladenosine-3'-phosphate
  modified_base 12: mod_base = OTHER; note = 2'-O-methyluridine-3'-phosphate
  modified_base 13: mod_base = OTHER; note = 2'-O-methylguanosine-3'-phosphate
  modified_base 14: mod_base = OTHER; note = 2'-fluoroguanosine-3'-phosphate
  modified_base 15: mod_base = OTHER; note = 2'-O-methylguanosine-3'-phosphate
  modified_base 16: mod_base = OTHER; note = 2'-fluorocytidine-3'-phosphate
  modified_base 17: mod_base = OTHER; note = 2'-O-methylguanosine-3'-phosphate
  modified_base 18: mod_base = OTHER; note = 2'-O-methyluridine-3'-phosphate
  modified_base 19: mod_base = OTHER; note = 2'-O-methyluridine-3'-phosphate
  modified_base 20: mod_base = OTHER; note = 2'-O-methylguanosine-3'-phosphate
  modified_base 21: mod_base = OTHER; note = 2'-O-methyluridine-3'-phosphorothioate
  modified_base 22: mod_base = OTHER; note = 2'-O-methyladenosine-3'-phosphorothioate
  modified_base 23: mod_base = OTHER; note = 2'-O-methylguanosine
tgtttgctgcatgggcgttgtag

SEQ ID NO: 1221 - RNA, 23 nt, synthetic construct
  source 1..23: mol_type = other RNA
  modified_base 1: mod_base = OTHER; note = 2'-O-methyluridine-3'-phosphorothioate
  modified_base 2: mod_base = OTHER; note = 2'-fluoroguanosine-3'-phosphorothioate
  modified_base 3: mod_base = OTHER; note = 2'-O-methyladenosine-3'-phosphate
  modified_base 4: mod_base = OTHER; note = 2'-O-methylcytidine-3'-phosphate
  modified_base 5: mod_base = OTHER; note = 2'-O-methyladenosine-3'-phosphate
  modified_base 6: mod_base = OTHER; note = 2'-fluoroadenosine-3'-phosphate
  modified_base 7: mod_base = OTHER; note = 2'-O-methyluridine-3'-phosphate
  modified_base 8: mod_base = OTHER; note = 2'-O-methylguanosine-3'-phosphate
  modified_base 9: mod_base = OTHER; note = 2'-O-methyluridine-3'-phosphate
  modified_base 10: mod_base = OTHER; note = 2'-O-methyluridine-3'-phosphate
  modified_base 11: mod_base = OTHER; note = 2'-O-methyluridine-3'-phosphate
  modified_base 12: mod_base = OTHER; note = 2'-O-methylguanosine-3'-phosphate
  modified_base 13: mod_base = OTHER; note = 2'-O-methylcytidine-3'-phosphate
  modified_base 14: mod_base = OTHER; note = 2'-fluorouridine-3'-phosphate
  modified_base 15: mod_base = OTHER; note = 2'-O-methylguanosine-3'-phosphate
  modified_base 16: mod_base = OTHER; note = 2'-fluorocytidine-3'-phosphate
  modified_base 17: mod_base = OTHER; note = 2'-O-methyladenosine-3'-phosphate
  modified_base 18: mod_base = OTHER; note = 2'-O-methyluridine-3'-phosphate
  modified_base 19: mod_base = OTHER; note = 2'-O-methylguanosine-3'-phosphate
  modified_base 20: mod_base = OTHER; note = 2'-O-methylguanosine-3'-phosphate
  modified_base 21: mod_base = OTHER; note = 2'-O-methylguanosine-3'-phosphorothioate
  modified_base 22: mod_base = OTHER; note = 2'-O-methylcytidine-3'-phosphorothioate
  modified_base 23: mod_base = OTHER; note = 2'-O-methylguanosine
tgacaatgtttgctgcatgggcg

SEQ ID NO: 1222 - RNA, 23 nt, synthetic construct
  source 1..23: mol_type = other RNA
  modified_base 1: mod_base = OTHER; note = 2'-O-methyluridine-3'-phosphorothioate
  modified_base 2: mod_base = OTHER; note = 2'-fluorouridine-3'-phosphorothioate
  modified_base 3: mod_base = OTHER; note = 2'-O-methylguanosine-3'-phosphate
  modified_base 4: mod_base = OTHER; note = 2'-O-methyladenosine-3'-phosphate
  modified_base 5: mod_base = OTHER; note = 2'-O-methylcytidine-3'-phosphate
  modified_base 6: mod_base = OTHER; note = 2'-fluoroadenosine-3'-phosphate
  modified_base 7: mod_base = OTHER; note = 2'-O-methyladenosine-3'-phosphate
  modified_base 8: mod_base = OTHER; note = 2'-O-methyluridine-3'-phosphate
  modified_base 9: mod_base = OTHER; note = 2'-O-methylguanosine-3'-phosphate
  modified_base 10: mod_base = OTHER; note = 2'-O-methyluridine-3'-phosphate
  modified_base 11: mod_base = OTHER; note = 2'-O-methyluridine-3'-phosphate
  modified_base 12: mod_base = OTHER; note = 2'-O-methyluridine-3'-phosphate
  modified_base 13: mod_base = OTHER; note = 2'-O-methylguanosine-3'-phosphate
  modified_base 14: mod_base = OTHER; note = 2'-fluorocytidine-3'-phosphate
  modified_base 15: mod_base = OTHER; note = 2'-O-methyluridine-3'-phosphate
  modified_base 16: mod_base = OTHER; note = 2'-fluoroguanosine-3'-phosphate
  modified_base 17: mod_base = OTHER; note = 2'-O-methylcytidine-3'-phosphate
  modified_base 18: mod_base = OTHER; note = 2'-O-methyladenosine-3'-phosphate
  modified_base 19: mod_base = OTHER; note = 2'-O-methyluridine-3'-phosphate
  modified_base 20: mod_base = OTHER; note = 2'-O-methylguanosine-3'-phosphate
  modified_base 21: mod_base = OTHER; note = 2'-O-methylguanosine-3'-phosphorothioate
  modified_base 22: mod_base = OTHER; note = 2'-O-methylguanosine-3'-phosphorothioate
  modified_base 23: mod_base = OTHER; note = 2'-O-methylcytidine
ttgacaatgtttgctgcatgggc

SEQ ID NO: 1223 - RNA, 23 nt, synthetic construct
  source 1..23: mol_type = other RNA
  modified_base 1: mod_base = OTHER; note = 2'-O-methyluridine-3'-phosphorothioate
  modified_base 2: mod_base = OTHER; note = 2'-fluorocytidine-3'-phosphorothioate
  modified_base 3: mod_base = OTHER; note = 2'-O-methylcytidine-3'-phosphate
  modified_base 4: mod_base = OTHER; note = 2'-O-methyladenosine-3'-phosphate
  modified_base 5: mod_base = OTHER; note = 2'-O-methylcytidine-3'-phosphate
  modified_base 6: mod_base = OTHER; note = 2'-fluoroadenosine-3'-phosphate
  modified_base 7: mod_base = OTHER; note = 2'-O-methylguanosine-3'-phosphate
  modified_base 8: mod_base = OTHER; note = 2'-O-methylguanosine-3'-phosphate
  modified_base 9: mod_base = OTHER; note = 2'-O-methylcytidine-3'-phosphate
  modified_base 10: mod_base = OTHER; note = 2'-O-methyladenosine-3'-phosphate
  modified_base 11: mod_base = OTHER; note = 2'-O-methyladenosine-3'-phosphate
  modified_base 12: mod_base = OTHER; note = 2'-O-methyluridine-3'-phosphate
  modified_base 13: mod_base = OTHER; note = 2'-O-methylguanosine-3'-phosphate
  modified_base 14: mod_base = OTHER; note = 2'-fluorouridine-3'-phosphate
  modified_base 15: mod_base = OTHER; note = 2'-O-methyladenosine-3'-phosphate
  modified_base 16: mod_base = OTHER; note = 2'-fluoroguanosine-3'-phosphate
  modified_base 17: mod_base = OTHER; note = 2'-O-methyladenosine-3'-phosphate
  modified_base 18: mod_base = OTHER; note = 2'-O-methyluridine-3'-phosphate
  modified_base 19: mod_base = OTHER; note = 2'-O-methylguanosine-3'-phosphate
  modified_base 20: mod_base = OTHER; note = 2'-O-methylguanosine-3'-phosphate
  modified_base 21: mod_base = OTHER; note = 2'-O-methylcytidine-3'-phosphorothioate
  modified_base 22: mod_base = OTHER; note = 2'-O-methylguanosine-3'-phosphorothioate
  modified_base 23: mod_base = OTHER; note = 2'-O-methylguanosine
tccacaggcaatgtagatggcgg

SEQ ID NO: 1224 - RNA, 23 nt, synthetic construct
  source 1..23: mol_type = other RNA
  modified_base 1: mod_base = OTHER; note = 2'-O-methyluridine-3'-phosphorothioate
  modified_base 2: mod_base = OTHER; note = 2'-fluoroadenosine-3'-phosphorothioate
  modified_base 3: mod_base = OTHER; note = 2'-O-methylcytidine-3'-phosphate
  modified_base 4: mod_base = OTHER; note = 2'-O-methylcytidine-3'-phosphate
  modified_base 5: mod_base = OTHER; note = 2'-O-methyladenosine-3'-phosphate
  modified_base 6: mod_base = OTHER; note = 2'-fluoroadenosine-3'-phosphate
  modified_base 7: mod_base = OTHER; note = 2'-O-methylcytidine-3'-phosphate
  modified_base 8: mod_base = OTHER; note = 2'-O-methyladenosine-3'-phosphate
  modified_base 9: mod_base = OTHER; note = 2'-O-methyluridine-3'-phosphate
  modified_base 10: mod_base = OTHER; note = 2'-O-methyluridine-3'-phosphate
  modified_base 11: mod_base = OTHER; note = 2'-O-methylcytidine-3'-phosphate
  modified_base 12: mod_base = OTHER; note = 2'-O-methyluridine-3'-phosphate
  modified_base 13: mod_base = OTHER; note = 2'-O-methylguanosine-3'-phosphate
  modified_base 14: mod_base = OTHER; note = 2'-fluorouridine-3'-phosphate
  modified_base 15: mod_base = OTHER; note = 2'-O-methylguanosine-3'-phosphate
  modified_base 16: mod_base = OTHER; note = 2'-fluorocytidine-3'-phosphate
  modified_base 17: mod_base = OTHER; note = 2'-O-methyluridine-3'-phosphate
  modified_base 18: mod_base = OTHER; note = 2'-O-methylguanosine-3'-phosphate
  modified_base 19: mod_base = OTHER; note = 2'-O-methylcytidine-3'-phosphate
  modified_base 20: mod_base = OTHER; note = 2'-O-methyladenosine-3'-phosphate
  modified_base 21: mod_base = OTHER; note = 2'-O-methyluridine-3'-phosphorothioate
  modified_base 22: mod_base = OTHER; note = 2'-O-methylcytidine-3'-phosphorothioate
  modified_base 23: mod_base = OTHER; note = 2'-O-methylcytidine
taccaacattctgtgctgcatcc

SEQ ID NO: 1225 - RNA, 23 nt, synthetic construct
  source 1..23: mol_type = other RNA
  modified_base 1: mod_base = OTHER; note = 2'-O-methyladenosine-3'-phosphorothioate
  modified_base 2: mod_base = OTHER; note = 2'-fluorocytidine-3'-phosphorothioate
  modified_base 3: mod_base = OTHER; note = 2'-O-methyluridine-3'-phosphate
  modified_base 4: mod_base = OTHER; note = 2'-O-methyladenosine-3'-phosphate
  modified_base 5: mod_base = OTHER; note = 2'-O-methylcytidine-3'-phosphate
  modified_base 6: mod_base = OTHER; note = 2'-fluorocytidine-3'-phosphate
  modified_base 7: mod_base = OTHER; note = 2'-O-methyladenosine-3'-phosphate
  modified_base 8: mod_base = OTHER; note = 2'-O-methyladenosine-3'-phosphate
  modified_base 9: mod_base = OTHER; note = 2'-O-methylcytidine-3'-phosphate
  modified_base 10: mod_base = OTHER; note = 2'-O-methyladenosine-3'-phosphate
  modified_base 11: mod_base = OTHER; note = 2'-O-methyluridine-3'-phosphate
  modified_base 12: mod_base = OTHER; note = 2'-O-methyluridine-3'-phosphate
  modified_base 13: mod_base = OTHER; note = 2'-O-methylcytidine-3'-phosphate
  modified_base 14: mod_base = OTHER; note = 2'-fluorouridine-3'-phosphate
  modified_base 15: mod_base = OTHER; note = 2'-O-methylguanosine-3'-phosphate
  modified_base 16: mod_base = OTHER; note = 2'-fluorouridine-3'-phosphate
  modified_base 17: mod_base = OTHER; note = 2'-O-methylguanosine-3'-phosphate
  modified_base 18: mod_base = OTHER; note = 2'-O-methylcytidine-3'-phosphate
  modified_base 19: mod_base = OTHER; note = 2'-O-methyluridine-3'-phosphate
  modified_base 20: mod_base = OTHER; note = 2'-O-methylguanosine-3'-phosphate
  modified_base 21: mod_base = OTHER; note = 2'-O-methylcytidine-3'-phosphorothioate
  modified_base 22: mod_base = OTHER; note = 2'-O-methyladenosine-3'-phosphorothioate
  modified_base 23: mod_base = OTHER; note = 2'-O-methyluridine
actaccaacattctgtgctgcat

SEQ ID NO: 1226 - RNA, 23 nt, synthetic construct
  source 1..23: mol_type = other RNA
  modified_base 1: mod_base = OTHER; note = 2'-O-methyluridine-3'-phosphorothioate
  modified_base 2: mod_base = OTHER; note = 2'-fluoroguanosine-3'-phosphorothioate
  modified_base 3: mod_base = OTHER; note = 2'-O-methyladenosine-3'-phosphate
  modified_base 4: mod_base = OTHER; note = 2'-O-methyladenosine-3'-phosphate
  modified_base 5: mod_base = OTHER; note = 2'-O-methylcytidine-3'-phosphate
  modified_base 6: mod_base = OTHER; note = 2'-fluorouridine-3'-phosphate
  modified_base 7: mod_base = OTHER; note = 2'-O-methyladenosine-3'-phosphate
  modified_base 8: mod_base = OTHER; note = 2'-O-methylcytidine-3'-phosphate
  modified_base 9: mod_base = OTHER; note = 2'-O-methylcytidine-3'-phosphate
  modified_base 10: mod_base = OTHER; note = 2'-O-methyladenosine-3'-phosphate
  modified_base 11: mod_base = OTHER; note = 2'-O-methyladenosine-3'-phosphate
  modified_base 12: mod_base = OTHER; note = 2'-O-methylcytidine-3'-phosphate
  modified_base 13: mod_base = OTHER; note = 2'-O-methyladenosine-3'-phosphate
  modified_base 14: mod_base = OTHER; note = 2'-fluorouridine-3'-phosphate
  modified_base 15: mod_base = OTHER; note = 2'-O-methyluridine-3'-phosphate
  modified_base 16: mod_base = OTHER; note = 2'-fluorocytidine-3'-phosphate
  modified_base 17: mod_base = OTHER; note = 2'-O-methyluridine-3'-phosphate
  modified_base 18: mod_base = OTHER; note = 2'-O-methylguanosine-3'-phosphate
  modified_base 19: mod_base = OTHER; note = 2'-O-methyluridine-3'-phosphate
  modified_base 20: mod_base = OTHER; note = 2'-O-methylguanosine-3'-phosphate
  modified_base 21: mod_base = OTHER; note = 2'-O-methylcytidine-3'-phosphorothioate
  modified_base 22: mod_base = OTHER; note = 2'-O-methyluridine-3'-phosphorothioate
  modified_base 23: mod_base = OTHER; note = 2'-O-methylguanosine
tgaactaccaacattctgtgctg

SEQ ID NO: 1227 - RNA, 23 nt, synthetic construct
  source 1..23: mol_type = other RNA
  modified_base 1: mod_base = OTHER; note = 2'-O-methyluridine-3'-phosphorothioate
  modified_base 2: mod_base = OTHER; note = 2'-fluoroadenosine-3'-phosphorothioate
  modified_base 3: mod_base = OTHER; note = 2'-O-methyluridine-3'-phosphate
  modified_base 4: mod_base = OTHER; note = 2'-O-methyladenosine-3'-phosphate
  modified_base 5: mod_base = OTHER; note = 2'-O-methyladenosine-3'-phosphate
  modified_base 6: mod_base = OTHER; note = 2'-fluoroadenosine-3'-phosphate
  modified_base 7: mod_base = OTHER; note = 2'-O-methyluridine-3'-phosphate
  modified_base 8: mod_base = OTHER; note = 2'-O-methylcytidine-3'-phosphate
  modified_base 9: mod_base = OTHER; note = 2'-O-methyluridine-3'-phosphate
  modified_base 10: mod_base = OTHER; note = 2'-O-methyluridine-3'-phosphate
  modified_base 11: mod_base = OTHER; note = 2'-O-methylcytidine-3'-phosphate
  modified_base 12: mod_base = OTHER; note = 2'-O-methyladenosine-3'-phosphate
  modified_base 13: mod_base = OTHER; note = 2'-O-methyluridine-3'-phosphate
  modified_base 14: mod_base = OTHER; note = 2'-fluorouridine-3'-phosphate
  modified_base 15: mod_base = OTHER; note = 2'-O-methyluridine-3'-phosphate
  modified_base 16: mod_base = OTHER; note = 2'-fluoroguanosine-3'-phosphate
  modified_base 17: mod_base = OTHER; note = 2'-O-methyluridine-3'-phosphate
  modified_base 18: mod_base = OTHER; note = 2'-O-methylguanosine-3'-phosphate
  modified_base 19: mod_base = OTHER; note = 2'-O-methylguanosine-3'-phosphate
  modified_base 20: mod_base = OTHER; note = 2'-O-methylguanosine-3'-phosphate
  modified_base 21: mod_base = OTHER; note = 2'-O-methyladenosine-3'-phosphorothioate
  modified_base 22: mod_base = OTHER; note = 2'-O-methylcytidine-3'-phosphorothioate
  modified_base 23: mod_base = OTHER; note = 2'-O-methylcytidine
tataaatcttcatttgtgggacc

SEQ ID NO: 1228 - RNA, 23 nt, synthetic construct
  source 1..23: mol_type = other RNA
  modified_base 1: mod_base = OTHER; note = 2'-O-methyladenosine-3'-phosphorothioate
  modified_base 2: mod_base = OTHER; note = 2'-fluorouridine-3'-phosphorothioate
  modified_base 3: mod_base = OTHER; note = 2'-O-methyladenosine-3'-phosphate
  modified_base 4: mod_base = OTHER; note = 2'-O-methyluridine-3'-phosphate
  modified_base 5: mod_base = OTHER; note = 2'-O-methyladenosine-3'-phosphate
  modified_base 6: mod_base = OTHER; note = 2'-fluorouridine-3'-phosphate
  modified_base 7: mod_base = OTHER; note = 2'-O-methyladenosine-3'-phosphate
  modified_base 8: mod_base = OTHER; note = 2'-O-methyladenosine-3'-phosphate
  modified_base 9: mod_base = OTHER; note = 2'-O-methyladenosine-3'-phosphate
  modified_base 10: mod_base = OTHER; note = 2'-O-methyluridine-3'-phosphate
  modified_base 11: mod_base = OTHER; note = 2'-O-methylcytidine-3'-phosphate
  modified_base 12: mod_base = OTHER; note = 2'-O-methyluridine-3'-phosphate
  modified_base 13: mod_base = OTHER; note = 2'-O-methyluridine-3'-phosphate
  modified_base 14: mod_base = OTHER; note = 2'-fluorocytidine-3'-phosphate
  modified_base 15: mod_base = OTHER; note = 2'-O-methyladenosine-3'-phosphate
  modified_base 16: mod_base = OTHER; note = 2'-fluorouridine-3'-phosphate
  modified_base 17: mod_base = OTHER; note = 2'-O-methyluridine-3'-phosphate
  modified_base 18: mod_base = OTHER; note = 2'-O-methyluridine-3'-phosphate
  modified_base 19: mod_base = OTHER; note = 2'-O-methylguanosine-3'-phosphate
  modified_base 20: mod_base = OTHER; note = 2'-O-methyluridine-3'-phosphate
  modified_base 21: mod_base = OTHER; note = 2'-O-methylguanosine-3'-phosphorothioate
  modified_base 22: mod_base = OTHER; note = 2'-O-methylguanosine-3'-phosphorothioate
  modified_base 23: mod_base = OTHER; note = 2'-O-methylguanosine
atatataaatcttcatttgtggg

SEQ ID NO: 1229 - RNA, 23 nt, synthetic construct
  source 1..23: mol_type = other RNA
  modified_base 1: mod_base = OTHER; note = 2'-O-methyluridine-3'-phosphorothioate
  modified_base 2: mod_base = OTHER; note = 2'-fluoroguanosine-3'-phosphorothioate
  modified_base 3: mod_base = OTHER; note = 2'-O-methyladenosine-3'-phosphate
  modified_base 4: mod_base = OTHER; note = 2'-O-methyluridine-3'-phosphate
  modified_base 5: mod_base = OTHER; note = 2'-O-methyladenosine-3'-phosphate
  modified_base 6: mod_base = OTHER; note = 2'-fluorouridine-3'-phosphate
  modified_base 7: mod_base = OTHER; note = 2'-O-methyladenosine-3'-phosphate
  modified_base 8: mod_base = OTHER; note = 2'-O-methyluridine-3'-phosphate
  modified_base 9: mod_base = OTHER; note = 2'-O-methyladenosine-3'-phosphate
  modified_base 10: mod_base = OTHER; note = 2'-O-methyladenosine-3'-phosphate
  modified_base 11: mod_base = OTHER; note = 2'-O-methyladenosine-3'-phosphate
  modified_base 12: mod_base = OTHER; note = 2'-O-methyluridine-3'-phosphate
  modified_base 13: mod_base = OTHER; note = 2'-O-methylcytidine-3'-phosphate
  modified_base 14: mod_base = OTHER; note = 2'-fluorouridine-3'-phosphate
  modified_base 15: mod_base = OTHER; note = 2'-O-methyluridine-3'-phosphate
  modified_base 16: mod_base = OTHER; note = 2'-fluorocytidine-3'-phosphate
  modified_base 17: mod_base = OTHER; note = 2'-O-methyladenosine-3'-phosphate
  modified_base 18: mod_base = OTHER; note = 2'-O-methyluridine-3'-phosphate
  modified_base 19: mod_base = OTHER; note = 2'-O-methyluridine-3'-phosphate
  modified_base 20: mod_base = OTHER; note = 2'-O-methyluridine-3'-phosphate
  modified_base 21: mod_base = OTHER; note = 2'-O-methylguanosine-3'-phosphorothioate
  modified_base 22: mod_base = OTHER; note = 2'-O-methyluridine-3'-phosphorothioate
  modified_base 23: mod_base = OTHER; note = 2'-O-methylguanosine
tgatatataaatcttcatttgtg

SEQ ID NO: 1230 - RNA, 23 nt, synthetic construct
  source 1..23: mol_type = other RNA
  modified_base 1: mod_base = OTHER; note = 2'-O-methyluridine-3'-phosphorothioate
  modified_base 2: mod_base = OTHER; note = 2'-fluoroadenosine-3'-phosphorothioate
  modified_base 3: mod_base = OTHER; note = 2'-O-methylguanosine-3'-phosphate
  modified_base 4: mod_base = OTHER; note = 2'-O-methyladenosine-3'-phosphate
  modified_base 5: mod_base = OTHER; note = 2'-O-methyluridine-3'-phosphate
  modified_base 6: mod_base = OTHER; note = 2'-fluoroguanosine-3'-phosphate
  modified_base 7: mod_base = OTHER; note = 2'-O-methylguanosine-3'-phosphate
  modified_base 8: mod_base = OTHER; note = 2'-O-methylcytidine-3'-phosphate
  modified_base 9: mod_base = OTHER; note = 2'-O-methyladenosine-3'-phosphate
  modified_base 10: mod_base = OTHER; note = 2'-O-methyluridine-3'-phosphate
  modified_base 11: mod_base = OTHER; note = 2'-O-methylguanosine-3'-phosphate
  modified_base 12: mod_base = OTHER; note = 2'-O-methylguanosine-3'-phosphate
  modified_base 13: mod_base = OTHER; note = 2'-O-methyluridine-3'-phosphate
  modified_base 14: mod_base = OTHER; note = 2'-fluoroguanosine-3'-phosphate
  modified_base 15: mod_base = OTHER; note = 2'-O-methylcytidine-3'-phosphate
  modified_base 16: mod_base = OTHER; note = 2'-fluoroadenosine-3'-phosphate
  modified_base 17: mod_base = OTHER; note = 2'-O-methylguanosine-3'-phosphate
  modified_base 18: mod_base = OTHER; note = 2'-O-methylcytidine-3'-phosphate
  modified_base 19: mod_base = OTHER; note = 2'-O-methyluridine-3'-phosphate
  modified_base 20: mod_base = OTHER; note = 2'-O-methylguanosine-3'-phosphate
  modified_base 21: mod_base = OTHER; note = 2'-O-methyladenosine-3'-phosphorothioate
  modified_base 22: mod_base = OTHER; note = 2'-O-methyluridine-3'-phosphorothioate
  modified_base 23: mod_base = OTHER; note = 2'-O-methyladenosine
tagatggcatggtgcagctgata

SEQ ID NO: 1231 - RNA, 23 nt, synthetic construct
  source 1..23: mol_type = other RNA
  modified_base 1: mod_base = OTHER; note = 2'-O-methyluridine-3'-phosphorothioate
  modified_base 2: mod_base = OTHER; note = 2'-fluoroguanosine-3'-phosphorothioate
  modified_base 3: mod_base = OTHER; note = 2'-O-methyladenosine-3'-phosphate
  modified_base 4: mod_base = OTHER; note = 2'-O-methyladenosine-3'-phosphate
  modified_base 5: mod_base = OTHER; note = 2'-O-methylcytidine-3'-phosphate
  modified_base 6: mod_base = OTHER; note = 2'-fluoroadenosine-3'-phosphate
  modified_base 7: mod_base = OTHER; note = 2'-O-methylcytidine-3'-phosphate
  modified_base 8: mod_base = OTHER; note = 2'-O-methylcytidine-3'-phosphate
  modified_base 9: mod_base = OTHER; note = 2'-O-methyluridine-3'-phosphate
  modified_base 10: mod_base = OTHER; note = 2'-O-methyladenosine-3'-phosphate
  modified_base 11: mod_base = OTHER; note = 2'-O-methylguanosine-3'-phosphate
  modified_base 12: mod_base = OTHER; note = 2'-O-methylcytidine-3'-phosphate
  modified_base 13: mod_base = OTHER; note = 2'-O-methyladenosine-3'-phosphate
  modified_base 14: mod_base = OTHER; note = 2'-fluorouridine-3'-phosphate
  modified_base 15: mod_base = OTHER; note = 2'-O-methylcytidine-3'-phosphate
  modified_base 16: mod_base = OTHER; note = 2'-fluorouridine-3'-phosphate
  modified_base 17: mod_base = OTHER; note = 2'-O-methylguanosine-3'-phosphate
  modified_base 18: mod_base = OTHER; note = 2'-O-methylcytidine-3'-phosphate
  modified_base 19: mod_base = OTHER; note = 2'-O-methyladenosine-3'-phosphate
  modified_base 20: mod_base = OTHER; note = 2'-O-methyladenosine-3'-phosphate
  modified_base 21: mod_base = OTHER; note = 2'-O-methyladenosine-3'-phosphorothioate
  modified_base 22: mod_base = OTHER; note = 2'-O-methylcytidine-3'-phosphorothioate
  modified_base 23: mod_base = OTHER; note = 2'-O-methyladenosine
tgaacacctagcatctgcaaaca

SEQ ID NO: 1232 - RNA, 23 nt, synthetic construct
  source 1..23: mol_type = other RNA
  modified_base 1: mod_base = OTHER; note = 2'-O-methyluridine-3'-phosphorothioate
  modified_base 2: mod_base = OTHER; note = 2'-fluorouridine-3'-phosphorothioate
  modified_base 3: mod_base = OTHER; note = 2'-O-methylguanosine-3'-phosphate
  modified_base 4: mod_base = OTHER; note = 2'-O-methyladenosine-3'-phosphate
  modified_base 5: mod_base = OTHER; note = 2'-O-methyladenosine-3'-phosphate
  modified_base 6: mod_base = OTHER; note = 2'-fluorocytidine-3'-phosphate
  modified_base 7: mod_base = OTHER; note = 2'-O-methyladenosine-3'-phosphate
  modified_base 8: mod_base = OTHER; note = 2'-O-methylcytidine-3'-phosphate
  modified_base 9: mod_base = OTHER; note = 2'-O-methylcytidine-3'-phosphate
  modified_base 10: mod_base = OTHER; note = 2'-O-methyluridine-3'-phosphate
  modified_base 11: mod_base = OTHER; note = 2'-O-methyladenosine-3'-phosphate
  modified_base 12: mod_base = OTHER; note = 2'-O-methylguanosine-3'-phosphate
  modified_base 13: mod_base = OTHER; note = 2'-O-methylcytidine-3'-phosphate
  modified_base 14: mod_base = OTHER; note = 2'-fluoroadenosine-3'-phosphate
  modified_base 15: mod_base = OTHER; note = 2'-O-methyluridine-3'-phosphate
  modified_base 16: mod_base = OTHER; note = 2'-fluorocytidine-3'-phosphate
  modified_base 17: mod_base = OTHER; note = 2'-O-methyluridine-3'-phosphate
  modified_base 18: mod_base = OTHER; note = 2'-O-methylguanosine-3'-phosphate
  modified_base 19: mod_base = OTHER; note = 2'-O-methylcytidine-3'-phosphate
  modified_base 20: mod_base = OTHER; note = 2'-O-methyladenosine-3'-phosphate
  modified_base 21: mod_base = OTHER; note = 2'-O-methyladenosine-3'-phosphorothioate
  modified_base 22: mod_base = OTHER; note = 2'-O-methyladenosine-3'-phosphorothioate
  modified_base 23: mod_base = OTHER; note = 2'-O-methylcytidine
ttgaacacctagcatctgcaaac

SEQ ID NO: 1233 - RNA, 23 nt, synthetic construct
  source 1..23: mol_type = other RNA
  modified_base 1: mod_base = OTHER; note = 2'-O-methyluridine-3'-phosphorothioate
  modified_base 2: mod_base = OTHER; note = 2'-fluorocytidine-3'-phosphorothioate
  modified_base 3: mod_base = OTHER; note = 2'-O-methylcytidine-3'-phosphate
  modified_base 4: mod_base = OTHER; note = 2'-O-methyluridine-3'-phosphate
  modified_base 5: mod_base = OTHER; note = 2'-O-methyluridine-3'-phosphate
  modified_base 6: mod_base = OTHER; note = 2'-fluoroguanosine-3'-phosphate
  modified_base 7: mod_base = OTHER; note = 2'-O-methyladenosine-3'-phosphate
  modified_base 8: mod_base = OTHER; note = 2'-O-methyladenosine-3'-phosphate
  modified_base 9: mod_base = OTHER; note = 2'-O-methylcytidine-3'-phosphate
  modified_base 10: mod_base = OTHER; note = 2'-O-methyladenosine-3'-phosphate
  modified_base 11: mod_base = OTHER; note = 2'-O-methylcytidine-3'-phosphate
  modified_base 12: mod_base = OTHER; note = 2'-O-methylcytidine-3'-phosphate
  modified_base 13: mod_base = OTHER; note = 2'-O-methyluridine-3'-phosphate
  modified_base 14: mod_base = OTHER; note = 2'-fluoroadenosine-3'-phosphate
  modified_base 15: mod_base = OTHER; note = 2'-O-methylguanosine-3'-phosphate
  modified_base 16: mod_base = OTHER; note = 2'-fluorocytidine-3'-phosphate
  modified_base 17: mod_base = OTHER; note = 2'-O-methyladenosine-3'-phosphate
  modified_base 18: mod_base = OTHER; note = 2'-O-methyluridine-3'-phosphate
  modified_base 19: mod_base = OTHER; note = 2'-O-methylcytidine-3'-phosphate
  modified_base 20: mod_base = OTHER; note = 2'-O-methyluridine-3'-phosphate
  modified_base 21: mod_base = OTHER; note = 2'-O-methylguanosine-3'-phosphorothioate
  modified_base 22: mod_base = OTHER; note = 2'-O-methylcytidine-3'-phosphorothioate
  modified_base 23: mod_base = OTHER; note = 2'-O-methyladenosine
tccttgaacacctagcatctgca

SEQ ID NO: 1234 - RNA, 23 nt, synthetic construct
  source 1..23: mol_type = other RNA
  modified_base 1: mod_base = OTHER; note = 2'-O-methyluridine-3'-phosphorothioate
  modified_base 2: mod_base = OTHER; note = 2'-fluoroadenosine-3'-phosphorothioate
  modified_base 3: mod_base = OTHER; note = 2'-O-methyluridine-3'-phosphate
  modified_base 4: mod_base = OTHER; note = 2'-O-methylcytidine-3'-phosphate
  modified_base 5: mod_base = OTHER; note = 2'-O-methyluridine-3'-phosphate
  modified_base 6: mod_base = OTHER; note = 2'-fluorouridine-3'-phosphate
  modified_base 7: mod_base = OTHER; note = 2'-O-methyluridine-3'-phosphate
  modified_base 8: mod_base = OTHER; note = 2'-O-methylguanosine-3'-phosphate
  modified_base 9: mod_base = OTHER; note = 2'-O-methylcytidine-3'-phosphate
  modified_base 10: mod_base = OTHER; note = 2'-O-methyladenosine-3'-phosphate
  modified_base 11: mod_base = OTHER; note = 2'-O-methyluridine-3'-phosphate
  modified_base 12: mod_base = OTHER; note = 2'-O-methylguanosine-3'-phosphate
  modified_base 13: mod_base = OTHER; note = 2'-O-methylcytidine-3'-phosphate
  modified_base 14: mod_base = OTHER; note = 2'-fluorouridine-3'-phosphate
  modified_base 15: mod_base = OTHER; note = 2'-O-methylcytidine-3'-phosphate
  modified_base 16: mod_base = OTHER; note = 2'-fluorocytidine-3'-phosphate
  modified_base 17: mod_base = OTHER; note = 2'-O-methyluridine-3'-phosphate
  modified_base 18: mod_base = OTHER; note = 2'-O-methyluridine-3'-phosphate
  modified_base 19: mod_base = OTHER; note = 2'-O-methylguanosine-3'-phosphate
  modified_base 20: mod_base = OTHER; note = 2'-O-methyladenosine-3'-phosphate
  modified_base 21: mod_base = OTHER; note = 2'-O-methyladenosine-3'-phosphorothioate
  modified_base 22: mod_base = OTHER; note = 2'-O-methylcytidine-3'-phosphorothioate
  modified_base 23: mod_base = OTHER; note = 2'-O-methyladenosine
tatctttgcatgctccttgaaca

SEQ ID NO: 1235 - RNA, 23 nt, synthetic construct
  source 1..23: mol_type = other RNA
  modified_base 1: mod_base = OTHER; note = 2'-O-methyladenosine-3'-phosphorothioate
  modified_base 2: mod_base = OTHER; note = 2'-fluorouridine-3'-phosphorothioate
  modified_base 3: mod_base = OTHER; note = 2'-O-methyluridine-3'-phosphate
  modified_base 4: mod_base = OTHER; note = 2'-O-methyluridine-3'-phosphate
  modified_base 5: mod_base = OTHER; note = 2'-O-methyluridine-3'-phosphate
  modified_base 6: mod_base = OTHER; note = 2'-fluorocytidine-3'-phosphate
  modified_base 7: mod_base = OTHER; note = 2'-O-methylcytidine-3'-phosphate
  modified_base 8: mod_base = OTHER; note = 2'-O-methylcytidine-3'-phosphate
  modified_base 9: mod_base = OTHER; note = 2'-O-methylcytidine-3'-phosphate
  modified_base 10: mod_base = OTHER; note = 2'-O-methyladenosine-3'-phosphate
  modified_base 11: mod_base = OTHER; note = 2'-O-methylguanosine-3'-phosphate
  modified_base 12: mod_base = OTHER; note = 2'-O-methylguanosine-3'-phosphate
  modified_base 13: mod_base = OTHER; note = 2'-O-methyladenosine-3'-phosphate
  modified_base 14: mod_base = OTHER; note = 2'-fluorouridine-3'-phosphate
  modified_base 15: mod_base = OTHER; note = 2'-O-methyluridine-3'-phosphate
  modified_base 16: mod_base = OTHER; note = 2'-fluoroadenosine-3'-phosphate
  modified_base 17: mod_base = OTHER; note = 2'-O-methyluridine-3'-phosphate
  modified_base 18: mod_base = OTHER; note = 2'-O-methylcytidine-3'-phosphate
  modified_base 19: mod_base = OTHER; note = 2'-O-methyluridine-3'-phosphate
  modified_base 20: mod_base = OTHER; note = 2'-O-methyluridine-3'-phosphate
  modified_base 21: mod_base = OTHER; note = 2'-O-methyluridine-3'-phosphorothioate
  modified_base 22: mod_base = OTHER; note = 2'-O-methylguanosine-3'-phosphorothioate
  modified_base 23: mod_base = OTHER; note = 2'-O-methylcytidine
attttccccaggattatctttgc

SEQ ID NO: 1236 - RNA, 23 nt, synthetic construct
  source 1..23: mol_type = other RNA
  modified_base 1: mod_base = OTHER; note = 2'-O-methyluridine-3'-phosphorothioate
  modified_base 2: mod_base = OTHER; note = 2'-fluorocytidine-3'-phosphorothioate
  modified_base 3: mod_base = OTHER; note = 2'-O-methyladenosine-3'-phosphate
  modified_base 4: mod_base = OTHER; note = 2'-O-methyladenosine-3'-phosphate
  modified_base 5: mod_base = OTHER; note = 2'-O-methylguanosine-3'-phosphate
  modified_base 6: mod_base = OTHER; note = 2'-fluorocytidine-3'-phosphate
  modified_base 7: mod_base = OTHER; note = 2'-O-methyluridine-3'-phosphate
  modified_base 8: mod_base = OTHER; note = 2'-O-methylguanosine-3'-phosphate
  modified_base 9: mod_base = OTHER; note = 2'-O-methylcytidine-3'-phosphate
  modified_base 10: mod_base = OTHER; note = 2'-O-methylcytidine-3'-phosphate
  modified_base 11: mod_base = OTHER; note = 2'-O-methylguanosine-3'-phosphate
  modified_base 12: mod_base = OTHER; note = 2'-O-methylguanosine-3'-phosphate
  modified_base 13: mod_base = OTHER; note = 2'-O-methylguanosine-3'-phosphate
  modified_base 14: mod_base = OTHER; note = 2'-fluorocytidine-3'-phosphate
  modified_base 15: mod_base = OTHER; note = 2'-O-methyladenosine-3'-phosphate
  modified_base 16: mod_base = OTHER; note = 2'-fluorouridine-3'-phosphate
  modified_base 17: mod_base = OTHER; note = 2'-O-methyluridine-3'-phosphate
  modified_base 18: mod_base = OTHER; note = 2'-O-methyluridine-3'-phosphate
  modified_base 19: mod_base = OTHER; note = 2'-O-methyluridine-3'-phosphate
  modified_base 20: mod_base = OTHER; note = 2'-O-methylcytidine-3'-phosphate
  modified_base 21: mod_base = OTHER; note = 2'-O-methylcytidine-3'-phosphorothioate
  modified_base 22: mod_base = OTHER; note = 2'-O-methylcytidine-3'-phosphorothioate
  modified_base 23: mod_base = OTHER; note = 2'-O-methylcytidine
tcaagctgccgggcattttcccc

SEQ ID NO: 1237 - RNA, 23 nt, synthetic construct
  source 1..23: mol_type = other RNA
  modified_base 1: mod_base = OTHER; note = 2'-O-methyladenosine-3'-phosphorothioate
  modified_base 2: mod_base = OTHER; note = 2'-fluoroadenosine-3'-phosphorothioate
  modified_base 3: mod_base = OTHER; note = 2'-O-methyluridine-3'-phosphate
  modified_base 4: mod_base = OTHER; note = 2'-O-methyluridine-3'-phosphate
  modified_base 5: mod_base = OTHER; note = 2'-O-methylcytidine-3'-phosphate
  modified_base 6: mod_base = OTHER; note = 2'-fluoroguanosine-3'-phosphate
  modified_base 7: mod_base = OTHER; note = 2'-O-methylguanosine-3'-phosphate
  modified_base 8: mod_base = OTHER; note = 2'-O-methylguanosine-3'-phosphate
  modified_base 9: mod_base = OTHER; note = 2'-O-methylcytidine-3'-phosphate
  modified_base 10: mod_base = OTHER; note = 2'-O-methyladenosine-3'-phosphate
  modified_base 11: mod_base = OTHER; note = 2'-O-methyladenosine-3'-phosphate
  modified_base 12: mod_base = OTHER; note = 2'-O-methylguanosine-3'-phosphate
  modified_base 13: mod_base = OTHER; note = 2'-O-methylcytidine-3'-phosphate
  modified_base 14: mod_base = OTHER; note = 2'-fluorouridine-3'-phosphate
  modified_base 15: mod_base = OTHER; note = 2'-O-methylguanosine-3'-phosphate
  modified_base 16: mod_base = OTHER; note = 2'-fluorocytidine-3'-phosphate
  modified_base 17: mod_base = OTHER; note = 2'-O-methylcytidine-3'-phosphate
  modified_base 18: mod_base = OTHER; note = 2'-O-methylguanosine-3'-phosphate
  modified_base 19: mod_base = OTHER; note = 2'-O-methylguanosine-3'-phosphate
  modified_base 20: mod_base = OTHER; note = 2'-O-methylguanosine-3'-phosphate
  modified_base 21: mod_base = OTHER; note = 2'-O-methylcytidine-3'-phosphorothioate
  modified_base 22: mod_base = OTHER; note = 2'-O-methyladenosine-3'-phosphorothioate
  modified_base 23: mod_base = OTHER; note = 2'-O-methyluridine
aattcgggcaagctgccgggcat

SEQ ID NO: 1238 - RNA, 23 nt, synthetic construct
  source 1..23: mol_type = other RNA
  modified_base 1: mod_base = OTHER; note = 2'-O-methyladenosine-3'-phosphorothioate
  modified_base 2: mod_base = OTHER; note = 2'-fluorocytidine-3'-phosphorothioate
  modified_base 3: mod_base = OTHER; note = 2'-O-methyladenosine-3'-phosphate
  modified_base 4: mod_base = OTHER; note = 2'-O-methylcytidine-3'-phosphate
  modified_base 5: mod_base = OTHER; note = 2'-O-methyladenosine-3'-phosphate
  modified_base 6: mod_base = OTHER; note = 2'-fluorocytidine-3'-phosphate
  modified_base 7: mod_base = OTHER; note = 2'-O-methyladenosine-3'-phosphate
  modified_base 8: mod_base = OTHER; note = 2'-O-methyladenosine-3'-phosphate
  modified_base 9: mod_base = OTHER; note = 2'-O-methyluridine-3'-phosphate
  modified_base 10: mod_base = OTHER; note = 2'-O-methyluridine-3'-phosphate
  modified_base 11: mod_base = OTHER; note = 2'-O-methylcytidine-3'-phosphate
  modified_base 12: mod_base = OTHER; note = 2'-O-methylguanosine-3'-phosphate
  modified_base 13: mod_base = OTHER; note = 2'-O-methylguanosine-3'-phosphate
  modified_base 14: mod_base = OTHER; note = 2'-fluoroguanosine-3'-phosphate
  modified_base 15: mod_base = OTHER; note = 2'-O-methylcytidine-3'-phosphate
  modified_base 16: mod_base = OTHER; note = 2'-fluoroadenosine-3'-phosphate
  modified_base 17: mod_base = OTHER; note = 2'-O-methyladenosine-3'-phosphate
  modified_base 18: mod_base = OTHER; note = 2'-O-methylguanosine-3'-phosphate
  modified_base 19: mod_base = OTHER; note = 2'-O-methylcytidine-3'-phosphate
  modified_base 20: mod_base = OTHER; note = 2'-O-methyluridine-3'-phosphate
  modified_base 21: mod_base = OTHER; note = 2'-O-methylguanosine-3'-phosphorothioate
  modified_base 22: mod_base = OTHER; note = 2'-O-methylcytidine-3'-phosphorothioate
  modified_base 23: mod_base = OTHER; note = 2'-O-methylcytidine
acacacaattcgggcaagctgcc

SEQ ID NO: 1239 - RNA, 23 nt, synthetic construct
  source 1..23: mol_type = other RNA
  modified_base 1: mod_base = OTHER; note = 2'-O-methyladenosine-3'-phosphorothioate
  modified_base 2: mod_base = OTHER; note = 2'-fluorocytidine-3'-phosphorothioate
  modified_base 3: mod_base = OTHER; note = 2'-O-methyladenosine-3'-phosphate
  modified_base 4: mod_base = OTHER; note = 2'-O-methyladenosine-3'-phosphate
  modified_base 5: mod_base = OTHER; note = 2'-O-methyluridine-3'-phosphate
  modified_base 6: mod_base = OTHER; note = 2'-fluorouridine-3'-phosphate
  modified_base 7: mod_base = OTHER; note = 2'-O-methylcytidine-3'-phosphate
  modified_base 8: mod_base = OTHER; note = 2'-O-methylcytidine-3'-phosphate
  modified_base 9: mod_base = OTHER; note = 2'-O-methylcytidine-3'-phosphate
  modified_base 10: mod_base = OTHER; note = 2'-O-methylcytidine-3'-phosphate
  modified_base 11: mod_base = OTHER; note = 2'-O-methyladenosine-3'-phosphate
  modified_base 12: mod_base = OTHER; note = 2'-O-methylguanosine-3'-phosphate
  modified_base 13: mod_base = OTHER; note = 2'-O-methylcytidine-3'-phosphate
  modified_base 14: mod_base = OTHER; note = 2'-fluorocytidine-3'-phosphate
  modified_base 15: mod_base = OTHER; note = 2'-O-methyladenosine-3'-phosphate
  modified_base 16: mod_base = OTHER; note = 2'-fluorouridine-3'-phosphate
  modified_base 17: mod_base = OTHER; note = 2'-O-methyluridine-3'-phosphate
  modified_base 18: mod_base = OTHER; note = 2'-O-methyladenosine-3'-phosphate
  modified_base 19: mod_base = OTHER; note = 2'-O-methylcytidine-3'-phosphate
  modified_base 20: mod_base = OTHER; note = 2'-O-methylguanosine-3'-phosphate
  modified_base 21: mod_base = OTHER; note = 2'-O-methylguanosine-3'-phosphorothioate
  modified_base 22: mod_base = OTHER; note = 2'-O-methyluridine-3'-phosphorothioate
  modified_base 23: mod_base = OTHER; note = 2'-O-methylcytidine
acaattccccagccattacggtc

SEQ ID NO: 1240 - RNA, 23 nt, synthetic construct
  source 1..23: mol_type = other RNA
  modified_base 1: mod_base = OTHER; note = 2'-O-methyluridine-3'-phosphorothioate
  modified_base 2: mod_base = OTHER; note = 2'-fluorocytidine-3'-phosphorothioate
  modified_base 3: mod_base = OTHER; note = 2'-O-methylcytidine-3'-phosphate
  modified_base 4: mod_base = OTHER; note = 2'-O-methyladenosine-3'-phosphate
  modified_base 5: mod_base = OTHER; note = 2'-O-methyladenosine-3'-phosphate
  modified_base 6: mod_base = OTHER; note = 2'-fluorouridine-3'-phosphate
  modified_base 7: mod_base = OTHER; note = 2'-O-methylguanosine-3'-phosphate
  modified_base 8: mod_base = OTHER; note = 2'-O-methylcytidine-3'-phosphate
  modified_base 9: mod_base = OTHER; note = 2'-O-methyluridine-3'-phosphate
  modified_base 10: mod_base = OTHER; note = 2'-O-methylguanosine-3'-phosphate
  modified_base 11: mod_base = OTHER; note = 2'-O-methylcytidine-3'-phosphate
  modified_base 12: mod_base = OTHER; note = 2'-O-methylcytidine-3'-phosphate
  modified_base 13: mod_base = OTHER; note = 2'-O-methyladenosine-3'-phosphate
  modified_base 14: mod_base = OTHER; note = 2'-fluorouridine-3'-phosphate
  modified_base 15: mod_base = OTHER; note = 2'-O-methyladenosine-3'-phosphate
  modified_base 16: mod_base = OTHER; note = 2'-fluoroadenosine-3'-phosphate
  modified_base 17: mod_base = OTHER; note = 2'-O-methylguanosine-3'-phosphate
  modified_base 18: mod_base = OTHER; note = 2'-O-methyluridine-3'-phosphate
  modified_base 19: mod_base = OTHER; note = 2'-O-methylguanosine-3'-phosphate
  modified_base 20: mod_base = OTHER; note = 2'-O-methyladenosine-3'-phosphate
  modified_base 21: mod_base = OTHER; note = 2'-O-methylcytidine-3'-phosphorothioate
  modified_base 22: mod_base = OTHER; note = 2'-O-methyladenosine-3'-phosphorothioate
  modified_base 23: mod_base = OTHER; note = 2'-O-methyladenosine
tccaatgctgccataagtgacaa

SEQ ID NO: 1241 - RNA, 23 nt, synthetic construct
  source 1..23: mol_type = other RNA
  modified_base 1: mod_base = OTHER; note = 2'-O-methyluridine-3'-phosphorothioate
  modified_base 2: mod_base = OTHER; note = 2'-fluorocytidine-3'-phosphorothioate
  modified_base 3: mod_base = OTHER; note = 2'-O-methylguanosine-3'-phosphate
  modified_base 4: mod_base = OTHER; note = 2'-O-methyladenosine-3'-phosphate
  modified_base 5: mod_base = OTHER; note = 2'-O-methylcytidine-3'-phosphate
  modified_base 6: mod_base = OTHER; note = 2'-fluorocytidine-3'-phosphate
  modified_base 7: mod_base = OTHER; note = 2'-O-methyluridine-3'-phosphate
  modified_base 8: mod_base = OTHER; note = 2'-O-methylguanosine-3'-phosphate
  modified_base 9: mod_base = OTHER; note = 2'-O-methyluridine-3'-phosphate
  modified_base 10: mod_base = OTHER; note = 2'-O-methyluridine-3'-phosphate
  modified_base 11: mod_base = OTHER; note = 2'-O-methylguanosine-3'-phosphate
  modified_base 12: mod_base = OTHER; note = 2'-O-methyluridine-3'-phosphate
  modified_base 13: mod_base = OTHER; note = 2'-O-methylguanosine-3'-phosphate
  modified_base 14: mod_base = OTHER; note = 2'-fluoroadenosine-3'-phosphate
  modified_base 15: mod_base = OTHER; note = 2'-O-methyladenosine-3'-phosphate
  modified_base 16: mod_base = OTHER; note = 2'-fluorouridine-3'-phosphate
  modified_base 17: mod_base = OTHER; note = 2'-O-methylcytidine-3'-phosphate
  modified_base 18: mod_base = OTHER; note = 2'-O-methyladenosine-3'-phosphate
  modified_base 19: mod_base = OTHER; note = 2'-O-methyluridine-3'-phosphate
  modified_base 20: mod_base = OTHER; note = 2'-O-methylguanosine-3'-phosphate
  modified_base 21: mod_base = OTHER; note = 2'-O-methyluridine-3'-phosphorothioate
  modified_base 22: mod_base = OTHER; note = 2'-O-methylguanosine-3'-phosphorothioate
  modified_base 23: mod_base = OTHER; note = 2'-O-methyladenosine
tcgacctgttgtgaatcatgtga

SEQ ID NO: 1242 - RNA, 23 nt, synthetic construct
  source 1..23: mol_type = other RNA
  modified_base 1: mod_base = OTHER; note = 2'-O-methyluridine-3'-phosphorothioate
  modified_base 2: mod_base = OTHER; note = 2'-fluorouridine-3'-phosphorothioate
  modified_base 3: mod_base = OTHER; note = 2'-O-methylcytidine-3'-phosphate
  modified_base 4: mod_base = OTHER; note = 2'-O-methylguanosine-3'-phosphate
  modified_base 5: mod_base = OTHER; note = 2'-O-methyladenosine-3'-phosphate
  modified_base 6: mod_base = OTHER; note = 2'-fluorocytidine-3'-phosphate
  modified_base 7: mod_base = OTHER; note = 2'-O-methylcytidine-3'-phosphate
  modified_base 8: mod_base = OTHER; note = 2'-O-methyluridine-3'-phosphate
  modified_base 9: mod_base = OTHER; note = 2'-O-methylguanosine-3'-phosphate
  modified_base 10: mod_base = OTHER; note = 2'-O-methyluridine-3'-phosphate
  modified_base 11: mod_base = OTHER; note = 2'-O-methyluridine-3'-phosphate
  modified_base 12: mod_base = OTHER; note = 2'-O-methylguanosine-3'-phosphate
  modified_base 13: mod_base = OTHER; note = 2'-O-methyluridine-3'-phosphate
  modified_base 14: mod_base = OTHER; note = 2'-fluoroguanosine-3'-phosphate
  modified_base 15: mod_base = OTHER; note = 2'-O-methyladenosine-3'-phosphate
  modified_base 16: mod_base = OTHER; note = 2'-fluoroadenosine-3'-phosphate
  modified_base 17: mod_base = OTHER; note = 2'-O-methyluridine-3'-phosphate
  modified_base 18: mod_base = OTHER; note = 2'-O-methylcytidine-3'-phosphate
  modified_base 19: mod_base = OTHER; note = 2'-O-methyladenosine-3'-phosphate
  modified_base 20: mod_base = OTHER; note = 2'-O-methyluridine-3'-phosphate
  modified_base 21: mod_base = OTHER; note = 2'-O-methylguanosine-3'-phosphorothioate
  modified_base 22: mod_base = OTHER; note = 2'-O-methyluridine-3'-phosphorothioate
  modified_base 23: mod_base = OTHER; note = 2'-O-methylguanosine
ttcgacctgttgtgaatcatgtg

SEQ ID NO: 1243 - RNA, 23 nt, synthetic construct
  source 1..23: mol_type = other RNA
  modified_base 1: mod_base = OTHER; note = 2'-O-methyluridine-3'-phosphorothioate
  modified_base 2: mod_base = OTHER; note = 2'-fluorouridine-3'-phosphorothioate
  modified_base 3: mod_base = OTHER; note = 2'-O-methyluridine-3'-phosphate
  modified_base 4: mod_base = OTHER; note = 2'-O-methylcytidine-3'-phosphate
  modified_base 5: mod_base = OTHER; note = 2'-O-methylguanosine-3'-phosphate
  modified_base 6: mod_base = OTHER; note = 2'-fluoroadenosine-3'-phosphate
  modified_base 7: mod_base = OTHER; note = 2'-O-methylcytidine-3'-phosphate
  modified_base 8: mod_base = OTHER; note = 2'-O-methylcytidine-3'-phosphate
  modified_base 9: mod_base = OTHER; note = 2'-O-methyluridine-3'-phosphate
  modified_base 10: mod_base = OTHER; note = 2'-O-methylguanosine-3'-phosphate
  modified_base 11: mod_base = OTHER; note = 2'-O-methyluridine-3'-phosphate
  modified_base 12: mod_base = OTHER; note = 2'-O-methyluridine-3'-phosphate
  modified_base 13: mod_base = OTHER; note = 2'-O-methylguanosine-3'-phosphate
  modified_base 14: mod_base = OTHER; note = 2'-fluorouridine-3'-phosphate
  modified_base 15: mod_base = OTHER; note = 2'-O-methylguanosine-3'-phosphate
  modified_base 16: mod_base = OTHER; note = 2'-fluoroadenosine-3'-phosphate
  modified_base 17: mod_base = OTHER; note = 2'-O-methyladenosine-3'-phosphate
  modified_base 18: mod_base = OTHER; note = 2'-O-methyluridine-3'-phosphate
  modified_base 19: mod_base = OTHER; note = 2'-O-methylcytidine-3'-phosphate
  modified_base 20: mod_base = OTHER; note = 2'-O-methyladenosine-3'-phosphate
  modified_base 21: mod_base = OTHER; note = 2'-O-methyluridine-3'-phosphorothioate
  modified_base 22: mod_base = OTHER; note = 2'-O-methylguanosine-3'-phosphorothioate
  modified_base 23: mod_base = OTHER; note = 2'-O-methyluridine
tttcgacctgttgtgaatcatgt

SEQ ID NO: 1244 - RNA, 23 nt, synthetic construct
  source 1..23: mol_type = other RNA
  modified_base 1: mod_base = OTHER; note = 2'-O-methyluridine-3'-phosphorothioate
  modified_base 2: mod_base = OTHER; note = 2'-fluorocytidine-3'-phosphorothioate
  modified_base 3: mod_base = OTHER; note = 2'-O-methyluridine-3'-phosphate
  modified_base 4: mod_base = OTHER; note = 2'-O-methyluridine-3'-phosphate
  modified_base 5: mod_base = OTHER; note = 2'-O-methylcytidine-3'-phosphate
  modified_base 6: mod_base = OTHER; note = 2'-fluoroguanosine-3'-phosphate
  modified_base 7: mod_base = OTHER; note = 2'-O-methyladenosine-3'-phosphate
  modified_base 8: mod_base = OTHER; note = 2'-O-methylcytidine-3'-phosphate
  modified_base 9: mod_base = OTHER; note = 2'-O-methylcytidine-3'-phosphate
  modified_base 10: mod_base = OTHER; note = 2'-O-methyluridine-3'-phosphate
  modified_base 11: mod_base = OTHER; note = 2'-O-methylguanosine-3'-phosphate
  modified_base 12: mod_base = OTHER; note = 2'-O-methyluridine-3'-phosphate
  modified_base 13: mod_base = OTHER; note = 2'-O-methyluridine-3'-phosphate
  modified_base 14: mod_base = OTHER; note = 2'-fluoroguanosine-3'-phosphate
  modified_base 15: mod_base = OTHER; note = 2'-O-methyluridine-3'-phosphate
  modified_base 16: mod_base = OTHER; note = 2'-fluoroguanosine-3'-phosphate
  modified_base 17: mod_base = OTHER; note = 2'-O-methyladenosine-3'-phosphate
  modified_base 18: mod_base = OTHER; note = 2'-O-methyladenosine-3'-phosphate
  modified_base 19: mod_base = OTHER; note = 2'-O-methyluridine-3'-phosphate
  modified_base 20: mod_base = OTHER; note = 2'-O-methylcytidine-3'-phosphate
  modified_base 21: mod_base = OTHER; note = 2'-O-methyladenosine-3'-phosphorothioate
  modified_base 22: mod_base = OTHER; note = 2'-O-methyluridine-3'-phosphorothioate
  modified_base 23: mod_base = OTHER; note = 2'-O-methylguanosine
tcttcgacctgttgtgaatcatg

SEQ ID NO: 1245 - RNA, 23 nt, synthetic construct
  source 1..23: mol_type = other RNA
  modified_base 1: mod_base = OTHER; note = 2'-O-methyladenosine-3'-phosphorothioate
  modified_base 2: mod_base = OTHER; note = 2'-fluorouridine-3'-phosphorothioate
  modified_base 3: mod_base = OTHER; note = 2'-O-methylcytidine-3'-phosphate
  modified_base 4: mod_base = OTHER; note = 2'-O-methyluridine-3'-phosphate
  modified_base 5: mod_base = OTHER; note = 2'-O-methyluridine-3'-phosphate
  modified_base 6: mod_base = OTHER; note = 2'-fluorocytidine-3'-phosphate
  modified_base 7: mod_base = OTHER; note = 2'-O-methylguanosine-3'-phosphate
  modified_base 8: mod_base = OTHER; note = 2'-O-methyladenosine-3'-phosphate
  modified_base 9: mod_base = OTHER; note = 2'-O-methylcytidine-3'-phosphate
  modified_base 10: mod_base = OTHER; note = 2'-O-methylcytidine-3'-phosphate
  modified_base 11: mod_base = OTHER; note = 2'-O-methyluridine-3'-phosphate
  modified_base 12: mod_base = OTHER; note = 2'-O-methylguanosine-3'-phosphate
  modified_base 13: mod_base = OTHER; note = 2'-O-methyluridine-3'-phosphate
  modified_base 14: mod_base = OTHER; note = 2'-fluorouridine-3'-phosphate
  modified_base 15: mod_base = OTHER; note = 2'-O-methylguanosine-3'-phosphate
  modified_base 16: mod_base = OTHER; note = 2'-fluorouridine-3'-phosphate
  modified_base 17: mod_base = OTHER; note = 2'-O-methylguanosine-3'-phosphate
  modified_base 18: mod_base = OTHER; note = 2'-O-methyladenosine-3'-phosphate
  modified_base 19: mod_base = OTHER; note = 2'-O-methyladenosine-3'-phosphate
  modified_base 20: mod_base = OTHER; note = 2'-O-methyluridine-3'-phosphate
  modified_base 21: mod_base = OTHER; note = 2'-O-methylcytidine-3'-phosphorothioate
  modified_base 22: mod_base = OTHER; note = 2'-O-methyladenosine-3'-phosphorothioate
  modified_base 23: mod_base = OTHER; note = 2'-O-methyluridine
atcttcgacctgttgtgaatcat

SEQ ID NO: 1246 - RNA, 23 nt, synthetic construct
  source 1..23: mol_type = other RNA
  modified_base 1: mod_base = OTHER; note = 2'-O-methyluridine-3'-phosphorothioate
  modified_base 2: mod_base = OTHER; note = 2'-fluorouridine-3'-phosphorothioate
  modified_base 3: mod_base = OTHER; note = 2'-O-methylguanosine-3'-phosphate
  modified_base 4: mod_base = OTHER; note = 2'-O-methyladenosine-3'-phosphate
  modified_base 5: mod_base = OTHER; note = 2'-O-methyluridine-3'-phosphate
  modified_base 6: mod_base = OTHER; note = 2'-fluorocytidine-3'-phosphate
  modified_base 7: mod_base = OTHER; note = 2'-O-methyluridine-3'-phosphate
  modified_base 8: mod_base = OTHER; note = 2'-O-methyluridine-3'-phosphate
  modified_base 9: mod_base = OTHER; note = 2'-O-methylcytidine-3'-phosphate
  modified_base 10: mod_base = OTHER; note = 2'-O-methylguanosine-3'-phosphate
  modified_base 11: mod_base = OTHER; note = 2'-O-methyladenosine-3'-phosphate
  modified_base 12: mod_base = OTHER; note = 2'-O-methylcytidine-3'-phosphate
  modified_base 13: mod_base = OTHER; note = 2'-O-methylcytidine-3'-phosphate
  modified_base 14: mod_base = OTHER; note = 2'-fluorouridine-3'-phosphate
  modified_base 15: mod_base = OTHER; note = 2'-O-methylguanosine-3'-phosphate
  modified_base 16: mod_base = OTHER; note = 2'-fluorouridine-3'-phosphate
  modified_base 17: mod_base = OTHER; note = 2'-O-methyluridine-3'-phosphate
  modified_base 18: mod_base = OTHER; note = 2'-O-methylguanosine-3'-phosphate
  modified_base 19: mod_base = OTHER; note = 2'-O-methyluridine-3'-phosphate
  modified_base 20: mod_base = OTHER; note = 2'-O-methylguanosine-3'-phosphate
  modified_base 21: mod_base = OTHER; note = 2'-O-methyladenosine-3'-phosphorothioate
  modified_base 22: mod_base = OTHER; note = 2'-O-methyladenosine-3'-phosphorothioate
  modified_base 23: mod_base = OTHER; note = 2'-O-methyluridine
ttgatcttcgacctgttgtgaat

SEQ ID NO: 1247 - RNA, 23 nt, synthetic construct
  source 1..23: mol_type = other RNA
  modified_base 1: mod_base = OTHER; note = 2'-O-methyladenosine-3'-phosphorothioate
  modified_base 2: mod_base = OTHER; note = 2'-fluoroadenosine-3'-phosphorothioate
  modified_base 3: mod_base = OTHER; note = 2'-O-methyladenosine-3'-phosphate
  modified_base 4: mod_base = OTHER; note = 2'-O-methyluridine-3'-phosphate
  modified_base 5: mod_base = OTHER; note = 2'-O-methyluridine-3'-phosphate
  modified_base 6: mod_base = OTHER; note = 2'-fluoroguanosine-3'-phosphate
  modified_base 7: mod_base = OTHER; note = 2'-O-methyladenosine-3'-phosphate
  modified_base 8: mod_base = OTHER; note = 2'-O-methyluridine-3'-phosphate
  modified_base 9: mod_base = OTHER; note = 2'-O-methylcytidine-3'-phosphate
  modified_base 10: mod_base = OTHER; note = 2'-O-methyluridine-3'-phosphate
  modified_base 11: mod_base = OTHER; note = 2'-O-methyluridine-3'-phosphate
  modified_base 12: mod_base = OTHER; note = 2'-O-methylcytidine-3'-phosphate
  modified_base 13: mod_base = OTHER; note = 2'-O-methylguanosine-3'-phosphate
  modified_base 14: mod_base = OTHER; note = 2'-fluoroadenosine-3'-phosphate
  modified_base 15: mod_base = OTHER; note = 2'-O-methylcytidine-3'-phosphate
  modified_base 16: mod_base = OTHER; note = 2'-fluorocytidine-3'-phosphate
  modified_base 17: mod_base = OTHER; note = 2'-O-methyluridine-3'-phosphate
  modified_base 18: mod_base = OTHER; note = 2'-O-methylguanosine-3'-phosphate
  modified_base 19: mod_base = OTHER; note = 2'-O-methyluridine-3'-phosphate
  modified_base 20: mod_base = OTHER; note = 2'-O-methyluridine-3'-phosphate
  modified_base 21: mod_base = OTHER; note = 2'-O-methylguanosine-3'-phosphorothioate
  modified_base 22: mod_base = OTHER; note = 2'-O-methyluridine-3'-phosphorothioate
  modified_base 23: mod_base = OTHER; note = 2'-O-methylguanosine
aaattgatcttcgacctgttgtg

SEQ ID NO: 1248 - RNA, 23 nt, synthetic construct
  source 1..23: mol_type = other RNA
  modified_base 1: mod_base = OTHER; note = 2'-O-methyluridine-3'-phosphorothioate
  modified_base 2: mod_base = OTHER; note = 2'-fluoroadenosine-3'-phosphorothioate
  modified_base 3: mod_base = OTHER; note = 2'-O-methyladenosine-3'-phosphate
  modified_base 4: mod_base = OTHER; note = 2'-O-methyladenosine-3'-phosphate
  modified_base 5: mod_base = OTHER; note = 2'-O-methyluridine-3'-phosphate
  modified_base 6: mod_base = OTHER; note = 2'-fluorouridine-3'-phosphate
  modified_base 7: mod_base = OTHER; note = 2'-O-methylguanosine-3'-phosphate
  modified_base 8: mod_base = OTHER; note = 2'-O-methyladenosine-3'-phosphate
  modified_base 9: mod_base = OTHER; note = 2'-O-methyluridine-3'-phosphate
  modified_base 10: mod_base = OTHER; note = 2'-O-methylcytidine-3'-phosphate
  modified_base 11: mod_base = OTHER; note = 2'-O-methyluridine-3'-phosphate
  modified_base 12: mod_base = OTHER; note = 2'-O-methyluridine-3'-phosphate
  modified_base 13: mod_base = OTHER; note = 2'-O-methylcytidine-3'-phosphate
  modified_base 14: mod_base = OTHER; note = 2'-fluoroguanosine-3'-phosphate
  modified_base 15: mod_base = OTHER; note = 2'-O-methyladenosine-3'-phosphate
  modified_base 16: mod_base = OTHER; note = 2'-fluorocytidine-3'-phosphate
  modified_base 17: mod_base = OTHER; note = 2'-O-methylcytidine-3'-phosphate
  modified_base 18: mod_base = OTHER; note = 2'-O-methyluridine-3'-phosphate
  modified_base 19: mod_base = OTHER; note = 2'-O-methylguanosine-3'-phosphate
  modified_base 20: mod_base = OTHER; note = 2'-O-methyluridine-3'-phosphate
  modified_base 21: mod_base = OTHER; note = 2'-O-methyluridine-3'-phosphorothioate
  modified_base 22: mod_base = OTHER; note = 2'-O-methylguanosine-3'-phosphorothioate
  modified_base 23: mod_base = OTHER; note = 2'-O-methyluridine
taaattgatcttcgacctgttgt

SEQ ID NO: 1249 - RNA, 23 nt, synthetic construct
  source 1..23: mol_type = other RNA
  modified_base 1: mod_base = OTHER; note = 2'-O-methyluridine-3'-phosphorothioate
  modified_base 2: mod_base = OTHER; note = 2'-fluoroguanosine-3'-phosphorothioate
  modified_base 3: mod_base = OTHER; note = 2'-O-methyluridine-3'-phosphate
  modified_base 4: mod_base = OTHER; note = 2'-O-methyladenosine-3'-phosphate
  modified_base 5: mod_base = OTHER; note = 2'-O-methyladenosine-3'-phosphate
  modified_base 6: mod_base = OTHER; note = 2'-fluoroadenosine-3'-phosphate
  modified_base 7: mod_base = OTHER; note = 2'-O-methyluridine-3'-phosphate
  modified_base 8: mod_base = OTHER; note = 2'-O-methyluridine-3'-phosphate
  modified_base 9: mod_base = OTHER; note = 2'-O-methylguanosine-3'-phosphate
  modified_base 10: mod_base = OTHER; note = 2'-O-methyladenosine-3'-phosphate
  modified_base 11: mod_base = OTHER; note = 2'-O-methyluridine-3'-phosphate
  modified_base 12: mod_base = OTHER; note = 2'-O-methylcytidine-3'-phosphate
  modified_base 13: mod_base = OTHER; note = 2'-O-methyluridine-3'-phosphate
  modified_base 14: mod_base = OTHER; note = 2'-fluorouridine-3'-phosphate
  modified_base 15: mod_base = OTHER; note = 2'-O-methylcytidine-3'-phosphate
  modified_base 16: mod_base = OTHER; note = 2'-fluoroguanosine-3'-phosphate
  modified_base 17: mod_base = OTHER; note = 2'-O-methyladenosine-3'-phosphate
  modified_base 18: mod_base = OTHER; note = 2'-O-methylcytidine-3'-phosphate
  modified_base 19: mod_base = OTHER; note = 2'-O-methylcytidine-3'-phosphate
  modified_base 20: mod_base = OTHER; note = 2'-O-methyluridine-3'-phosphate
  modified_base 21: mod_base = OTHER; note = 2'-O-methylguanosine-3'-phosphorothioate
  modified_base 22: mod_base = OTHER; note = 2'-O-methyluridine-3'-phosphorothioate
  modified_base 23: mod_base = OTHER; note = 2'-O-methyluridine
tgtaaattgatcttcgacctgtt

SEQ ID NO: 1250 - RNA, 23 nt, synthetic construct
  source 1..23: mol_type = other RNA
  modified_base 1: mod_base = OTHER; note = 2'-O-methyluridine-3'-phosphorothioate
  modified_base 2: mod_base = OTHER; note = 2'-fluorouridine-3'-phosphorothioate
  modified_base 3: mod_base = OTHER; note = 2'-O-methylguanosine-3'-phosphate
  modified_base 4: mod_base = OTHER; note = 2'-O-methyluridine-3'-phosphate
  modified_base 5: mod_base = OTHER; note = 2'-O-methyladenosine-3'-phosphate
  modified_base 6: mod_base = OTHER; note = 2'-fluoroadenosine-3'-phosphate
  modified_base 7: mod_base = OTHER; note = 2'-O-methyladenosine-3'-phosphate
  modified_base 8: mod_base = OTHER; note = 2'-O-methyluridine-3'-phosphate
  modified_base 9: mod_base = OTHER; note = 2'-O-methyluridine-3'-phosphate
  modified_base 10: mod_base = OTHER; note = 2'-O-methylguanosine-3'-phosphate
  modified_base 11: mod_base = OTHER; note = 2'-O-methyladenosine-3'-phosphate
  modified_base 12: mod_base = OTHER; note = 2'-O-methyluridine-3'-phosphate
  modified_base 13: mod_base = OTHER; note = 2'-O-methylcytidine-3'-phosphate
  modified_base 14: mod_base = OTHER; note = 2'-fluorouridine-3'-phosphate
  modified_base 15: mod_base = OTHER; note = 2'-O-methyluridine-3'-phosphate
  modified_base 16: mod_base = OTHER; note = 2'-fluorocytidine-3'-phosphate
  modified_base 17: mod_base = OTHER; note = 2'-O-methylguanosine-3'-phosphate
  modified_base 18: mod_base = OTHER; note = 2'-O-methyladenosine-3'-phosphate
  modified_base 19: mod_base = OTHER; note = 2'-O-methylcytidine-3'-phosphate
  modified_base 20: mod_base = OTHER; note = 2'-O-methylcytidine-3'-phosphate
  modified_base 21: mod_base = OTHER; note = 2'-O-methyluridine-3'-phosphorothioate
  modified_base 22: mod_base = OTHER; note = 2'-O-methylguanosine-3'-phosphorothioate
  modified_base 23: mod_base = OTHER; note = 2'-O-methyluridine
ttgtaaattgatcttcgacctgt

SEQ ID NO: 1251 - RNA, 23 nt, synthetic construct
  source 1..23: mol_type = other RNA
  modified_base 1: mod_base = OTHER; note = 2'-O-methyluridine-3'-phosphorothioate
  modified_base 2: mod_base = OTHER; note = 2'-fluorouridine-3'-phosphorothioate
  modified_base 3: mod_base = OTHER; note = 2'-O-methyluridine-3'-phosphate
  modified_base 4: mod_base = OTHER; note = 2'-O-methylguanosine-3'-phosphate
  modified_base 5: mod_base = OTHER; note = 2'-O-methyluridine-3'-phosphate
  modified_base 6: mod_base = OTHER; note = 2'-fluoroadenosine-3'-phosphate
  modified_base 7: mod_base = OTHER; note = 2'-O-methyladenosine-3'-phosphate
  modified_base 8: mod_base = OTHER; note = 2'-O-methyladenosine-3'-phosphate
  modified_base 9: mod_base = OTHER; note = 2'-O-methyluridine-3'-phosphate
  modified_base 10: mod_base = OTHER; note = 2'-O-methyluridine-3'-phosphate
  modified_base 11: mod_base = OTHER; note = 2'-O-methylguanosine-3'-phosphate
  modified_base 12: mod_base = OTHER; note = 2'-O-methyladenosine-3'-phosphate
  modified_base 13: mod_base = OTHER; note = 2'-O-methyluridine-3'-phosphate
  modified_base 14: mod_base = OTHER; note = 2'-fluorocytidine-3'-phosphate
  modified_base 15: mod_base = OTHER; note = 2'-O-methyluridine-3'-phosphate
  modified_base 16: mod_base = OTHER; note = 2'-fluorouridine-3'-phosphate
  modified_base 17: mod_base = OTHER; note = 2'-O-methylcytidine-3'-phosphate
  modified_base 18: mod_base = OTHER; note = 2'-O-methylguanosine-3'-phosphate
  modified_base 19: mod_base = OTHER; note = 2'-O-methyladenosine-3'-phosphate
  modified_base 20: mod_base = OTHER; note = 2'-O-methylcytidine-3'-phosphate
  modified_base 21: mod_base = OTHER; note = 2'-O-methylcytidine-3'-phosphorothioate
  modified_base 22: mod_base = OTHER; note = 2'-O-methyluridine-3'-phosphorothioate
  modified_base 23: mod_base = OTHER; note = 2'-O-methylguanosine
tttgtaaattgatcttcgacctg

SEQ ID NO: 1252 - RNA, 23 nt, synthetic construct
  source 1..23: mol_type = other RNA
  modified_base 1: mod_base = OTHER; note = 2'-O-methyluridine-3'-phosphorothioate
  modified_base 2: mod_base = OTHER; note = 2'-fluoroadenosine-3'-phosphorothioate
  modified_base 3: mod_base = OTHER; note = 2'-O-methylguanosine-3'-phosphate
  modified_base 4: mod_base = OTHER; note = 2'-O-methylguanosine-3'-phosphate
  modified_base 5: mod_base = OTHER; note = 2'-O-methyluridine-3'-phosphate
  modified_base 6: mod_base = OTHER; note = 2'-fluorocytidine-3'-phosphate
  modified_base 7: mod_base = OTHER; note = 2'-O-methyluridine-3'-phosphate
  modified_base 8: mod_base = OTHER; note = 2'-O-methyluridine-3'-phosphate
  modified_base 9: mod_base = OTHER; note = 2'-O-methylguanosine-3'-phosphate
  modified_base 10: mod_base = OTHER; note = 2'-O-methyluridine-3'-phosphate
  modified_base 11: mod_base = OTHER; note = 2'-O-methyladenosine-3'-phosphate
  modified_base 12: mod_base = OTHER; note = 2'-O-methyladenosine-3'-phosphate
  modified_base 13: mod_base = OTHER; note = 2'-O-methyladenosine-3'-phosphate
  modified_base 14: mod_base = OTHER; note = 2'-fluorouridine-3'-phosphate
  modified_base 15: mod_base = OTHER; note = 2'-O-methyluridine-3'-phosphate
  modified_base 16: mod_base = OTHER; note = 2'-fluoroguanosine-3'-phosphate
  modified_base 17: mod_base = OTHER; note = 2'-O-methyladenosine-3'-phosphate
  modified_base 18: mod_base = OTHER; note = 2'-O-methyluridine-3'-phosphate
  modified_base 19: mod_base = OTHER; note = 2'-O-methylcytidine-3'-phosphate
  modified_base 20: mod_base = OTHER; note = 2'-O-methyluridine-3'-phosphate
  modified_base 21: mod_base = OTHER; note = 2'-O-methyluridine-3'-phosphorothioate
  modified_base 22: mod_base = OTHER; note = 2'-O-methylcytidine-3'-phosphorothioate
  modified_base 23: mod_base = OTHER; note = 2'-O-methylguanosine
taggtcttgtaaattgatcttcg

SEQ ID NO: 1253 - RNA, 23 nt, synthetic construct
  source 1..23: mol_type = other RNA
  modified_base 1: mod_base = OTHER; note = 2'-O-methyluridine-3'-phosphorothioate
  modified_base 2: mod_base = OTHER; note = 2'-fluoroguanosine-3'-phosphorothioate
  modified_base 3: mod_base = OTHER; note = 2'-O-methyladenosine-3'-phosphate
  modified_base 4: mod_base = OTHER; note = 2'-O-methylguanosine-3'-phosphate
  modified_base 5: mod_base = OTHER; note = 2'-O-methylguanosine-3'-phosphate
  modified_base 6: mod_base = OTHER; note = 2'-fluorouridine-3'-phosphate
  modified_base 7: mod_base = OTHER; note = 2'-O-methylcytidine-3'-phosphate
  modified_base 8: mod_base = OTHER; note = 2'-O-methyluridine-3'-phosphate
  modified_base 9: mod_base = OTHER; note = 2'-O-methyluridine-3'-phosphate
  modified_base 10: mod_base = OTHER; note = 2'-O-methylguanosine-3'-phosphate
  modified_base 11: mod_base = OTHER; note = 2'-O-methyluridine-3'-phosphate
  modified_base 12: mod_base = OTHER; note = 2'-O-methyladenosine-3'-phosphate
  modified_base 13: mod_base = OTHER; note = 2'-O-methyladenosine-3'-phosphate
  modified_base 14: mod_base = OTHER; note = 2'-fluoroadenosine-3'-phosphate
  modified_base 15: mod_base = OTHER; note = 2'-O-methyluridine-3'-phosphate
  modified_base 16: mod_base = OTHER; note = 2'-fluorouridine-3'-phosphate
  modified_base 17: mod_base = OTHER; note = 2'-O-methylguanosine-3'-phosphate
  modified_base 18: mod_base = OTHER; note = 2'-O-methyladenosine-3'-phosphate
  modified_base 19: mod_base = OTHER; note = 2'-O-methyluridine-3'-phosphate
  modified_base 20: mod_base = OTHER; note = 2'-O-methylcytidine-3'-phosphate
  modified_base 21: mod_base = OTHER; note = 2'-O-methyluridine-3'-phosphorothioate
  modified_base 22: mod_base = OTHER; note = 2'-O-methyluridine-3'-phosphorothioate
  modified_base 23: mod_base = OTHER; note = 2'-O-methylcytidine
tgaggtcttgtaaattgatcttc

SEQ ID NO: 1254 - RNA, 23 nt, synthetic construct
  source 1..23: mol_type = other RNA
  modified_base 1: mod_base = OTHER; note = 2'-O-methyladenosine-3'-phosphorothioate
  modified_base 2: mod_base = OTHER; note = 2'-fluoroguanosine-3'-phosphorothioate
  modified_base 3: mod_base = OTHER; note = 2'-O-methyladenosine-3'-phosphate
  modified_base 4: mod_base = OTHER; note = 2'-O-methyluridine-3'-phosphate
  modified_base 5: mod_base = OTHER; note = 2'-O-methyluridine-3'-phosphate
  modified_base 6: mod_base = OTHER; note = 2'-fluorouridine-3'-phosphate
  modified_base 7: mod_base = OTHER; note = 2'-O-methyluridine-3'-phosphate
  modified_base 8: mod_base = OTHER; note = 2'-O-methyladenosine-3'-phosphate
  modified_base 9: mod_base = OTHER; note = 2'-O-methyluridine-3'-phosphate
  modified_base 10: mod_base = OTHER; note = 2'-O-methylguanosine-3'-phosphate
  modified_base 11: mod_base = OTHER; note = 2'-O-methyluridine-3'-phosphate
  modified_base 12: mod_base = OTHER; note = 2'-O-methyluridine-3'-phosphate
  modified_base 13: mod_base = OTHER; note = 2'-O-methyladenosine-3'-phosphate
  modified_base 14: mod_base = OTHER; note = 2'-fluoroguanosine-3'-phosphate
  modified_base 15: mod_base = OTHER; note = 2'-O-methyluridine-3'-phosphate
  modified_base 16: mod_base = OTHER; note = 2'-fluorocytidine-3'-phosphate
  modified_base 17: mod_base = OTHER; note = 2'-O-methylcytidine-3'-phosphate
  modified_base 18: mod_base = OTHER; note = 2'-O-methyluridine-3'-phosphate
  modified_base 19: mod_base = OTHER; note = 2'-O-methyluridine-3'-phosphate
  modified_base 20: mod_base = OTHER; note = 2'-O-methyluridine-3'-phosphate
  modified_base 21: mod_base = OTHER; note = 2'-O-methyladenosine-3'-phosphorothioate
  modified_base 22: mod_base = OTHER; note = 2'-O-methylguanosine-3'-phosphorothioate
  modified_base 23: mod_base = OTHER; note = 2'-O-methyladenosine
agattttatgttagtcctttaga

SEQ ID NO: 1255 - RNA, 23 nt, synthetic construct
  source 1..23: mol_type = other RNA
  modified_base 1: mod_base = OTHER; note = 2'-O-methyluridine-3'-phosphorothioate
  modified_base 2: mod_base = OTHER; note = 2'-fluoroadenosine-3'-phosphorothioate
  modified_base 3: mod_base = OTHER; note = 2'-O-methylguanosine-3'-phosphate
  modified_base 4: mod_base = OTHER; note = 2'-O-methyladenosine-3'-phosphate
  modified_base 5: mod_base = OTHER; note = 2'-O-methyluridine-3'-phosphate
  modified_base 6: mod_base = OTHER; note = 2'-fluorouridine-3'-phosphate
  modified_base 7: mod_base = OTHER; note = 2'-O-methyluridine-3'-phosphate
  modified_base 8: mod_base = OTHER; note = 2'-O-methyluridine-3'-phosphate
  modified_base 9: mod_base = OTHER; note = 2'-O-methyladenosine-3'-phosphate
  modified_base 10: mod_base = OTHER; note = 2'-O-methyluridine-3'-phosphate
  modified_base 11: mod_base = OTHER; note = 2'-O-methylguanosine-3'-phosphate
  modified_base 12: mod_base = OTHER; note = 2'-O-methyluridine-3'-phosphate
  modified_base 13: mod_base = OTHER; note = 2'-O-methyluridine-3'-phosphate
  modified_base 14: mod_base = OTHER; note = 2'-fluoroadenosine-3'-phosphate
  modified_base 15: mod_base = OTHER; note = 2'-O-methylguanosine-3'-phosphate
  modified_base 16: mod_base = OTHER; note = 2'-fluorouridine-3'-phosphate
  modified_base 17: mod_base = OTHER; note = 2'-O-methylcytidine-3'-phosphate
  modified_base 18: mod_base = OTHER; note = 2'-O-methylcytidine-3'-phosphate
  modified_base 19: mod_base = OTHER; note = 2'-O-methyluridine-3'-phosphate
  modified_base 20: mod_base = OTHER; note = 2'-O-methyluridine-3'-phosphate
  modified_base 21: mod_base = OTHER; note = 2'-O-methyluridine-3'-phosphorothioate
  modified_base 22: mod_base = OTHER; note = 2'-O-methyladenosine-3'-phosphorothioate
  modified_base 23: mod_base = OTHER; note = 2'-O-methylguanosine
tagattttatgttagtcctttag

SEQ ID NO: 1256 - RNA, 23 nt, synthetic construct
  source 1..23: mol_type = other RNA
  modified_base 1: mod_base = OTHER; note = 2'-O-methyluridine-3'-phosphorothioate
  modified_base 2: mod_base = OTHER; note = 2'-fluoroguanosine-3'-phosphorothioate
  modified_base 3: mod_base = OTHER; note = 2'-O-methylguanosine-3'-phosphate
  modified_base 4: mod_base = OTHER; note = 2'-O-methyladenosine-3'-phosphate
  modified_base 5: mod_base = OTHER; note = 2'-O-methyladenosine-3'-phosphate
  modified_base 6: mod_base = OTHER; note = 2'-fluoroadenosine-3'-phosphate
  modified_base 7: mod_base = OTHER; note = 2'-O-methylguanosine-3'-phosphate
  modified_base 8: mod_base = OTHER; note = 2'-O-methyladenosine-3'-phosphate
  modified_base 9: mod_base = OTHER; note = 2'-O-methyladenosine-3'-phosphate
  modified_base 10: mod_base = OTHER; note = 2'-O-methylcytidine-3'-phosphate
  modified_base 11: mod_base = OTHER; note = 2'-O-methylcytidine-3'-phosphate
  modified_base 12: mod_base = OTHER; note = 2'-O-methyluridine-3'-phosphate
  modified_base 13: mod_base = OTHER; note = 2'-O-methylguanosine-3'-phosphate
  modified_base 14: mod_base = OTHER; note = 2'-fluoroadenosine-3'-phosphate
  modified_base 15: mod_base = OTHER; note = 2'-O-methylguanosine-3'-phosphate
  modified_base 16: mod_base = OTHER; note = 2'-fluoroadenosine-3'-phosphate
  modified_base 17: mod_base = OTHER; note = 2'-O-methylcytidine-3'-phosphate
  modified_base 18: mod_base = OTHER; note = 2'-O-methylcytidine-3'-phosphate
  modified_base 19: mod_base = OTHER; note = 2'-O-methyluridine-3'-phosphate
  modified_base 20: mod_base = OTHER; note = 2'-O-methylcytidine-3'-phosphate
  modified_base 21: mod_base = OTHER; note = 2'-O-methyluridine-3'-phosphorothioate
  modified_base 22: mod_base = OTHER; note = 2'-O-methylcytidine-3'-phosphorothioate
  modified_base 23: mod_base = OTHER; note = 2'-O-methyluridine
tggaaagaacctgagacctctct

SEQ ID NO: 1257 - RNA, 23 nt, synthetic construct
  source 1..23: mol_type = other RNA
  modified_base 1: mod_base = OTHER; note = 2'-O-methyladenosine-3'-phosphorothioate
  modified_base 2: mod_base = OTHER; note = 2'-fluoroadenosine-3'-phosphorothioate
  modified_base 3: mod_base = OTHER; note = 2'-O-methyladenosine-3'-phosphate
  modified_base 4: mod_base = OTHER; note = 2'-O-methylguanosine-3'-phosphate
  modified_base 5: mod_base = OTHER; note = 2'-O-methyladenosine-3'-phosphate
  modified_base 6: mod_base = OTHER; note = 2'-fluoroguanosine-3'-phosphate
  modified_base 7: mod_base = OTHER; note = 2'-O-methylcytidine-3'-phosphate
  modified_base 8: mod_base = OTHER; note = 2'-O-methyladenosine-3'-phosphate
  modified_base 9: mod_base = OTHER; note = 2'-O-methylcytidine-3'-phosphate
  modified_base 10: mod_base = OTHER; note = 2'-O-methyladenosine-3'-phosphate
  modified_base 11: mod_base = OTHER; note = 2'-O-methylguanosine-3'-phosphate
  modified_base 12: mod_base = OTHER; note = 2'-O-methylcytidine-3'-phosphate
  modified_base 13: mod_base = OTHER; note = 2'-O-methyladenosine-3'-phosphate
  modified_base 14: mod_base = OTHER; note = 2'-fluorouridine-3'-phosphate
  modified_base 15: mod_base = OTHER; note = 2'-O-methylguanosine-3'-phosphate
  modified_base 16: mod_base = OTHER; note = 2'-fluorouridine-3'-phosphate
  modified_base 17: mod_base = OTHER; note = 2'-O-methyladenosine-3'-phosphate
  modified_base 18: mod_base = OTHER; note = 2'-O-methyladenosine-3'-phosphate
  modified_base 19: mod_base = OTHER; note = 2'-O-methyladenosine-3'-phosphate
  modified_base 20: mod_base = OTHER; note = 2'-O-methylguanosine-3'-phosphate
  modified_base 21: mod_base = OTHER; note = 2'-O-methylcytidine-3'-phosphorothioate
  modified_base 22: mod_base = OTHER; note = 2'-O-methyladenosine-3'-phosphorothioate
  modified_base 23: mod_base = OTHER; note = 2'-O-methylcytidine
aaagagcacagcatgtaaagcac

SEQ ID NO: 1258 - RNA, 23 nt, synthetic construct
  source 1..23: mol_type = other RNA
  modified_base 1: mod_base = OTHER; note = 2'-O-methyluridine-3'-phosphorothioate
  modified_base 2: mod_base = OTHER; note = 2'-fluoroadenosine-3'-phosphorothioate
  modified_base 3: mod_base = OTHER; note = 2'-O-methylguanosine-3'-phosphate
  modified_base 4: mod_base = OTHER; note = 2'-O-methylguanosine-3'-phosphate
  modified_base 5: mod_base = OTHER; note = 2'-O-methyluridine-3'-phosphate
  modified_base 6: mod_base = OTHER; note = 2'-fluoroguanosine-3'-phosphate
  modified_base 7: mod_base = OTHER; note = 2'-O-methyladenosine-3'-phosphate
  modified_base 8: mod_base = OTHER; note = 2'-O-methylguanosine-3'-phosphate
  modified_base 9: mod_base = OTHER; note = 2'-O-methylcytidine-3'-phosphate
  modified_base 10: mod_base = OTHER; note = 2'-O-methyluridine-3'-phosphate
  modified_base 11: mod_base = OTHER; note = 2'-O-methylguanosine-3'-phosphate
  modified_base 12: mod_base = OTHER; note = 2'-O-methyluridine-3'-phosphate
  modified_base 13: mod_base = OTHER; note = 2'-O-methyladenosine-3'-phosphate
  modified_base 14: mod_base = OTHER; note = 2'-fluoroguanosine-3'-phosphate
  modified_base 15: mod_base = OTHER; note = 2'-O-methyladenosine-3'-phosphate
  modified_base 16: mod_base = OTHER; note = 2'-fluorouridine-3'-phosphate
  modified_base 17: mod_base = OTHER; note = 2'-O-methyluridine-3'-phosphate
  modified_base 18: mod_base = OTHER; note = 2'-O-methyladenosine-3'-phosphate
  modified_base 19: mod_base = OTHER; note = 2'-O-methylcytidine-3'-phosphate
  modified_base 20: mod_base = OTHER; note = 2'-O-methylcytidine-3'-phosphate
  modified_base 21: mod_base = OTHER; note = 2'-O-methyladenosine-3'-phosphorothioate
  modified_base 22: mod_base = OTHER; note = 2'-O-methyluridine-3'-phosphorothioate
  modified_base 23: mod_base = OTHER; note = 2'-O-methylcytidine
taggtgagctgtagattaccatc

SEQ ID NO: 1259 - RNA, 23 nt, synthetic construct
  source 1..23: mol_type = other RNA
  modified_base 1: mod_base = OTHER; note = 2'-O-methyladenosine-3'-phosphorothioate
  modified_base 2: mod_base = OTHER; note = 2'-fluorouridine-3'-phosphorothioate
  modified_base 3: mod_base = OTHER; note = 2'-O-methyladenosine-3'-phosphate
  modified_base 4: mod_base = OTHER; note = 2'-O-methyluridine-3'-phosphate
  modified_base 5: mod_base = OTHER; note = 2'-O-methyluridine-3'-phosphate
  modified_base 6: mod_base = OTHER; note = 2'-fluorouridine-3'-phosphate
  modified_base 7: mod_base = OTHER; note = 2'-O-methylguanosine-3'-phosphate
  modified_base 8: mod_base = OTHER; note = 2'-O-methylcytidine-3'-phosphate
  modified_base 9: mod_base = OTHER; note = 2'-O-methylcytidine-3'-phosphate
  modified_base 10: mod_base = OTHER; note = 2'-O-methyluridine-3'-phosphate
  modified_base 11: mod_base = OTHER; note = 2'-O-methyluridine-3'-phosphate
  modified_base 12: mod_base = OTHER; note = 2'-O-methylcytidine-3'-phosphate
  modified_base 13: mod_base = OTHER; note = 2'-O-methyladenosine-3'-phosphate
  modified_base 14: mod_base = OTHER; note = 2'-fluoroguanosine-3'-phosphate
  modified_base 15: mod_base = OTHER; note = 2'-O-methyladenosine-3'-phosphate
  modified_base 16: mod_base = OTHER; note = 2'-fluoroguanosine-3'-phosphate
  modified_base 17: mod_base = OTHER; note = 2'-O-methylguanosine-3'-phosphate
  modified_base 18: mod_base = OTHER; note = 2'-O-methyluridine-3'-phosphate
  modified_base 19: mod_base = OTHER; note = 2'-O-methylguanosine-3'-phosphate
  modified_base 20: mod_base = OTHER; note = 2'-O-methyladenosine-3'-phosphate
  modified_base 21: mod_base = OTHER; note = 2'-O-methylguanosine-3'-phosphorothioate
  modified_base 22: mod_base = OTHER; note = 2'-O-methylcytidine-3'-phosphorothioate
  modified_base 23: mod_base = OTHER; note = 2'-O-methyluridine
atatttgccttcagaggtgagct

SEQ ID NO: 1260 - RNA, 23 nt, synthetic construct
  source 1..23: mol_type = other RNA
  modified_base 1: mod_base = OTHER; note = 2'-O-methyladenosine-3'-phosphorothioate
  modified_base 2: mod_base = OTHER; note = 2'-fluoroadenosine-3'-phosphorothioate
  modified_base 3: mod_base = OTHER; note = 2'-O-methylguanosine-3'-phosphate
  modified_base 4: mod_base = OTHER; note = 2'-O-methyladenosine-3'-phosphate
  modified_base 5: mod_base = OTHER; note = 2'-O-methyladenosine-3'-phosphate
  modified_base 6: mod_base = OTHER; note = 2'-fluorouridine-3'-phosphate
  modified_base 7: mod_base = OTHER; note = 2'-O-methyluridine-3'-phosphate
  modified_base 8: mod_base = OTHER; note = 2'-O-methyluridine-3'-phosphate
  modified_base 9: mod_base = OTHER; note = 2'-O-methylcytidine-3'-phosphate
  modified_base 10: mod_base = OTHER; note = 2'-O-methyladenosine-3'-phosphate
  modified_base 11: mod_base = OTHER; note = 2'-O-methyluridine-3'-phosphate
  modified_base 12: mod_base = OTHER; note = 2'-O-methylcytidine-3'-phosphate
  modified_base 13: mod_base = OTHER; note = 2'-O-methyladenosine-3'-phosphate
  modified_base 14: mod_base = OTHER; note = 2'-fluoroadenosine-3'-phosphate
  modified_base 15: mod_base = OTHER; note = 2'-O-methyladenosine-3'-phosphate
  modified_base 16: mod_base = OTHER; note = 2'-fluoroadenosine-3'-phosphate
  modified_base 17: mod_base = OTHER; note = 2'-O-methylcytidine-3'-phosphate
  modified_base 18: mod_base = OTHER; note = 2'-O-methyluridine-3'-phosphate
  modified_base 19: mod_base = OTHER; note = 2'-O-methyluridine-3'-phosphate
  modified_base 20: mod_base = OTHER; note = 2'-O-methyluridine-3'-phosphate
  modified_base 21: mod_base = OTHER; note = 2'-O-methyluridine-3'-phosphorothioate
  modified_base 22: mod_base = OTHER; note = 2'-O-methyluridine-3'-phosphorothioate
  modified_base 23: mod_base = OTHER; note = 2'-O-methyluridine
aagaatttcatcaaaactttttt

SEQ ID NO: 1261 - RNA, 23 nt, synthetic construct
  source 1..23: mol_type = other RNA
  modified_base 1: mod_base = OTHER; note = 2'-O-methyluridine-3'-phosphorothioate
  modified_base 2: mod_base = OTHER; note = 2'-fluorouridine-3'-phosphorothioate
  modified_base 3: mod_base = OTHER; note = 2'-O-methylcytidine-3'-phosphate
  modified_base 4: mod_base = OTHER; note = 2'-O-methyladenosine-3'-phosphate
  modified_base 5: mod_base = OTHER; note = 2'-O-methyladenosine-3'-phosphate
  modified_base 6: mod_base = OTHER; note = 2'-fluoroguanosine-3'-phosphate
  modified_base 7: mod_base = OTHER; note = 2'-O-methyladenosine-3'-phosphate
  modified_base 8: mod_base = OTHER; note = 2'-O-methyladenosine-3'-phosphate
  modified_base 9: mod_base = OTHER; note = 2'-O-methyluridine-3'-phosphate
  modified_base 10: mod_base = OTHER; note = 2'-O-methyluridine-3'-phosphate
  modified_base 11: mod_base = OTHER; note = 2'-O-methyluridine-3'-phosphate
  modified_base 12: mod_base = OTHER; note = 2'-O-methylcytidine-3'-phosphate
  modified_base 13: mod_base = OTHER; note = 2'-O-methyladenosine-3'-phosphate
  modified_base 14: mod_base = OTHER; note = 2'-fluorouridine-3'-phosphate
  modified_base 15: mod_base = OTHER; note = 2'-O-methylcytidine-3'-phosphate
  modified_base 16: mod_base = OTHER; note = 2'-fluoroadenosine-3'-phosphate
  modified_base 17: mod_base = OTHER; note = 2'-O-methyladenosine-3'-phosphate
  modified_base 18: mod_base = OTHER; note = 2'-O-methyladenosine-3'-phosphate
  modified_base 19: mod_base = OTHER; note = 2'-O-methyladenosine-3'-phosphate
  modified_base 20: mod_base = OTHER; note = 2'-O-methylcytidine-3'-phosphate
  modified_base 21: mod_base = OTHER; note = 2'-O-methyluridine-3'-phosphorothioate
  modified_base 22: mod_base = OTHER; note = 2'-O-methyluridine-3'-phosphorothioate
  modified_base 23: mod_base = OTHER; note = 2'-O-methyluridine
ttcaagaatttcatcaaaacttt

SEQ ID NO: 1262 - RNA, 23 nt, synthetic construct
  source 1..23: mol_type = other RNA
  modified_base 1: mod_base = OTHER; note = 2'-O-methyladenosine-3'-phosphorothioate
  modified_base 2: mod_base = OTHER; note = 2'-fluoroadenosine-3'-phosphorothioate
  modified_base 3: mod_base = OTHER; note = 2'-O-methylcytidine-3'-phosphate
  modified_base 4: mod_base = OTHER; note = 2'-O-methyluridine-3'-phosphate
  modified_base 5: mod_base = OTHER; note = 2'-O-methyluridine-3'-phosphate
  modified_base 6: mod_base = OTHER; note = 2'-fluorocytidine-3'-phosphate
  modified_base 7: mod_base = OTHER; note = 2'-O-methyladenosine-3'-phosphate
  modified_base 8: mod_base = OTHER; note = 2'-O-methyladenosine-3'-phosphate
  modified_base 9: mod_base = OTHER; note = 2'-O-methylguanosine-3'-phosphate
  modified_base 10: mod_base = OTHER; note = 2'-O-methyladenosine-3'-phosphate
  modified_base 11: mod_base = OTHER; note = 2'-O-methyladenosine-3'-phosphate
  modified_base 12: mod_base = OTHER; note = 2'-O-methyluridine-3'-phosphate
  modified_base 13: mod_base = OTHER; note = 2'-O-methyluridine-3'-phosphate
  modified_base 14: mod_base = OTHER; note = 2'-fluorouridine-3'-phosphate
  modified_base 15: mod_base = OTHER; note = 2'-O-methylcytidine-3'-phosphate
  modified_base 16: mod_base = OTHER; note = 2'-fluoroadenosine-3'-phosphate
  modified_base 17: mod_base = OTHER; note = 2'-O-methyluridine-3'-phosphate
  modified_base 18: mod_base = OTHER; note = 2'-O-methylcytidine-3'-phosphate
  modified_base 19: mod_base = OTHER; note = 2'-O-methyladenosine-3'-phosphate
  modified_base 20: mod_base = OTHER; note = 2'-O-methyladenosine-3'-phosphate
  modified_base 21: mod_base = OTHER; note = 2'-O-methyladenosine-3'-phosphorothioate
  modified_base 22: mod_base = OTHER; note = 2'-O-methyladenosine-3'-phosphorothioate
  modified_base 23: mod_base = OTHER; note = 2'-O-methylcytidine
aacttcaagaatttcatcaaaac

SEQ ID NO: 1263 - RNA, 23 nt, synthetic construct
  source 1..23: mol_type = other RNA
  modified_base 1: mod_base = OTHER; note = 2'-O-methyladenosine-3'-phosphorothioate
  modified_base 2: mod_base = OTHER; note = 2'-fluorouridine-3'-phosphorothioate
  modified_base 3: mod_base = OTHER; note = 2'-O-methylguanosine-3'-phosphate
  modified_base 4: mod_base = OTHER; note = 2'-O-methyladenosine-3'-phosphate
  modified_base 5: mod_base = OTHER; note = 2'-O-methyladenosine-3'-phosphate
  modified_base 6: mod_base = OTHER; note = 2'-fluorocytidine-3'-phosphate
  modified_base 7: mod_base = OTHER; note = 2'-O-methyluridine-3'-phosphate
  modified_base 8: mod_base = OTHER; note = 2'-O-methyluridine-3'-phosphate
  modified_base 9: mod_base = OTHER; note = 2'-O-methylcytidine-3'-phosphate
  modified_base 10: mod_base = OTHER; note = 2'-O-methyladenosine-3'-phosphate
  modified_base 11: mod_base = OTHER; note = 2'-O-methyladenosine-3'-phosphate
  modified_base 12: mod_base = OTHER; note = 2'-O-methylguanosine-3'-phosphate
  modified_base 13: mod_base = OTHER; note = 2'-O-methyladenosine-3'-phosphate
  modified_base 14: mod_base = OTHER; note = 2'-fluoroadenosine-3'-phosphate
  modified_base 15: mod_base = OTHER; note = 2'-O-methyluridine-3'-phosphate
  modified_base 16: mod_base = OTHER; note = 2'-fluorouridine-3'-phosphate
  modified_base 17: mod_base = OTHER; note = 2'-O-methyluridine-3'-phosphate
  modified_base 18: mod_base = OTHER; note = 2'-O-methylcytidine-3'-phosphate
  modified_base 19: mod_base = OTHER; note = 2'-O-methyladenosine-3'-phosphate
  modified_base 20: mod_base = OTHER; note = 2'-O-methyluridine-3'-phosphate
  modified_base 21: mod_base = OTHER; note = 2'-O-methylcytidine-3'-phosphorothioate
  modified_base 22: mod_base = OTHER; note = 2'-O-methyladenosine-3'-phosphorothioate
  modified_base 23: mod_base = OTHER; note = 2'-O-methyladenosine
atgaacttcaagaatttcatcaa

SEQ ID NO: 1264 - RNA, 23 nt, synthetic construct
  source 1..23: mol_type = other RNA
  modified_base 1: mod_base = OTHER; note = 2'-O-methyladenosine-3'-phosphorothioate
  modified_base 2: mod_base = OTHER; note = 2'-fluorouridine-3'-phosphorothioate
  modified_base 3: mod_base = OTHER; note = 2'-O-methylcytidine-3'-phosphate
  modified_base 4: mod_base = OTHER; note = 2'-O-methyladenosine-3'-phosphate
  modified_base 5: mod_base = OTHER; note = 2'-O-methylcytidine-3'-phosphate
  modified_base 6: mod_base = OTHER; note = 2'-fluorocytidine-3'-phosphate
  modified_base 7: mod_base = OTHER; note = 2'-O-methyladenosine-3'-phosphate
  modified_base 8: mod_base = OTHER; note = 2'-O-methyluridine-3'-phosphate
  modified_base 9: mod_base = OTHER; note = 2'-O-methylguanosine-3'-phosphate
  modified_base 10: mod_base = OTHER; note = 2'-O-methyladenosine-3'-phosphate
  modified_base 11: mod_base = OTHER; note = 2'-O-methyladenosine-3'-phosphate
  modified_base 12: mod_base = OTHER; note = 2'-O-methylcytidine-3'-phosphate
  modified_base 13: mod_base = OTHER; note = 2'-O-methyluridine-3'-phosphate
  modified_base 14: mod_base = OTHER; note = 2'-fluorouridine-3'-phosphate
  modified_base 15: mod_base = OTHER; note = 2'-O-methylcytidine-3'-phosphate
  modified_base 16: mod_base = OTHER; note = 2'-fluoroadenosine-3'-phosphate
  modified_base 17: mod_base = OTHER; note = 2'-O-methyladenosine-3'-phosphate
  modified_base 18: mod_base = OTHER; note = 2'-O-methylguanosine-3'-phosphate
  modified_base 19: mod_base = OTHER; note = 2'-O-methyladenosine-3'-phosphate
  modified_base 20: mod_base = OTHER; note = 2'-O-methyladenosine-3'-phosphate
  modified_base 21: mod_base = OTHER; note = 2'-O-methyluridine-3'-phosphorothioate
  modified_base 22: mod_base = OTHER; note = 2'-O-methyluridine-3'-phosphorothioate
  modified_base 23: mod_base = OTHER; note = 2'-O-methyluridine
atcaccatgaacttcaagaattt

SEQ ID NO: 1265 - RNA, 23 nt, synthetic construct
  source 1..23: mol_type = other RNA
  modified_base 1: mod_base = OTHER; note = 2'-O-methyladenosine-3'-phosphorothioate
  modified_base 2: mod_base = OTHER; note = 2'-fluorouridine-3'-phosphorothioate
  modified_base 3: mod_base = OTHER; note = 2'-O-methyluridine-3'-phosphate
  modified_base 4: mod_base = OTHER; note = 2'-O-methylguanosine-3'-phosphate
  modified_base 5: mod_base = OTHER; note = 2'-O-methylcytidine-3'-phosphate
  modified_base 6: mod_base = OTHER; note = 2'-fluoroadenosine-3'-phosphate
  modified_base 7: mod_base = OTHER; note = 2'-O-methylcytidine-3'-phosphate
  modified_base 8: mod_base = OTHER; note = 2'-O-methyluridine-3'-phosphate
  modified_base 9: mod_base = OTHER; note = 2'-O-methylguanosine-3'-phosphate
  modified_base 10: mod_base = OTHER; note = 2'-O-methyladenosine-3'-phosphate
  modified_base 11: mod_base = OTHER; note = 2'-O-methyluridine-3'-phosphate
  modified_base 12: mod_base = OTHER; note = 2'-O-methylcytidine-3'-phosphate
  modified_base 13: mod_base = OTHER; note = 2'-O-methyladenosine-3'-phosphate
  modified_base 14: mod_base = OTHER; note = 2'-fluorocytidine-3'-phosphate
  modified_base 15: mod_base = OTHER; note = 2'-O-methylcytidine-3'-phosphate
  modified_base 16: mod_base = OTHER; note = 2'-fluoroadenosine-3'-phosphate
  modified_base 17: mod_base = OTHER; note = 2'-O-methyluridine-3'-phosphate
  modified_base 18: mod_base = OTHER; note = 2'-O-methylguanosine-3'-phosphate
  modified_base 19: mod_base = OTHER; note = 2'-O-methyladenosine-3'-phosphate
  modified_base 20: mod_base = OTHER; note = 2'-O-methyladenosine-3'-phosphate
  modified_base 21: mod_base = OTHER; note = 2'-O-methylcytidine-3'-phosphorothioate
  modified_base 22: mod_base = OTHER; note = 2'-O-methyluridine-3'-phosphorothioate
  modified_base 23: mod_base = OTHER; note = 2'-O-methyluridine
attgcactgatcaccatgaactt

SEQ ID NO: 1266 - RNA, 23 nt, synthetic construct
  source 1..23: mol_type = other RNA
  modified_base 1: mod_base = OTHER; note = 2'-O-methyluridine-3'-phosphorothioate
  modified_base 2: mod_base = OTHER; note = 2'-fluorocytidine-3'-phosphorothioate
  modified_base 3: mod_base = OTHER; note = 2'-O-methyladenosine-3'-phosphate
  modified_base 4: mod_base = OTHER; note = 2'-O-methyladenosine-3'-phosphate
  modified_base 5: mod_base = OTHER; note = 2'-O-methyluridine-3'-phosphate
  modified_base 6: mod_base = OTHER; note = 2'-fluorouridine-3'-phosphate
  modified_base 7: mod_base = OTHER; note = 2'-O-methylguanosine-3'-phosphate
  modified_base 8: mod_base = OTHER; note = 2'-O-methylcytidine-3'-phosphate
  modified_base 9: mod_base = OTHER; note = 2'-O-methyladenosine-3'-phosphate
  modified_base 10: mod_base = OTHER; note = 2'-O-methylcytidine-3'-phosphate
  modified_base 11: mod_base = OTHER; note = 2'-O-methyluridine-3'-phosphate
  modified_base 12: mod_base = OTHER; note = 2'-O-methylguanosine-3'-phosphate
  modified_base 13: mod_base = OTHER; note = 2'-O-methyladenosine-3'-phosphate
  modified_base 14: mod_base = OTHER; note = 2'-fluorouridine-3'-phosphate
  modified_base 15: mod_base = OTHER; note = 2'-O-methylcytidine-3'-phosphate
  modified_base 16: mod_base = OTHER; note = 2'-fluoroadenosine-3'-phosphate
  modified_base 17: mod_base = OTHER; note = 2'-O-methylcytidine-3'-phosphate
  modified_base 18: mod_base = OTHER; note = 2'-O-methylcytidine-3'-phosphate
  modified_base 19: mod_base = OTHER; note = 2'-O-methyladenosine-3'-phosphate
  modified_base 20: mod_base = OTHER; note = 2'-O-methyluridine-3'-phosphate
  modified_base 21: mod_base = OTHER; note = 2'-O-methylguanosine-3'-phosphorothioate
  modified_base 22: mod_base = OTHER; note = 2'-O-methyladenosine-3'-phosphorothioate
  modified_base 23: mod_base = OTHER; note = 2'-O-methyladenosine
tcaattgcactgatcaccatgaa

SEQ ID NO: 1267 - RNA, 23 nt, synthetic construct
  source 1..23: mol_type = other RNA
  modified_base 1: mod_base = OTHER; note = 2'-O-methyluridine-3'-phosphorothioate
  modified_base 2: mod_base = OTHER; note = 2'-fluorouridine-3'-phosphorothioate
  modified_base 3: mod_base = OTHER; note = 2'-O-methylcytidine-3'-phosphate
  modified_base 4: mod_base = OTHER; note = 2'-O-methyladenosine-3'-phosphate
  modified_base 5: mod_base = OTHER; note = 2'-O-methyladenosine-3'-phosphate
  modified_base 6: mod_base = OTHER; note = 2'-fluorouridine-3'-phosphate
  modified_base 7: mod_base = OTHER; note = 2'-O-methyluridine-3'-phosphate
  modified_base 8: mod_base = OTHER; note = 2'-O-methylguanosine-3'-phosphate
  modified_base 9: mod_base = OTHER; note = 2'-O-methylcytidine-3'-phosphate
  modified_base 10: mod_base = OTHER; note = 2'-O-methyladenosine-3'-phosphate
  modified_base 11: mod_base = OTHER; note = 2'-O-methylcytidine-3'-phosphate
  modified_base 12: mod_base = OTHER; note = 2'-O-methyluridine-3'-phosphate
  modified_base 13: mod_base = OTHER; note = 2'-O-methylguanosine-3'-phosphate
  modified_base 14: mod_base = OTHER; note = 2'-fluoroadenosine-3'-phosphate
  modified_base 15: mod_base = OTHER; note = 2'-O-methyluridine-3'-phosphate
  modified_base 16: mod_base = OTHER; note = 2'-fluorocytidine-3'-phosphate
  modified_base 17: mod_base = OTHER; note = 2'-O-methyladenosine-3'-phosphate
  modified_base 18: mod_base = OTHER; note = 2'-O-methylcytidine-3'-phosphate
  modified_base 19: mod_base = OTHER; note = 2'-O-methylcytidine-3'-phosphate
  modified_base 20: mod_base = OTHER; note = 2'-O-methyladenosine-3'-phosphate
  modified_base 21: mod_base = OTHER; note = 2'-O-methyluridine-3'-phosphorothioate
  modified_base 22: mod_base = OTHER; note = 2'-O-methylguanosine-3'-phosphorothioate
  modified_base 23: mod_base = OTHER; note = 2'-O-methyladenosine
ttcaattgcactgatcaccatga

SEQ ID NO: 1268 - RNA, 23 nt, synthetic construct
  source 1..23: mol_type = other RNA
  modified_base 1: mod_base = OTHER; note = 2'-O-methyluridine-3'-phosphorothioate
  modified_base 2: mod_base = OTHER; note = 2'-fluoroadenosine-3'-phosphorothioate
  modified_base 3: mod_base = OTHER; note = 2'-O-methyladenosine-3'-phosphate
  modified_base 4: mod_base = OTHER; note = 2'-O-methylcytidine-3'-phosphate
  modified_base 5: mod_base = OTHER; note = 2'-O-methyluridine-3'-phosphate
  modified_base 6: mod_base = OTHER; note = 2'-fluoroadenosine-3'-phosphate
  modified_base 7: mod_base = OTHER; note = 2'-O-methylcytidine-3'-phosphate
  modified_base 8: mod_base = OTHER; note = 2'-O-methyladenosine-3'-phosphate
  modified_base 9: mod_base = OTHER; note = 2'-O-methyladenosine-3'-phosphate
  modified_base 10: mod_base = OTHER; note = 2'-O-methyladenosine-3'-phosphate
  modified_base 11: mod_base = OTHER; note = 2'-O-methyladenosine-3'-phosphate
  modified_base 12: mod_base = OTHER; note = 2'-O-methyluridine-3'-phosphate
  modified_base 13: mod_base = OTHER; note = 2'-O-methylcytidine-3'-phosphate
  modified_base 14: mod_base = OTHER; note = 2'-fluoroadenosine-3'-phosphate
  modified_base 15: mod_base = OTHER; note = 2'-O-methylguanosine-3'-phosphate
  modified_base 16: mod_base = OTHER; note = 2'-fluoroguanosine-3'-phosphate
  modified_base 17: mod_base = OTHER; note = 2'-O-methyladenosine-3'-phosphate
  modified_base 18: mod_base = OTHER; note = 2'-O-methylguanosine-3'-phosphate
  modified_base 19: mod_base = OTHER; note = 2'-O-methyluridine-3'-phosphate
  modified_base 20: mod_base = OTHER; note = 2'-O-methyluridine-3'-phosphate
  modified_base 21: mod_base = OTHER; note = 2'-O-methyluridine-3'-phosphorothioate
  modified_base 22: mod_base = OTHER; note = 2'-O-methylcytidine-3'-phosphorothioate
  modified_base 23: mod_base = OTHER; note = 2'-O-methyladenosine
taactacaaaatcaggagtttca

SEQ ID NO: 1269 - RNA, 23 nt, synthetic construct
  source 1..23: mol_type = other RNA
  modified_base 1: mod_base = OTHER; note = 2'-O-methyladenosine-3'-phosphorothioate
  modified_base 2: mod_base = OTHER; note = 2'-fluoroadenosine-3'-phosphorothioate
  modified_base 3: mod_base = OTHER; note = 2'-O-methyladenosine-3'-phosphate
  modified_base 4: mod_base = OTHER; note = 2'-O-methyluridine-3'-phosphate
  modified_base 5: mod_base = OTHER; note = 2'-O-methyluridine-3'-phosphate
  modified_base 6: mod_base = OTHER; note = 2'-fluoroadenosine-3'-phosphate
  modified_base 7: mod_base = OTHER; note = 2'-O-methyladenosine-3'-phosphate
  modified_base 8: mod_base = OTHER; note = 2'-O-methylcytidine-3'-phosphate
  modified_base 9: mod_base = OTHER; note = 2'-O-methyluridine-3'-phosphate
  modified_base 10: mod_base = OTHER; note = 2'-O-methyladenosine-3'-phosphate
  modified_base 11: mod_base = OTHER; note = 2'-O-methylcytidine-3'-phosphate
  modified_base 12: mod_base = OTHER; note = 2'-O-methyladenosine-3'-phosphate
  modified_base 13: mod_base = OTHER; note = 2'-O-methyladenosine-3'-phosphate
  modified_base 14: mod_base = OTHER; note = 2'-fluoroadenosine-3'-phosphate
  modified_base 15: mod_base = OTHER; note = 2'-O-methyladenosine-3'-phosphate
  modified_base 16: mod_base = OTHER; note = 2'-fluorouridine-3'-phosphate
  modified_base 17: mod_base = OTHER; note = 2'-O-methylcytidine-3'-phosphate
  modified_base 18: mod_base = OTHER; note = 2'-O-methyladenosine-3'-phosphate
  modified_base 19: mod_base = OTHER; note = 2'-O-methylguanosine-3'-phosphate
  modified_base 20: mod_base = OTHER; note = 2'-O-methylguanosine-3'-phosphate
  modified_base 21: mod_base = OTHER; note = 2'-O-methyladenosine-3'-phosphorothioate
  modified_base 22: mod_base = OTHER; note = 2'-O-methylguanosine-3'-phosphorothioate
  modified_base 23: mod_base = OTHER; note = 2'-O-methyluridine
aaattaactacaaaatcaggagt

SEQ ID NO: 1270 - RNA, 23 nt, synthetic construct
  source 1..23: mol_type = other RNA
  modified_base 1: mod_base = OTHER; note = 2'-O-methyluridine-3'-phosphorothioate
  modified_base 2: mod_base = OTHER; note = 2'-fluoroadenosine-3'-phosphorothioate
  modified_base 3: mod_base = OTHER; note = 2'-O-methyladenosine-3'-phosphate
  modified_base 4: mod_base = OTHER; note = 2'-O-methyladenosine-3'-phosphate
  modified_base 5: mod_base = OTHER; note = 2'-O-methyluridine-3'-phosphate
  modified_base 6: mod_base = OTHER; note = 2'-fluorouridine-3'-phosphate
  modified_base 7: mod_base = OTHER; note = 2'-O-methyladenosine-3'-phosphate
  modified_base 8: mod_base = OTHER; note = 2'-O-methyladenosine-3'-phosphate
  modified_base 9: mod_base = OTHER; note = 2'-O-methylcytidine-3'-phosphate
  modified_base 10: mod_base = OTHER; note = 2'-O-methyluridine-3'-phosphate
  modified_base 11: mod_base = OTHER; note = 2'-O-methyladenosine-3'-phosphate
  modified_base 12: mod_base = OTHER; note = 2'-O-methylcytidine-3'-phosphate
  modified_base 13: mod_base = OTHER; note = 2'-O-methyladenosine-3'-phosphate
  modified_base 14: mod_base = OTHER; note = 2'-fluoroadenosine-3'-phosphate
  modified_base 15: mod_base = OTHER; note = 2'-O-methyladenosine-3'-phosphate
  modified_base 16: mod_base = OTHER; note = 2'-fluoroadenosine-3'-phosphate
  modified_base 17: mod_base = OTHER; note = 2'-O-methyluridine-3'-phosphate
  modified_base 18: mod_base = OTHER; note = 2'-O-methylcytidine-3'-phosphate
  modified_base 19: mod_base = OTHER; note = 2'-O-methyladenosine-3'-phosphate
  modified_base 20: mod_base = OTHER; note = 2'-O-methylguanosine-3'-phosphate
  modified_base 21: mod_base = OTHER; note = 2'-O-methylguanosine-3'-phosphorothioate
  modified_base 22: mod_base = OTHER; note = 2'-O-methyladenosine-3'-phosphorothioate
  modified_base 23: mod_base = OTHER; note = 2'-O-methylguanosine
taaattaactacaaaatcaggag

SEQ ID NO: 1271 - RNA, 23 nt, synthetic construct
  source 1..23: mol_type = other RNA
  modified_base 1: mod_base = OTHER; note = 2'-O-methyluridine-3'-phosphorothioate
  modified_base 2: mod_base = OTHER; note = 2'-fluoroadenosine-3'-phosphorothioate
  modified_base 3: mod_base = OTHER; note = 2'-O-methylcytidine-3'-phosphate
  modified_base 4: mod_base = OTHER; note = 2'-O-methyladenosine-3'-phosphate
  modified_base 5: mod_base = OTHER; note = 2'-O-methyluridine-3'-phosphate
  modified_base 6: mod_base = OTHER; note = 2'-fluorocytidine-3'-phosphate
  modified_base 7: mod_base = OTHER; note = 2'-O-methylcytidine-3'-phosphate
  modified_base 8: mod_base = OTHER; note = 2'-O-methylcytidine-3'-phosphate
  modified_base 9: mod_base = OTHER; note = 2'-O-methyladenosine-3'-phosphate
  modified_base 10: mod_base = OTHER; note = 2'-O-methylguanosine-3'-phosphate
  modified_base 11: mod_base = OTHER; note = 2'-O-methyladenosine-3'-phosphate
  modified_base 12: mod_base = OTHER; note = 2'-O-methylcytidine-3'-phosphate
  modified_base 13: mod_base = OTHER; note = 2'-O-methyluridine-3'-phosphate
  modified_base 14: mod_base = OTHER; note = 2'-fluorouridine-3'-phosphate
  modified_base 15: mod_base = OTHER; note = 2'-O-methyladenosine-3'-phosphate
  modified_base 16: mod_base = OTHER; note = 2'-fluoroadenosine-3'-phosphate
  modified_base 17: mod_base = OTHER; note = 2'-O-methyluridine-3'-phosphate
  modified_base 18: mod_base = OTHER; note = 2'-O-methyladenosine-3'-phosphate
  modified_base 19: mod_base = OTHER; note = 2'-O-methyladenosine-3'-phosphate
  modified_base 20: mod_base = OTHER; note = 2'-O-methyladenosine-3'-phosphate
  modified_base 21: mod_base = OTHER; note = 2'-O-methyluridine-3'-phosphorothioate
  modified_base 22: mod_base = OTHER; note = 2'-O-methyluridine-3'-phosphorothioate
  modified_base 23: mod_base = OTHER; note = 2'-O-methyladenosine
tacatcccagacttaataaatta

SEQ ID NO: 1272 - RNA, 23 nt, synthetic construct
  source 1..23: mol_type = other RNA
  modified_base 1: mod_base = OTHER; note = 2'-O-methyluridine-3'-phosphorothioate
  modified_base 2: mod_base = OTHER; note = 2'-fluorouridine-3'-phosphorothioate
  modified_base 3: mod_base = OTHER; note = 2'-O-methyladenosine-3'-phosphate
  modified_base 4: mod_base = OTHER; note = 2'-O-methylcytidine-3'-phosphate
  modified_base 5: mod_base = OTHER; note = 2'-O-methyladenosine-3'-phosphate
  modified_base 6: mod_base = OTHER; note = 2'-fluorouridine-3'-phosphate
  modified_base 7: mod_base = OTHER; note = 2'-O-methylcytidine-3'-phosphate
  modified_base 8: mod_base = OTHER; note = 2'-O-methylcytidine-3'-phosphate
  modified_base 9: mod_base = OTHER; note = 2'-O-methylcytidine-3'-phosphate
  modified_base 10: mod_base = OTHER; note = 2'-O-methyladenosine-3'-phosphate
  modified_base 11: mod_base = OTHER; note = 2'-O-methylguanosine-3'-phosphate
  modified_base 12: mod_base = OTHER; note = 2'-O-methyladenosine-3'-phosphate
  modified_base 13: mod_base = OTHER; note = 2'-O-methylcytidine-3'-phosphate
  modified_base 14: mod_base = OTHER; note = 2'-fluorouridine-3'-phosphate
  modified_base 15: mod_base = OTHER; note = 2'-O-methyluridine-3'-phosphate
  modified_base 16: mod_base = OTHER; note = 2'-fluoroadenosine-3'-phosphate
  modified_base 17: mod_base = OTHER; note = 2'-O-methyladenosine-3'-phosphate
  modified_base 18: mod_base = OTHER; note = 2'-O-methyluridine-3'-phosphate
  modified_base 19: mod_base = OTHER; note = 2'-O-methyladenosine-3'-phosphate
  modified_base 20: mod_base = OTHER; note = 2'-O-methyladenosine-3'-phosphate
  modified_base 21: mod_base = OTHER; note = 2'-O-methyladenosine-3'-phosphorothioate
  modified_base 22: mod_base = OTHER; note = 2'-O-methyluridine-3'-phosphorothioate
  modified_base 23: mod_base = OTHER; note = 2'-O-methyluridine
ttacatcccagacttaataaatt

SEQ ID NO: 1273 - RNA, 23 nt, synthetic construct
  source 1..23: mol_type = other RNA
  modified_base 1: mod_base = OTHER; note = 2'-O-methyluridine-3'-phosphorothioate
  modified_base 2: mod_base = OTHER; note = 2'-fluoroadenosine-3'-phosphorothioate
  modified_base 3: mod_base = OTHER; note = 2'-O-methyladenosine-3'-phosphate
  modified_base 4: mod_base = OTHER; note = 2'-O-methylcytidine-3'-phosphate
  modified_base 5: mod_base = OTHER; note = 2'-O-methyluridine-3'-phosphate
  modified_base 6: mod_base = OTHER; note = 2'-fluorouridine-3'-phosphate
  modified_base 7: mod_base = OTHER; note = 2'-O-methyladenosine-3'-phosphate
  modified_base 8: mod_base = OTHER; note = 2'-O-methylguanosine-3'-phosphate
  modified_base 9: mod_base = OTHER; note = 2'-O-methylcytidine-3'-phosphate
  modified_base 10: mod_base = OTHER; note = 2'-O-methyluridine-3'-phosphate
  modified_base 11: mod_base = OTHER; note = 2'-O-methylcytidine-3'-phosphate
  modified_base 12: mod_base = OTHER; note = 2'-O-methyluridine-3'-phosphate
  modified_base 13: mod_base = OTHER; note = 2'-O-methyluridine-3'-phosphate
  modified_base 14: mod_base = OTHER; note = 2'-fluoroadenosine-3'-phosphate
  modified_base 15: mod_base = OTHER; note = 2'-O-methylcytidine-3'-phosphate
  modified_base 16: mod_base = OTHER; note = 2'-fluorouridine-3'-phosphate
  modified_base 17: mod_base = OTHER; note = 2'-O-methyluridine-3'-phosphate
  modified_base 18: mod_base = OTHER; note = 2'-O-methylcytidine-3'-phosphate
  modified_base 19: mod_base = OTHER; note = 2'-O-methyluridine-3'-phosphate
  modified_base 20: mod_base = OTHER; note = 2'-O-methyluridine-3'-phosphate
  modified_base 21: mod_base = OTHER; note = 2'-O-methylguanosine-3'-phosphorothioate
  modified_base 22: mod_base = OTHER; note = 2'-O-methyladenosine-3'-phosphorothioate
  modified_base 23: mod_base = OTHER; note = 2'-O-methyladenosine
taacttagctcttacttcttgaa

SEQ ID NO: 1274 - RNA, 23 nt, synthetic construct
  source 1..23: mol_type = other RNA
  modified_base 1: mod_base = OTHER; note = 2'-O-methyladenosine-3'-phosphorothioate
  modified_base 2: mod_base = OTHER; note = 2'-fluoroadenosine-3'-phosphorothioate
  modified_base 3: mod_base = OTHER; note = 2'-O-methyladenosine-3'-phosphate
  modified_base 4: mod_base = OTHER; note = 2'-O-methyluridine-3'-phosphate
  modified_base 5: mod_base = OTHER; note = 2'-O-methyladenosine-3'-phosphate
  modified_base 6: mod_base = OTHER; note = 2'-fluoroguanosine-3'-phosphate
  modified_base 7: mod_base = OTHER; note = 2'-O-methylcytidine-3'-phosphate
  modified_base 8: mod_base = OTHER; note = 2'-O-methylcytidine-3'-phosphate
  modified_base 9: mod_base = OTHER; note = 2'-O-methyluridine-3'-phosphate
  modified_base 10: mod_base = OTHER; note = 2'-O-methylguanosine-3'-phosphate
  modified_base 11: mod_base = OTHER; note = 2'-O-methylcytidine-3'-phosphate
  modified_base 12: mod_base = OTHER; note = 2'-O-methylguanosine-3'-phosphate
  modified_base 13: mod_base = OTHER; note = 2'-O-methylguanosine-3'-phosphate
  modified_base 14: mod_base = OTHER; note = 2'-fluoroadenosine-3'-phosphate
  modified_base 15: mod_base = OTHER; note = 2'-O-methylguanosine-3'-phosphate
  modified_base 16: mod_base = OTHER; note = 2'-fluoroadenosine-3'-phosphate
  modified_base 17: mod_base = OTHER; note = 2'-O-methyluridine-3'-phosphate
  modified_base 18: mod_base = OTHER; note = 2'-O-methyladenosine-3'-phosphate
  modified_base 19: mod_base = OTHER; note = 2'-O-methyladenosine-3'-phosphate
  modified_base 20: mod_base = OTHER; note = 2'-O-methyladenosine-3'-phosphate
  modified_base 21: mod_base = OTHER; note = 2'-O-methyluridine-3'-phosphorothioate
  modified_base 22: mod_base = OTHER; note = 2'-O-methyladenosine-3'-phosphorothioate
  modified_base 23: mod_base = OTHER; note = 2'-O-methylcytidine
aaatagcctgcggagataaatac

SEQ ID NO: 1275 - RNA, 23 nt, synthetic construct
  source 1..23: mol_type = other RNA
  modified_base 1: mod_base = OTHER; note = 2'-O-methyluridine-3'-phosphorothioate
  modified_base 2: mod_base = OTHER; note = 2'-fluoroguanosine-3'-phosphorothioate
  modified_base 3: mod_base = OTHER; note = 2'-O-methyladenosine-3'-phosphate
  modified_base 4: mod_base = OTHER; note = 2'-O-methyladenosine-3'-phosphate
  modified_base 5: mod_base = OTHER; note = 2'-O-methylcytidine-3'-phosphate
  modified_base 6: mod_base = OTHER; note = 2'-fluoroadenosine-3'-phosphate
  modified_base 7: mod_base = OTHER; note = 2'-O-methyladenosine-3'-phosphate
  modified_base 8: mod_base = OTHER; note = 2'-O-methyladenosine-3'-phosphate
  modified_base 9: mod_base = OTHER; note = 2'-O-methyluridine-3'-phosphate
  modified_base 10: mod_base = OTHER; note = 2'-O-methyladenosine-3'-phosphate
  modified_base 11: mod_base = OTHER; note = 2'-O-methylguanosine-3'-phosphate
  modified_base 12: mod_base = OTHER; note = 2'-O-methylcytidine-3'-phosphate
  modified_base 13: mod_base = OTHER; note = 2'-O-methylcytidine-3'-phosphate
  modified_base 14: mod_base = OTHER; note = 2'-fluorouridine-3'-phosphate
  modified_base 15: mod_base = OTHER; note = 2'-O-methylguanosine-3'-phosphate
  modified_base 16: mod_base = OTHER; note = 2'-fluorocytidine-3'-phosphate
  modified_base 17: mod_base = OTHER; note = 2'-O-methylguanosine-3'-phosphate
  modified_base 18: mod_base = OTHER; note = 2'-O-methylguanosine-3'-phosphate
  modified_base 19: mod_base = OTHER; note = 2'-O-methyladenosine-3'-phosphate
  modified_base 20: mod_base = OTHER; note = 2'-O-methylguanosine-3'-phosphate
  modified_base 21: mod_base = OTHER; note = 2'-O-methyladenosine-3'-phosphorothioate
  modified_base 22: mod_base = OTHER; note = 2'-O-methyluridine-3'-phosphorothioate
  modified_base 23: mod_base = OTHER; note = 2'-O-methyladenosine
tgaacaaatagcctgcggagata

SEQ ID NO: 1276 - RNA, 23 nt, synthetic construct
  source 1..23: mol_type = other RNA
  modified_base 1: mod_base = OTHER; note = 2'-O-methyluridine-3'-phosphorothioate
  modified_base 2: mod_base = OTHER; note = 2'-fluorouridine-3'-phosphorothioate
  modified_base 3: mod_base = OTHER; note = 2'-O-methylguanosine-3'-phosphate
  modified_base 4: mod_base = OTHER; note = 2'-O-methyladenosine-3'-phosphate
  modified_base 5: mod_base = OTHER; note = 2'-O-methyladenosine-3'-phosphate
  modified_base 6: mod_base = OTHER; note = 2'-fluorocytidine-3'-phosphate
  modified_base 7: mod_base = OTHER; note = 2'-O-methyladenosine-3'-phosphate
  modified_base 8: mod_base = OTHER; note = 2'-O-methyladenosine-3'-phosphate
  modified_base 9: mod_base = OTHER; note = 2'-O-methyladenosine-3'-phosphate
  modified_base 10: mod_base = OTHER; note = 2'-O-methyluridine-3'-phosphate
  modified_base 11: mod_base = OTHER; note = 2'-O-methyladenosine-3'-phosphate
  modified_base 12: mod_base = OTHER; note = 2'-O-methylguanosine-3'-phosphate
  modified_base 13: mod_base = OTHER; note = 2'-O-methylcytidine-3'-phosphate
  modified_base 14: mod_base = OTHER; note = 2'-fluorocytidine-3'-phosphate
  modified_base 15: mod_base = OTHER; note = 2'-O-methyluridine-3'-phosphate
  modified_base 16: mod_base = OTHER; note = 2'-fluoroguanosine-3'-phosphate
  modified_base 17: mod_base = OTHER; note = 2'-O-methylcytidine-3'-phosphate
  modified_base 18: mod_base = OTHER; note = 2'-O-methylguanosine-3'-phosphate
  modified_base 19: mod_base = OTHER; note = 2'-O-methylguanosine-3'-phosphate
  modified_base 20: mod_base = OTHER; note = 2'-O-methyladenosine-3'-phosphate
  modified_base 21: mod_base = OTHER; note = 2'-O-methylguanosine-3'-phosphorothioate
  modified_base 22: mod_base = OTHER; note = 2'-O-methyladenosine-3'-phosphorothioate
  modified_base 23: mod_base = OTHER; note = 2'-O-methyluridine
ttgaacaaatagcctgcggagat

SEQ ID NO: 1277 - RNA, 23 nt, synthetic construct
  source 1..23: mol_type = other RNA
  modified_base 1: mod_base = OTHER; note = 2'-O-methyluridine-3'-phosphorothioate
  modified_base 2: mod_base = OTHER; note = 2'-fluoroadenosine-3'-phosphorothioate
  modified_base 3: mod_base = OTHER; note = 2'-O-methyladenosine-3'-phosphate
  modified_base 4: mod_base = OTHER; note = 2'-O-methyladenosine-3'-phosphate
  modified_base 5: mod_base = OTHER; note = 2'-O-methylcytidine-3'-phosphate
  modified_base 6: mod_base = OTHER; note = 2'-fluoroadenosine-3'-phosphate
  modified_base 7: mod_base = OTHER; note = 2'-O-methyladenosine-3'-phosphate
  modified_base 8: mod_base = OTHER; note = 2'-O-methyladenosine-3'-phosphate
  modified_base 9: mod_base = OTHER; note = 2'-O-methyladenosine-3'-phosphate
  modified_base 10: mod_base = OTHER; note = 2'-O-methylguanosine-3'-phosphate
  modified_base 11: mod_base = OTHER; note = 2'-O-methylguanosine-3'-phosphate
  modified_base 12: mod_base = OTHER; note = 2'-O-methylcytidine-3'-phosphate
  modified_base 13: mod_base = OTHER; note = 2'-O-methylcytidine-3'-phosphate
  modified_base 14: mod_base = OTHER; note = 2'-fluorouridine-3'-phosphate
  modified_base 15: mod_base = OTHER; note = 2'-O-methylcytidine-3'-phosphate
  modified_base 16: mod_base = OTHER; note = 2'-fluorouridine-3'-phosphate
  modified_base 17: mod_base = OTHER; note = 2'-O-methylcytidine-3'-phosphate
  modified_base 18: mod_base = OTHER; note = 2'-O-methyluridine-3'-phosphate
  modified_base 19: mod_base = OTHER; note = 2'-O-methylguanosine-3'-phosphate
  modified_base 20: mod_base = OTHER; note = 2'-O-methyladenosine-3'-phosphate
  modified_base 21: mod_base = OTHER; note = 2'-O-methyladenosine-3'-phosphorothioate
  modified_base 22: mod_base = OTHER; note = 2'-O-methylcytidine-3'-phosphorothioate
  modified_base 23: mod_base = OTHER; note = 2'-O-methyladenosine
taaacaaaaggcctctctgaaca

SEQ ID NO: 1278 - RNA, 23 nt, synthetic construct
  source 1..23: mol_type = other RNA
  modified_base 1: mod_base = OTHER; note = 2'-O-methyluridine-3'-phosphorothioate
  modified_base 2: mod_base = OTHER; note = 2'-fluorouridine-3'-phosphorothioate
  modified_base 3: mod_base = OTHER; note = 2'-O-methyluridine-3'-phosphate
  modified_base 4: mod_base = OTHER; note = 2'-O-methyladenosine-3'-phosphate
  modified_base 5: mod_base = OTHER; note = 2'-O-methyladenosine-3'-phosphate
  modified_base 6: mod_base = OTHER; note = 2'-fluoroadenosine-3'-phosphate
  modified_base 7: mod_base = OTHER; note = 2'-O-methylcytidine-3'-phosphate
  modified_base 8: mod_base = OTHER; note = 2'-O-methyladenosine-3'-phosphate
  modified_base 9: mod_base = OTHER; note = 2'-O-methyladenosine-3'-phosphate
  modified_base 10: mod_base = OTHER; note = 2'-O-methyladenosine-3'-phosphate
  modified_base 11: mod_base = OTHER; note = 2'-O-methyladenosine-3'-phosphate
  modified_base 12: mod_base = OTHER; note = 2'-O-methylguanosine-3'-phosphate
  modified_base 13: mod_base = OTHER; note = 2'-O-methylguanosine-3'-phosphate
  modified_base 14: mod_base = OTHER; note = 2'-fluorocytidine-3'-phosphate
  modified_base 15: mod_base = OTHER; note = 2'-O-methylcytidine-3'-phosphate
  modified_base 16: mod_base = OTHER; note = 2'-fluorouridine-3'-phosphate
  modified_base 17: mod_base = OTHER; note = 2'-O-methylcytidine-3'-phosphate
  modified_base 18: mod_base = OTHER; note = 2'-O-methyluridine-3'-phosphate
  modified_base 19: mod_base = OTHER; note = 2'-O-methylcytidine-3'-phosphate
  modified_base 20: mod_base = OTHER; note = 2'-O-methyluridine-3'-phosphate
  modified_base 21: mod_base = OTHER; note = 2'-O-methylguanosine-3'-phosphorothioate
  modified_base 22: mod_base = OTHER; note = 2'-O-methyladenosine-3'-phosphorothioate
  modified_base 23: mod_base = OTHER; note = 2'-O-methyladenosine
tttaaacaaaaggcctctctgaa

SEQ ID NO: 1279 - RNA, 23 nt, synthetic construct
  source 1..23: mol_type = other RNA
  modified_base 1: mod_base = OTHER; note = 2'-O-methyladenosine-3'-phosphorothioate
  modified_base 2: mod_base = OTHER; note = 2'-fluorouridine-3'-phosphorothioate
  modified_base 3: mod_base = OTHER; note = 2'-O-methyladenosine-3'-phosphate
  modified_base 4: mod_base = OTHER; note = 2'-O-methyluridine-3'-phosphate
  modified_base 5: mod_base = OTHER; note = 2'-O-methyluridine-3'-phosphate
  modified_base 6: mod_base = OTHER; note = 2'-fluorouridine-3'-phosphate
  modified_base 7: mod_base = OTHER; note = 2'-O-methyladenosine-3'-phosphate
  modified_base 8: mod_base = OTHER; note = 2'-O-methyladenosine-3'-phosphate
  modified_base 9: mod_base = OTHER; note = 2'-O-methyladenosine-3'-phosphate
  modified_base 10: mod_base = OTHER; note = 2'-O-methylcytidine-3'-phosphate
  modified_base 11: mod_base = OTHER; note = 2'-O-methyladenosine-3'-phosphate
  modified_base 12: mod_base = OTHER; note = 2'-O-methyladenosine-3'-phosphate
  modified_base 13: mod_base = OTHER; note = 2'-O-methyladenosine-3'-phosphate
  modified_base 14: mod_base = OTHER; note = 2'-fluoroadenosine-3'-phosphate
  modified_base 15: mod_base = OTHER; note = 2'-O-methylguanosine-3'-phosphate
  modified_base 16: mod_base = OTHER; note = 2'-fluoroguanosine-3'-phosphate
  modified_base 17: mod_base = OTHER; note = 2'-O-methylcytidine-3'-phosphate
  modified_base 18: mod_base = OTHER; note = 2'-O-methylcytidine-3'-phosphate
  modified_base 19: mod_base = OTHER; note = 2'-O-methyluridine-3'-phosphate
  modified_base 20: mod_base = OTHER; note = 2'-O-methylcytidine-3'-phosphate
  modified_base 21: mod_base = OTHER; note = 2'-O-methyluridine-3'-phosphorothioate
  modified_base 22: mod_base = OTHER; note = 2'-O-methylcytidine-3'-phosphorothioate
  modified_base 23: mod_base = OTHER; note = 2'-O-methyluridine
atatttaaacaaaaggcctctct

SEQ ID NO: 1280 - RNA, 23 nt, synthetic construct
  source 1..23: mol_type = other RNA
  modified_base 1: mod_base = OTHER; note = 2'-O-methyluridine-3'-phosphorothioate
  modified_base 2: mod_base = OTHER; note = 2'-fluoroadenosine-3'-phosphorothioate
  modified_base 3: mod_base = OTHER; note = 2'-O-methylcytidine-3'-phosphate
  modified_base 4: mod_base = OTHER; note = 2'-O-methyladenosine-3'-phosphate
  modified_base 5: mod_base = OTHER; note = 2'-O-methyluridine-3'-phosphate
  modified_base 6: mod_base = OTHER; note = 2'-fluoroguanosine-3'-phosphate
  modified_base 7: mod_base = OTHER; note = 2'-O-methyluridine-3'-phosphate
  modified_base 8: mod_base = OTHER; note = 2'-O-methyluridine-3'-phosphate
  modified_base 9: mod_base = OTHER; note = 2'-O-methyladenosine-3'-phosphate
  modified_base 10: mod_base = OTHER; note = 2'-O-methyluridine-3'-phosphate
  modified_base 11: mod_base = OTHER; note = 2'-O-methyladenosine-3'-phosphate
  modified_base 12: mod_base = OTHER; note = 2'-O-methylguanosine-3'-phosphate
  modified_base 13: mod_base = OTHER; note = 2'-O-methylcytidine-3'-phosphate
  modified_base 14: mod_base = OTHER; note = 2'-fluorocytidine-3'-phosphate
  modified_base 15: mod_base = OTHER; note = 2'-O-methyladenosine-3'-phosphate
  modified_base 16: mod_base = OTHER; note = 2'-fluoroadenosine-3'-phosphate
  modified_base 17: mod_base = OTHER; note = 2'-O-methyluridine-3'-phosphate
  modified_base 18: mod_base = OTHER; note = 2'-O-methylcytidine-3'-phosphate
  modified_base 19: mod_base = OTHER; note = 2'-O-methylcytidine-3'-phosphate
  modified_base 20: mod_base = OTHER; note = 2'-O-methyladenosine-3'-phosphate
  modified_base 21: mod_base = OTHER; note = 2'-O-methylguanosine-3'-phosphorothioate
  modified_base 22: mod_base = OTHER; note = 2'-O-methyladenosine-3'-phosphorothioate
  modified_base 23: mod_base = OTHER; note = 2'-O-methylcytidine
tacatgttatagccaatccagac

SEQ ID NO: 1281 - RNA, 23 nt, synthetic construct
  source 1..23: mol_type = other RNA
  modified_base 1: mod_base = OTHER; note = 2'-O-methyladenosine-3'-phosphorothioate
  modified_base 2: mod_base = OTHER; note = 2'-fluoroguanosine-3'-phosphorothioate
  modified_base 3: mod_base = OTHER; note = 2'-O-methyladenosine-3'-phosphate
  modified_base 4: mod_base = OTHER; note = 2'-O-methylcytidine-3'-phosphate
  modified_base 5: mod_base = OTHER; note = 2'-O-methyladenosine-3'-phosphate
  modified_base 6: mod_base = OTHER; note = 2'-fluorouridine-3'-phosphate
  modified_base 7: mod_base = OTHER; note = 2'-O-methylguanosine-3'-phosphate
  modified_base 8: mod_base = OTHER; note = 2'-O-methyluridine-3'-phosphate
  modified_base 9: mod_base = OTHER; note = 2'-O-methyluridine-3'-phosphate
  modified_base 10: mod_base = OTHER; note = 2'-O-methyladenosine-3'-phosphate
  modified_base 11: mod_base = OTHER; note = 2'-O-methyluridine-3'-phosphate
  modified_base 12: mod_base = OTHER; note = 2'-O-methyladenosine-3'-phosphate
  modified_base 13: mod_base = OTHER; note = 2'-O-methylguanosine-3'-phosphate
  modified_base 14: mod_base = OTHER; note = 2'-fluorocytidine-3'-phosphate
  modified_base 15: mod_base = OTHER; note = 2'-O-methylcytidine-3'-phosphate
  modified_base 16: mod_base = OTHER; note = 2'-fluoroadenosine-3'-phosphate
  modified_base 17: mod_base = OTHER; note = 2'-O-methyladenosine-3'-phosphate
  modified_base 18: mod_base = OTHER; note = 2'-O-methyluridine-3'-phosphate
  modified_base 19: mod_base = OTHER; note = 2'-O-methylcytidine-3'-phosphate
  modified_base 20: mod_base = OTHER; note = 2'-O-methylcytidine-3'-phosphate
  modified_base 21: mod_base = OTHER; note = 2'-O-methyladenosine-3'-phosphorothioate
  modified_base 22: mod_base = OTHER; note = 2'-O-methylguanosine-3'-phosphorothioate
  modified_base 23: mod_base = OTHER; note = 2'-O-methyladenosine
agacatgttatagccaatccaga

SEQ ID NO: 1282 - RNA, 23 nt, synthetic construct
  source 1..23: mol_type = other RNA
  modified_base 1: mod_base = OTHER; note = 2'-O-methyluridine-3'-phosphorothioate
  modified_base 2: mod_base = OTHER; note = 2'-fluoroguanosine-3'-phosphorothioate
  modified_base 3: mod_base = OTHER; note = 2'-O-methyladenosine-3'-phosphate
  modified_base 4: mod_base = OTHER; note = 2'-O-methyladenosine-3'-phosphate
  modified_base 5: mod_base = OTHER; note = 2'-O-methyladenosine-3'-phosphate
  modified_base 6: mod_base = OTHER; note = 2'-fluoroguanosine-3'-phosphate
  modified_base 7: mod_base = OTHER; note = 2'-O-methyladenosine-3'-phosphate
  modified_base 8: mod_base = OTHER; note = 2'-O-methylcytidine-3'-phosphate
  modified_base 9: mod_base = OTHER; note = 2'-O-methyladenosine-3'-phosphate
  modified_base 10: mod_base = OTHER; note = 2'-O-methyluridine-3'-phosphate
  modified_base 11: mod_base = OTHER; note = 2'-O-methylguanosine-3'-phosphate
  modified_base 12: mod_base = OTHER; note = 2'-O-methyluridine-3'-phosphate
  modified_base 13: mod_base = OTHER; note = 2'-O-methyluridine-3'-phosphate
  modified_base 14: mod_base = OTHER; note = 2'-fluoroadenosine-3'-phosphate
  modified_base 15: mod_base = OTHER; note = 2'-O-methyluridine-3'-phosphate
  modified_base 16: mod_base = OTHER; note = 2'-fluoroadenosine-3'-phosphate
  modified_base 17: mod_base = OTHER; note = 2'-O-methylguanosine-3'-phosphate
  modified_base 18: mod_base = OTHER; note = 2'-O-methylcytidine-3'-phosphate
  modified_base 19: mod_base = OTHER; note = 2'-O-methylcytidine-3'-phosphate
  modified_base 20: mod_base = OTHER; note = 2'-O-methyladenosine-3'-phosphate
  modified_base 21: mod_base = OTHER; note = 2'-O-methyladenosine-3'-phosphorothioate
  modified_base 22: mod_base = OTHER; note = 2'-O-methyluridine-3'-phosphorothioate
  modified_base 23: mod_base = OTHER; note = 2'-O-methylcytidine
tgaaagacatgttatagccaatc

SEQ ID NO: 1283 - RNA, 23 nt, synthetic construct
  source 1..23: mol_type = other RNA
  modified_base 1: mod_base = OTHER; note = 2'-O-methyladenosine-3'-phosphorothioate
  modified_base 2: mod_base = OTHER; note = 2'-fluorouridine-3'-phosphorothioate
  modified_base 3: mod_base = OTHER; note = 2'-O-methyluridine-3'-phosphate
  modified_base 4: mod_base = OTHER; note = 2'-O-methyluridine-3'-phosphate
  modified_base 5: mod_base = OTHER; note = 2'-O-methylcytidine-3'-phosphate
  modified_base 6: mod_base = OTHER; note = 2'-fluorouridine-3'-phosphate
  modified_base 7: mod_base = OTHER; note = 2'-O-methyladenosine-3'-phosphate
  modified_base 8: mod_base = OTHER; note = 2'-O-methyladenosine-3'-phosphate
  modified_base 9: mod_base = OTHER; note = 2'-O-methylguanosine-3'-phosphate
  modified_base 10: mod_base = OTHER; note = 2'-O-methylguanosine-3'-phosphate
  modified_base 11: mod_base = OTHER; note = 2'-O-methyluridine-3'-phosphate
  modified_base 12: mod_base = OTHER; note = 2'-O-methylcytidine-3'-phosphate
  modified_base 13: mod_base = OTHER; note = 2'-O-methylcytidine-3'-phosphate
  modified_base 14: mod_base = OTHER; note = 2'-fluorocytidine-3'-phosphate
  modified_base 15: mod_base = OTHER; note = 2'-O-methyladenosine-3'-phosphate
  modified_base 16: mod_base = OTHER; note = 2'-fluoroguanosine-3'-phosphate
  modified_base 17: mod_base = OTHER; note = 2'-O-methyluridine-3'-phosphate
  modified_base 18: mod_base = OTHER; note = 2'-O-methylcytidine-3'-phosphate
  modified_base 19: mod_base = OTHER; note = 2'-O-methyluridine-3'-phosphate
  modified_base 20: mod_base = OTHER; note = 2'-O-methyluridine-3'-phosphate
  modified_base 21: mod_base = OTHER; note = 2'-O-methylguanosine-3'-phosphorothioate
  modified_base 22: mod_base = OTHER; note = 2'-O-methylcytidine-3'-phosphorothioate
  modified_base 23: mod_base = OTHER; note = 2'-O-methyluridine
atttctaaggtcccagtcttgct

SEQ ID NO: 1284 - RNA, 23 nt, synthetic construct
  source 1..23: mol_type = other RNA
  modified_base 1: mod_base = OTHER; note = 2'-O-methyluridine-3'-phosphorothioate
  modified_base 2: mod_base = OTHER; note = 2'-fluoroadenosine-3'-phosphorothioate
  modified_base 3: mod_base = OTHER; note = 2'-O-methyluridine-3'-phosphate
  modified_base 4: mod_base = OTHER; note = 2'-O-methyluridine-3'-phosphate
  modified_base 5: mod_base = OTHER; note = 2'-O-methyluridine-3'-phosphate
  modified_base 6: mod_base = OTHER; note = 2'-fluorocytidine-3'-phosphate
  modified_base 7: mod_base = OTHER; note = 2'-O-methyluridine-3'-phosphate
  modified_base 8: mod_base = OTHER; note = 2'-O-methyladenosine-3'-phosphate
  modified_base 9: mod_base = OTHER; note = 2'-O-methyladenosine-3'-phosphate
  modified_base 10: mod_base = OTHER; note = 2'-O-methylguanosine-3'-phosphate
  modified_base 11: mod_base = OTHER; note = 2'-O-methylguanosine-3'-phosphate
  modified_base 12: mod_base = OTHER; note = 2'-O-methyluridine-3'-phosphate
  modified_base 13: mod_base = OTHER; note = 2'-O-methylcytidine-3'-phosphate
  modified_base 14: mod_base = OTHER; note = 2'-fluorocytidine-3'-phosphate
  modified_base 15: mod_base = OTHER; note = 2'-O-methylcytidine-3'-phosphate
  modified_base 16: mod_base = OTHER; note = 2'-fluoroadenosine-3'-phosphate
  modified_base 17: mod_base = OTHER; note = 2'-O-methylguanosine-3'-phosphate
  modified_base 18: mod_base = OTHER; note = 2'-O-methyluridine-3'-phosphate
  modified_base 19: mod_base = OTHER; note = 2'-O-methylcytidine-3'-phosphate
  modified_base 20: mod_base = OTHER; note = 2'-O-methyluridine-3'-phosphate
  modified_base 21: mod_base = OTHER; note = 2'-O-methyluridine-3'-phosphorothioate
  modified_base 22: mod_base = OTHER; note = 2'-O-methylguanosine-3'-phosphorothioate
  modified_base 23: mod_base = OTHER; note = 2'-O-methylcytidine
tatttctaaggtcccagtcttgc

SEQ ID NO: 1285 - RNA, 23 nt, synthetic construct
  source 1..23: mol_type = other RNA
  modified_base 1: mod_base = OTHER; note = 2'-O-methyladenosine-3'-phosphorothioate
  modified_base 2: mod_base = OTHER; note = 2'-fluoroguanosine-3'-phosphorothioate
  modified_base 3: mod_base = OTHER; note = 2'-O-methylcytidine-3'-phosphate
  modified_base 4: mod_base = OTHER; note = 2'-O-methyladenosine-3'-phosphate
  modified_base 5: mod_base = OTHER; note = 2'-O-methyladenosine-3'-phosphate
  modified_base 6: mod_base = OTHER; note = 2'-fluorouridine-3'-phosphate
  modified_base 7: mod_base = OTHER; note = 2'-O-methyluridine-3'-phosphate
  modified_base 8: mod_base = OTHER; note = 2'-O-methyladenosine-3'-phosphate
  modified_base 9: mod_base = OTHER; note = 2'-O-methyladenosine-3'-phosphate
  modified_base 10: mod_base = OTHER; note = 2'-O-methyladenosine-3'-phosphate
  modified_base 11: mod_base = OTHER; note = 2'-O-methylguanosine-3'-phosphate
  modified_base 12: mod_base = OTHER; note = 2'-O-methyluridine-3'-phosphate
  modified_base 13: mod_base = OTHER; note = 2'-O-methyluridine-3'-phosphate
  modified_base 14: mod_base = OTHER; note = 2'-fluoroguanosine-3'-phosphate
  modified_base 15: mod_base = OTHER; note = 2'-O-methylguanosine-3'-phosphate
  modified_base 16: mod_base = OTHER; note = 2'-fluorocytidine-3'-phosphate
  modified_base 17: mod_base = OTHER; note = 2'-O-methyluridine-3'-phosphate
  modified_base 18: mod_base = OTHER; note = 2'-O-methyluridine-3'-phosphate
  modified_base 19: mod_base = OTHER; note = 2'-O-methyladenosine-3'-phosphate
  modified_base 20: mod_base = OTHER; note = 2'-O-methylguanosine-3'-phosphate
  modified_base 21: mod_base = OTHER; note = 2'-O-methyladenosine-3'-phosphorothioate
  modified_base 22: mod_base = OTHER; note = 2'-O-methylguanosine-3'-phosphorothioate
  modified_base 23: mod_base = OTHER; note = 2'-O-methyladenosine
agcaattaaagttggcttagaga

SEQ ID NO: 1286 - RNA, 23 nt, synthetic construct
  source 1..23: mol_type = other RNA
  modified_base 1: mod_base = OTHER; note = 2'-O-methyladenosine-3'-phosphorothioate
  modified_base 2: mod_base = OTHER; note = 2'-fluoroguanosine-3'-phosphorothioate
  modified_base 3: mod_base = OTHER; note = 2'-O-methyladenosine-3'-phosphate
  modified_base 4: mod_base = OTHER; note = 2'-O-methyluridine-3'-phosphate
  modified_base 5: mod_base = OTHER; note = 2'-O-methyluridine-3'-phosphate
  modified_base 6: mod_base = OTHER; note = 2'-fluorouridine-3'-phosphate
  modified_base 7: mod_base = OTHER; note = 2'-O-methylguanosine-3'-phosphate
  modified_base 8: mod_base = OTHER; note = 2'-O-methyladenosine-3'-phosphate
  modified_base 9: mod_base = OTHER; note = 2'-O-methyluridine-3'-phosphate
  modified_base 10: mod_base = OTHER; note = 2'-O-methyladenosine-3'-phosphate
  modified_base 11: mod_base = OTHER; note = 2'-O-methylcytidine-3'-phosphate
  modified_base 12: mod_base = OTHER; note = 2'-O-methyladenosine-3'-phosphate
  modified_base 13: mod_base = OTHER; note = 2'-O-methylguanosine-3'-phosphate
  modified_base 14: mod_base = OTHER; note = 2'-fluorouridine-3'-phosphate
  modified_base 15: mod_base = OTHER; note = 2'-O-methyluridine-3'-phosphate
  modified_base 16: mod_base = OTHER; note = 2'-fluorouridine-3'-phosphate
  modified_base 17: mod_base = OTHER; note = 2'-O-methyladenosine-3'-phosphate
  modified_base 18: mod_base = OTHER; note = 2'-O-methylcytidine-3'-phosphate
  modified_base 19: mod_base = OTHER; note = 2'-O-methyladenosine-3'-phosphate
  modified_base 20: mod_base = OTHER; note = 2'-O-methyladenosine-3'-phosphate
  modified_base 21: mod_base = OTHER; note = 2'-O-methyladenosine-3'-phosphorothioate
  modified_base 22: mod_base = OTHER; note = 2'-O-methyladenosine-3'-phosphorothioate
  modified_base 23: mod_base = OTHER; note = 2'-O-methyladenosine
agatttgatacagtttacaaaaa

SEQ ID NO: 1287 - RNA, 23 nt, synthetic construct
  source 1..23: mol_type = other RNA
  modified_base 1: mod_base = OTHER; note = 2'-O-methyladenosine-3'-phosphorothioate
  modified_base 2: mod_base = OTHER; note = 2'-fluorocytidine-3'-phosphorothioate
  modified_base 3: mod_base = OTHER; note = 2'-O-methyladenosine-3'-phosphate
  modified_base 4: mod_base = OTHER; note = 2'-O-methyladenosine-3'-phosphate
  modified_base 5: mod_base = OTHER; note = 2'-O-methylcytidine-3'-phosphate
  modified_base 6: mod_base = OTHER; note = 2'-fluoroadenosine-3'-phosphate
  modified_base 7: mod_base = OTHER; note = 2'-O-methyluridine-3'-phosphate
  modified_base 8: mod_base = OTHER; note = 2'-O-methyladenosine-3'-phosphate
  modified_base 9: mod_base = OTHER; note = 2'-O-methyluridine-3'-phosphate
  modified_base 10: mod_base = OTHER; note = 2'-O-methyladenosine-3'-phosphate
  modified_base 11: mod_base = OTHER; note = 2'-O-methylcytidine-3'-phosphate
  modified_base 12: mod_base = OTHER; note = 2'-O-methyladenosine-3'-phosphate
  modified_base 13: mod_base = OTHER; note = 2'-O-methylguanosine-3'-phosphate
  modified_base 14: mod_base = OTHER; note = 2'-fluoroadenosine-3'-phosphate
  modified_base 15: mod_base = OTHER; note = 2'-O-methyluridine-3'-phosphate
  modified_base 16: mod_base = OTHER; note = 2'-fluorouridine-3'-phosphate
  modified_base 17: mod_base = OTHER; note = 2'-O-methyluridine-3'-phosphate
  modified_base 18: mod_base = OTHER; note = 2'-O-methylguanosine-3'-phosphate
  modified_base 19: mod_base = OTHER; note = 2'-O-methyladenosine-3'-phosphate
  modified_base 20: mod_base = OTHER; note = 2'-O-methyluridine-3'-phosphate
  modified_base 21: mod_base = OTHER; note = 2'-O-methyladenosine-3'-phosphorothioate
  modified_base 22: mod_base = OTHER; note = 2'-O-methylcytidine-3'-phosphorothioate
  modified_base 23: mod_base = OTHER; note = 2'-O-methyladenosine
acaacatatacagatttgataca

SEQ ID NO: 1288 - RNA, 23 nt, synthetic construct
  source 1..23: mol_type = other RNA
  modified_base 1: mod_base = OTHER; note = 2'-O-methyluridine-3'-phosphorothioate
  modified_base 2: mod_base = OTHER; note = 2'-fluoroadenosine-3'-phosphorothioate
  modified_base 3: mod_base = OTHER; note = 2'-O-methylcytidine-3'-phosphate
  modified_base 4: mod_base = OTHER; note = 2'-O-methyluridine-3'-phosphate
  modified_base 5: mod_base = OTHER; note = 2'-O-methyluridine-3'-phosphate
  modified_base 6: mod_base = OTHER; note = 2'-fluorocytidine-3'-phosphate
  modified_base 7: mod_base = OTHER; note = 2'-O-methylcytidine-3'-phosphate
  modified_base 8: mod_base = OTHER; note = 2'-O-methyladenosine-3'-phosphate
  modified_base 9: mod_base = OTHER; note = 2'-O-methyladenosine-3'-phosphate
  modified_base 10: mod_base = OTHER; note = 2'-O-methyluridine-3'-phosphate
  modified_base 11: mod_base = OTHER; note = 2'-O-methyladenosine-3'-phosphate
  modified_base 12: mod_base = OTHER; note = 2'-O-methyladenosine-3'-phosphate
  modified_base 13: mod_base = OTHER; note = 2'-O-methyladenosine-3'-phosphate
  modified_base 14: mod_base = OTHER; note = 2'-fluorocytidine-3'-phosphate
  modified_base 15: mod_base = OTHER; note = 2'-O-methyluridine-3'-phosphate
  modified_base 16: mod_base = OTHER; note = 2'-fluoroadenosine-3'-phosphate
  modified_base 17: mod_base = OTHER; note = 2'-O-methylguanosine-3'-phosphate
  modified_base 18: mod_base = OTHER; note = 2'-O-methylcytidine-3'-phosphate
  modified_base 19: mod_base = OTHER; note = 2'-O-methyladenosine-3'-phosphate
  modified_base 20: mod_base = OTHER; note = 2'-O-methyluridine-3'-phosphate
  modified_base 21: mod_base = OTHER; note = 2'-O-methyladenosine-3'-phosphorothioate
  modified_base 22: mod_base = OTHER; note = 2'-O-methyladenosine-3'-phosphorothioate
  modified_base 23: mod_base = OTHER; note = 2'-O-methylguanosine
tacttccaataaactagcataag

SEQ ID NO: 1289 - RNA, 23 nt, synthetic construct
  source 1..23: mol_type = other RNA
  modified_base 1: mod_base = OTHER; note = 2'-O-methyluridine-3'-phosphorothioate
  modified_base 2: mod_base = OTHER; note = 2'-fluoroadenosine-3'-phosphorothioate
  modified_base 3: mod_base = OTHER; note = 2'-O-methyluridine-3'-phosphate
  modified_base 4: mod_base = OTHER; note = 2'-O-methyluridine-3'-phosphate
  modified_base 5: mod_base = OTHER; note = 2'-O-methyluridine-3'-phosphate
  modified_base 6: mod_base = OTHER; note = 2'-fluorocytidine-3'-phosphate
  modified_base 7: mod_base = OTHER; note = 2'-O-methyluridine-3'-phosphate
  modified_base 8: mod_base = OTHER; note = 2'-O-methyluridine-3'-phosphate
  modified_base 9: mod_base = OTHER; note = 2'-O-methylguanosine-3'-phosphate
  modified_base 10: mod_base = OTHER; note = 2'-O-methyladenosine-3'-phosphate
  modified_base 11: mod_base = OTHER; note = 2'-O-methyladenosine-3'-phosphate
  modified_base 12: mod_base = OTHER; note = 2'-O-methylcytidine-3'-phosphate
  modified_base 13: mod_base = OTHER; note = 2'-O-methyladenosine-3'-phosphate
  modified_base 14: mod_base = OTHER; note = 2'-fluorocytidine-3'-phosphate
  modified_base 15: mod_base = OTHER; note = 2'-O-methyluridine-3'-phosphate
  modified_base 16: mod_base = OTHER; note = 2'-fluorouridine-3'-phosphate
  modified_base 17: mod_base = OTHER; note = 2'-O-methylcytidine-3'-phosphate
  modified_base 18: mod_base = OTHER; note = 2'-O-methylcytidine-3'-phosphate
  modified_base 19: mod_base = OTHER; note = 2'-O-methyladenosine-3'-phosphate
  modified_base 20: mod_base = OTHER; note = 2'-O-methyladenosine-3'-phosphate
  modified_base 21: mod_base = OTHER; note = 2'-O-methyluridine-3'-phosphorothioate
  modified_base 22: mod_base = OTHER; note = 2'-O-methyladenosine-3'-phosphorothioate
  modified_base 23: mod_base = OTHER; note = 2'-O-methyladenosine
tatttcttgaacacttccaataa

SEQ ID NO: 1290 - RNA, 23 nt, synthetic construct
  source 1..23: mol_type = other RNA
  modified_base 1: mod_base = OTHER; note = 2'-O-methyluridine-3'-phosphorothioate
  modified_base 2: mod_base = OTHER; note = 2'-fluorouridine-3'-phosphorothioate
  modified_base 3: mod_base = OTHER; note = 2'-O-methyluridine-3'-phosphate
  modified_base 4: mod_base = OTHER; note = 2'-O-methyladenosine-3'-phosphate
  modified_base 5: mod_base = OTHER; note = 2'-O-methyluridine-3'-phosphate
  modified_base 6: mod_base = OTHER; note = 2'-fluorouridine-3'-phosphate
  modified_base 7: mod_base = OTHER; note = 2'-O-methyluridine-3'-phosphate
  modified_base 8: mod_base = OTHER; note = 2'-O-methylcytidine-3'-phosphate
  modified_base 9: mod_base = OTHER; note = 2'-O-methyluridine-3'-phosphate
  modified_base 10: mod_base = OTHER; note = 2'-O-methyluridine-3'-phosphate
  modified_base 11: mod_base = OTHER; note = 2'-O-methylguanosine-3'-phosphate
  modified_base 12: mod_base = OTHER; note = 2'-O-methyladenosine-3'-phosphate
  modified_base 13: mod_base = OTHER; note = 2'-O-methyladenosine-3'-phosphate
  modified_base 14: mod_base = OTHER; note = 2'-fluorocytidine-3'-phosphate
  modified_base 15: mod_base = OTHER; note = 2'-O-methyladenosine-3'-phosphate
  modified_base 16: mod_base = OTHER; note = 2'-fluorocytidine-3'-phosphate
  modified_base 17: mod_base = OTHER; note = 2'-O-methyluridine-3'-phosphate
  modified_base 18: mod_base = OTHER; note = 2'-O-methyluridine-3'-phosphate
  modified_base 19: mod_base = OTHER; note = 2'-O-methylcytidine-3'-phosphate
  modified_base 20: mod_base = OTHER; note = 2'-O-methylcytidine-3'-phosphate
  modified_base 21: mod_base = OTHER; note = 2'-O-methyladenosine-3'-phosphorothioate
  modified_base 22: mod_base = OTHER; note = 2'-O-methyladenosine-3'-phosphorothioate
  modified_base 23: mod_base = OTHER; note = 2'-O-methyluridine
tttatttcttgaacacttccaat

SEQ ID NO: 1291 - RNA, 23 nt, synthetic construct
  source 1..23: mol_type = other RNA
  modified_base 1: mod_base = OTHER; note = 2'-O-methyluridine-3'-phosphorothioate
  modified_base 2: mod_base = OTHER; note = 2'-fluorouridine-3'-phosphorothioate
  modified_base 3: mod_base = OTHER; note = 2'-O-methyluridine-3'-phosphate
  modified_base 4: mod_base = OTHER; note = 2'-O-methyluridine-3'-phosphate
  modified_base 5: mod_base = OTHER; note = 2'-O-methyladenosine-3'-phosphate
  modified_base 6: mod_base = OTHER; note = 2'-fluorouridine-3'-phosphate
  modified_base 7: mod_base = OTHER; note = 2'-O-methylcytidine-3'-phosphate
  modified_base 8: mod_base = OTHER; note = 2'-O-methyladenosine-3'-phosphate
  modified_base 9: mod_base = OTHER; note = 2'-O-methylguanosine-3'-phosphate
  modified_base 10: mod_base = OTHER; note = 2'-O-methyluridine-3'-phosphate
  modified_base 11: mod_base = OTHER; note = 2'-O-methyladenosine-3'-phosphate
  modified_base 12: mod_base = OTHER; note = 2'-O-methylcytidine-3'-phosphate
  modified_base 13: mod_base = OTHER; note = 2'-O-methyladenosine-3'-phosphate
  modified_base 14: mod_base = OTHER; note = 2'-fluorocytidine-3'-phosphate
  modified_base 15: mod_base = OTHER; note = 2'-O-methyladenosine-3'-phosphate
  modified_base 16: mod_base = OTHER; note = 2'-fluoroadenosine-3'-phosphate
  modified_base 17: mod_base = OTHER; note = 2'-O-methylguanosine-3'-phosphate
  modified_base 18: mod_base = OTHER; note = 2'-O-methyluridine-3'-phosphate
  modified_base 19: mod_base = OTHER; note = 2'-O-methyluridine-3'-phosphate
  modified_base 20: mod_base = OTHER; note = 2'-O-methylguanosine-3'-phosphate
  modified_base 21: mod_base = OTHER; note = 2'-O-methyladenosine-3'-phosphorothioate
  modified_base 22: mod_base = OTHER; note = 2'-O-methyluridine-3'-phosphorothioate
  modified_base 23: mod_base = OTHER; note = 2'-O-methyluridine
ttttatcagtacacaagttgatt

SEQ ID NO: 1292 - RNA, 23 nt, synthetic construct
  source 1..23: mol_type = other RNA
  modified_base 1: mod_base = OTHER; note = 2'-O-methyladenosine-3'-phosphorothioate
  modified_base 2: mod_base = OTHER; note = 2'-fluoroguanosine-3'-phosphorothioate
  modified_base 3: mod_base = OTHER; note = 2'-O-methyladenosine-3'-phosphate
  modified_base 4: mod_base = OTHER; note = 2'-O-methyluridine-3'-phosphate
  modified_base 5: mod_base = OTHER; note = 2'-O-methyluridine-3'-phosphate
  modified_base 6: mod_base = OTHER; note = 2'-fluorocytidine-3'-phosphate
  modified_base 7: mod_base = OTHER; note = 2'-O-methyladenosine-3'-phosphate
  modified_base 8: mod_base = OTHER; note = 2'-O-methyladenosine-3'-phosphate
  modified_base 9: mod_base = OTHER; note = 2'-O-methyluridine-3'-phosphate
  modified_base 10: mod_base = OTHER; note = 2'-O-methyladenosine-3'-phosphate
  modified_base 11: mod_base = OTHER; note = 2'-O-methyladenosine-3'-phosphate
  modified_base 12: mod_base = OTHER; note = 2'-O-methylcytidine-3'-phosphate
  modified_base 13: mod_base = OTHER; note = 2'-O-methyluridine-3'-phosphate
  modified_base 14: mod_base = OTHER; note = 2'-fluorocytidine-3'-phosphate
  modified_base 15: mod_base = OTHER; note = 2'-O-methyluridine-3'-phosphate
  modified_base 16: mod_base = OTHER; note = 2'-fluoroguanosine-3'-phosphate
  modified_base 17: mod_base = OTHER; note = 2'-O-methylcytidine-3'-phosphate
  modified_base 18: mod_base = OTHER; note = 2'-O-methyluridine-3'-phosphate
  modified_base 19: mod_base = OTHER; note = 2'-O-methylguanosine-3'-phosphate
  modified_base 20: mod_base = OTHER; note = 2'-O-methyladenosine-3'-phosphate
  modified_base 21: mod_base = OTHER; note = 2'-O-methylcytidine-3'-phosphorothioate
  modified_base 22: mod_base = OTHER; note = 2'-O-methylcytidine-3'-phosphorothioate
  modified_base 23: mod_base = OTHER; note = 2'-O-methylcytidine
agattcaataactctgctgaccc

SEQ ID NO: 1293 - RNA, 23 nt, synthetic construct
  source 1..23: mol_type = other RNA
  modified_base 1: mod_base = OTHER; note = 2'-O-methyladenosine-3'-phosphorothioate
  modified_base 2: mod_base = OTHER; note = 2'-fluoroadenosine-3'-phosphorothioate
  modified_base 3: mod_base = OTHER; note = 2'-O-methylcytidine-3'-phosphate
  modified_base 4: mod_base = OTHER; note = 2'-O-methyluridine-3'-phosphate
  modified_base 5: mod_base = OTHER; note = 2'-O-methyluridine-3'-phosphate
  modified_base 6: mod_base = OTHER; note = 2'-fluoroguanosine-3'-phosphate
  modified_base 7: mod_base = OTHER; note = 2'-O-methyluridine-3'-phosphate
  modified_base 8: mod_base = OTHER; note = 2'-O-methyladenosine-3'-phosphate
  modified_base 9: mod_base = OTHER; note = 2'-O-methylcytidine-3'-phosphate
  modified_base 10: mod_base = OTHER; note = 2'-O-methyladenosine-3'-phosphate
  modified_base 11: mod_base = OTHER; note = 2'-O-methyluridine-3'-phosphate
  modified_base 12: mod_base = OTHER; note = 2'-O-methyluridine-3'-phosphate
  modified_base 13: mod_base = OTHER; note = 2'-O-methyladenosine-3'-phosphate
  modified_base 14: mod_base = OTHER; note = 2'-fluoroadenosine-3'-phosphate
  modified_base 15: mod_base = OTHER; note = 2'-O-methyladenosine-3'-phosphate
  modified_base 16: mod_base = OTHER; note = 2'-fluoroadenosine-3'-phosphate
  modified_base 17: mod_base = OTHER; note = 2'-O-methyladenosine-3'-phosphate
  modified_base 18: mod_base = OTHER; note = 2'-O-methyladenosine-3'-phosphate
  modified_base 19: mod_base = OTHER; note = 2'-O-methyladenosine-3'-phosphate
  modified_base 20: mod_base = OTHER; note = 2'-O-methyladenosine-3'-phosphate
  modified_base 21: mod_base = OTHER; note = 2'-O-methyluridine-3'-phosphorothioate
  modified_base 22: mod_base = OTHER; note = 2'-O-methyluridine-3'-phosphorothioate
  modified_base 23: mod_base = OTHER; note = 2'-O-methyladenosine
aacttgtacattaaaaaaaatta

SEQ ID NO: 1294 - RNA, 21 nt, synthetic construct
  source 1..21: mol_type = other RNA
  modified_base 1: mod_base = OTHER; note = 2'-O-methoxyethyl(MOE)-thymidine(or 5-methyluridine)-3'- phosphorothioate
  modified_base 2: mod_base = OTHER; note = 2'-O-methoxyethyl(MOE) guanosine-3'-phosphorothioate
  modified_base 3: mod_base = OTHER; note = 2'-O-methyluridine-3'-phosphate
  modified_base 4: mod_base = OTHER; note = 2'-O-methyluridine-3'-phosphate
  modified_base 5: mod_base = OTHER; note = 2'-O-methylguanosine-3'-phosphate
  modified_base 6: mod_base = OTHER; note = 2'-O-methyluridine-3'-phosphate
  modified_base 7: mod_base = OTHER; note = 2'-fluorocytidine-3'-phosphate
  modified_base 8: mod_base = OTHER; note = 2'-O-methyladenosine-3'-phosphate
  modified_base 9: mod_base = OTHER; note = 2'-fluoroadenosine-3'-phosphate
  modified_base 10: mod_base = OTHER; note = 2'-fluoroguanosine-3'-phosphate
  modified_base 11: mod_base = OTHER; note = 2'-fluoroadenosine-3'-phosphate
  modified_base 12: mod_base = OTHER; note = 2'-O-methylcytidine-3'-phosphate
  modified_base 13: mod_base = OTHER; note = 2'-O-methyluridine-3'-phosphate
  modified_base 14: mod_base = OTHER; note = 2'-O-methyluridine-3'-phosphate
  modified_base 15: mod_base = OTHER; note = 2'-O-methyluridine-3'-phosphate
  modified_base 16: mod_base = OTHER; note = 2'-O-methyluridine-3'-phosphate
  modified_base 17: mod_base = OTHER; note = 2'-O-methyluridine-3'-phosphate
  modified_base 18: mod_base = OTHER; note = 2'-O-methylcytidine-3'-phosphate
  modified_base 19: mod_base = OTHER; note = 2'-O-methylguanosine-3'-phosphate
  modified_base 20: mod_base = OTHER; note = 2'-O-methoxyethyl(MOE) adenosine-3'-phosphate
  modified_base 21: mod_base = OTHER; note = 2'-O-methoxyethyl(MOE) adenosine
tgttgtcaagactttttcgaa

SEQ ID NO: 1295 - RNA, 21 nt, synthetic construct
  source 1..21: mol_type = other RNA
  modified_base 1: mod_base = OTHER; note = 2'-O-methoxyethyl(MOE)-thymidine(or 5-methyluridine)-3'- phosphorothioate
  modified_base 2: mod_base = OTHER; note = 2'-O-methoxyethyl(MOE)-thymidine(or 5-methyluridine)-3'- phosphorothioate
  modified_base 3: mod_base = OTHER; note = 2'-O-methylguanosine-3'-phosphate
  modified_base 4: mod_base = OTHER; note = 2'-O-methylcytidine-3'-phosphate
  modified_base 5: mod_base = OTHER; note = 2'-O-methyladenosine-3'-phosphate
  modified_base 6: mod_base = OTHER; note = 2'-O-methylguanosine-3'-phosphate
  modified_base 7: mod_base = OTHER; note = 2'-fluoroadenosine-3'-phosphate
  modified_base 8: mod_base = OTHER; note = 2'-O-methyluridine-3'-phosphate
  modified_base 9: mod_base = OTHER; note = 2'-fluoroguanosine-3'-phosphate
  modified_base 10: mod_base = OTHER; note = 2'-fluorocytidine-3'-phosphate
  modified_base 11: mod_base = OTHER; note = 2'-fluorouridine-3'-phosphate
  modified_base 12: mod_base = OTHER; note = 2'-O-methyladenosine-3'-phosphate
  modified_base 13: mod_base = OTHER; note = 2'-O-methylguanosine-3'-phosphate
  modified_base 14: mod_base = OTHER; note = 2'-O-methylguanosine-3'-phosphate
  modified_base 15: mod_base = OTHER; note = 2'-O-methyluridine-3'-phosphate
  modified_base 16: mod_base = OTHER; note = 2'-O-methylguanosine-3'-phosphate
  modified_base 17: mod_base = OTHER; note = 2'-O-methyluridine-3'-phosphate
  modified_base 18: mod_base = OTHER; note = 2'-O-methyluridine-3'-phosphate
  modified_base 19: mod_base = OTHER; note = 2'-O-methylcytidine-3'-phosphate
  modified_base 20: mod_base = OTHER; note = 2'-O-methoxyethyl(MOE) adenosine-3'-phosphate
  modified_base 21: mod_base = OTHER; note = 2'-O-methoxyethyl(MOE) adenosine
ttgcagatgctaggtgttcaa

SEQ ID NO: 1296 - RNA, 21 nt, synthetic construct
  source 1..21: mol_type = other RNA
  modified_base 1: mod_base = OTHER; note = 2'-O-methoxyethyl(MOE)-thymidine(or 5-methyluridine)-3'- phosphorothioate
  modified_base 2: mod_base = OTHER; note 2'-O-methoxyethyl(MOE)-5-methylcytidine-3'-phosphorothioate
  modified_base 3: mod_base = OTHER; note = 2'-O-methyladenosine-3'-phosphate
  modified_base 4: mod_base = OTHER; note = 2'-O-methyladenosine-3'-phosphate
  modified_base 5: mod_base = OTHER; note = 2'-O-methylguanosine-3'-phosphate
  modified_base 6: mod_base = OTHER; note = 2'-O-methyladenosine-3'-phosphate
  modified_base 7: mod_base = OTHER; note = 2'-fluorocytidine-3'-phosphate
  modified_base 8: mod_base = OTHER; note = 2'-O-methyluridine-3'-phosphate
  modified_base 9: mod_base = OTHER; note = 2'-fluorouridine-3'-phosphate
  modified_base 10: mod_base = OTHER; note = 2'-fluorouridine-3'-phosphate
  modified_base 11: mod_base = OTHER; note = 2'-fluorouridine-3'-phosphate
  modified_base 12: mod_base = OTHER; note = 2'-O-methyluridine-3'-phosphate
  modified_base 13: mod_base = OTHER; note = 2'-O-methylcytidine-3'-phosphate
  modified_base 14: mod_base = OTHER; note = 2'-O-methylguanosine-3'-phosphate
  modified_base 15: mod_base = OTHER; note = 2'-O-methyladenosine-3'-phosphate
  modified_base 16: mod_base = OTHER; note = 2'-O-methyladenosine-3'-phosphate
  modified_base 17: mod_base = OTHER; note = 2'-O-methyluridine-3'-phosphate
  modified_base 18: mod_base = OTHER; note = 2'-O-methylguanosine-3'-phosphate
  modified_base 19: mod_base = OTHER; note = 2'-O-methylcytidine-3'-phosphate
  modified_base 20: mod_base = OTHER; note = 2'-O-methoxyethyl(MOE) adenosine-3'-phosphate
  modified_base 21: mod_base = OTHER; note = 2'-O-methoxyethyl(MOE) adenosine
tcaagactttttcgaatgcaa

SEQ ID NO: 1297 - RNA, 21 nt, synthetic construct
  source 1..21: mol_type = other RNA
  modified_base 1: mod_base = OTHER; note = 2'-O-methoxyethyl(MOE)-thymidine(or 5-methyluridine)-3'- phosphorothioate
  modified_base 2: mod_base = OTHER; note = 2'-O-methoxyethyl(MOE)-thymidine(or 5-methyluridine)-3'- phosphorothioate
  modified_base 3: mod_base = OTHER; note = 2'-O-methylguanosine-3'-phosphate
  modified_base 4: mod_base = OTHER; note = 2'-O-methylcytidine-3'-phosphate
  modified_base 5: mod_base = OTHER; note = 2'-O-methyladenosine-3'-phosphate
  modified_base 6: mod_base = OTHER; note = 2'-O-methylguanosine-3'-phosphate
  modified_base 7: mod_base = OTHER; note = 2'-fluoroadenosine-3'-phosphate
  modified_base 8: mod_base = OTHER; note = 2'-O-methyluridine-3'-phosphate
  modified_base 9: mod_base = OTHER; note = 2'-fluoroguanosine-3'-phosphate
  modified_base 10: mod_base = OTHER; note = 2'-fluorocytidine-3'-phosphate
  modified_base 11: mod_base = OTHER; note = 2'-fluorouridine-3'-phosphate
  modified_base 12: mod_base = OTHER; note = 2'-O-methyladenosine-3'-phosphate
  modified_base 13: mod_base = OTHER; note = 2'-O-methylguanosine-3'-phosphate
  modified_base 14: mod_base = OTHER; note = 2'-O-methylguanosine-3'-phosphate
  modified_base 15: mod_base = OTHER; note = 2'-O-methyluridine-3'-phosphate
  modified_base 16: mod_base = OTHER; note = 2'-O-methylguanosine-3'-phosphate
  modified_base 17: mod_base = OTHER; note = 2'-O-methyluridine-3'-phosphate
  modified_base 18: mod_base = OTHER; note = 2'-O-methyluridine-3'-phosphate
  modified_base 19: mod_base = OTHER; note = 2'-O-methylcytidine-3'-phosphate
  modified_base 20: mod_base = OTHER; note = 2'-O-methoxyethyl(MOE) adenosine-3'-phosphate
  modified_base 21: mod_base = OTHER; note = 2'-O-methoxyethyl(MOE)-thymidine(or 5-methyluridine)
ttgcagatgctaggtgttcat

SEQ ID NO: 1298 - RNA, 23 nt, synthetic construct
  source 1..23: mol_type = other RNA
  modified_base 1: mod_base = OTHER; note 5'-(E)-vinylphosphonate-2'-O-methyluridine-3'-phosphorothio ate
  modified_base 2: mod_base = OTHER; note = 2'-fluorouridine-3'-phosphorothioate
  modified_base 3: mod_base = OTHER; note = 2'-O-methylcytidine-3'-phosphate
  modified_base 4: mod_base = OTHER; note = 2'-O-methylguanosine-3'-phosphate
  modified_base 5: mod_base = OTHER; note = 2'-O-methyladenosine-3'-phosphate
  modified_base 6: mod_base = OTHER; note = 2'-fluoroadenosine-3'-phosphate
  modified_base 7: mod_base = OTHER; note = 2'-O-methyladenosine-3'-phosphate
  modified_base 8: mod_base = OTHER; note = 2'-O-methyladenosine-3'-phosphate
  modified_base 9: mod_base = OTHER; note = 2'-O-methyladenosine-3'-phosphate
  modified_base 10: mod_base = OTHER; note = 2'-O-methylguanosine-3'-phosphate
  modified_base 11: mod_base = OTHER; note = 2'-O-methyluridine-3'-phosphate
  modified_base 12: mod_base = OTHER; note = 2'-O-methylcytidine-3'-phosphate
  modified_base 13: mod_base = OTHER; note = 2'-O-methyluridine-3'-phosphate
  modified_base 14: mod_base = OTHER; note = 2'-fluorouridine-3'-phosphate
  modified_base 15: mod_base = OTHER; note = 2'-O-methylguanosine-3'-phosphate
  modified_base 16: mod_base = OTHER; note = 2'-fluoroadenosine-3'-phosphate
  modified_base 17: mod_base = OTHER; note = 2'-O-methylcytidine-3'-phosphate
  modified_base 18: mod_base = OTHER; note = 2'-O-methyladenosine-3'-phosphate
  modified_base 19: mod_base = OTHER; note = 2'-O-methyladenosine-3'-phosphate
  modified_base 20: mod_base = OTHER; note = 2'-O-methylcytidine-3'-phosphate
  modified_base 21: mod_base = OTHER; note = 2'-O-methyladenosine-3'-phosphorothioate
  modified_base 22: mod_base = OTHER; note = 2'-O-methyluridine-3'-phosphorothioate
  modified_base 23: mod_base = OTHER; note = 2'-O-methyluridine
ttcgaaaaagtcttgacaacatt

SEQ ID NO: 1299 - RNA, 23 nt, synthetic construct
  source 1..23: mol_type = other RNA
  modified_base 1: mod_base = OTHER; note 5'-(E)-vinylphosphonate-2'-O-methyluridine-3'-phosphorothio ate
  modified_base 2: mod_base = OTHER; note = 2'-fluorouridine-3'-phosphorothioate
  modified_base 3: mod_base = OTHER; note = 2'-O-methylguanosine-3'-phosphate
  modified_base 4: mod_base = OTHER; note = 2'-O-methyladenosine-3'-phosphate
  modified_base 5: mod_base = OTHER; note = 2'-O-methyladenosine-3'-phosphate
  modified_base 6: mod_base = OTHER; note = 2'-fluorocytidine-3'-phosphate
  modified_base 7: mod_base = OTHER; note = 2'-O-methyladenosine-3'-phosphate
  modified_base 8: mod_base = OTHER; note = 2'-O-methylcytidine-3'-phosphate
  modified_base 9: mod_base = OTHER; note = 2'-O-methylcytidine-3'-phosphate
  modified_base 10: mod_base = OTHER; note = 2'-O-methyluridine-3'-phosphate
  modified_base 11: mod_base = OTHER; note = 2'-O-methyladenosine-3'-phosphate
  modified_base 12: mod_base = OTHER; note = 2'-O-methylguanosine-3'-phosphate
  modified_base 13: mod_base = OTHER; note = 2'-O-methylcytidine-3'-phosphate
  modified_base 14: mod_base = OTHER; note = 2'-fluoroadenosine-3'-phosphate
  modified_base 15: mod_base = OTHER; note = 2'-O-methyluridine-3'-phosphate
  modified_base 16: mod_base = OTHER; note = 2'-fluorocytidine-3'-phosphate
  modified_base 17: mod_base = OTHER; note = 2'-O-methyluridine-3'-phosphate
  modified_base 18: mod_base = OTHER; note = 2'-O-methylguanosine-3'-phosphate
  modified_base 19: mod_base = OTHER; note = 2'-O-methylcytidine-3'-phosphate
  modified_base 20: mod_base = OTHER; note = 2'-O-methyladenosine-3'-phosphate
  modified_base 21: mod_base = OTHER; note = 2'-O-methyladenosine-3'-phosphorothioate
  modified_base 22: mod_base = OTHER; note = 2'-O-methyladenosine-3'-phosphorothioate
  modified_base 23: mod_base = OTHER; note = 2'-O-methylcytidine
ttgaacacctagcatctgcaaac

SEQ ID NO: 1300 - RNA, 23 nt, synthetic construct
  source 1..23: mol_type = other RNA
  modified_base 1: mod_base = OTHER; note 5'-(E)-vinylphosphonate-2'-O-methyluridine-3'-phosphorothio ate
  modified_base 2: mod_base = OTHER; note = 2'-fluorouridine-3'-phosphorothioate
  modified_base 3: mod_base = OTHER; note = 2'-O-methylguanosine-3'-phosphate
  modified_base 4: mod_base = OTHER; note = 2'-O-methylcytidine-3'-phosphate
  modified_base 5: mod_base = OTHER; note = adenine glycol nucleic acid-2'-phosphate
  modified_base 6: mod_base = OTHER; note = 2'-O-methyluridine-3'-phosphate
  modified_base 7: mod_base = OTHER; note = 2'-O-methyluridine-3'-phosphate
  modified_base 8: mod_base = OTHER; note = 2'-O-methylcytidine-3'-phosphate
  modified_base 9: mod_base = OTHER; note = 2'-O-methylguanosine-3'-phosphate
  modified_base 10: mod_base = OTHER; note = 2'-O-methyladenosine-3'-phosphate
  modified_base 11: mod_base = OTHER; note = 2'-O-methyladenosine-3'-phosphate
  modified_base 12: mod_base = OTHER; note = 2'-O-methyladenosine-3'-phosphate
  modified_base 13: mod_base = OTHER; note = 2'-O-methyladenosine-3'-phosphate
  modified_base 14: mod_base = OTHER; note = 2'-fluoroadenosine-3'-phosphate
  modified_base 15: mod_base = OTHER; note = 2'-O-methylguanosine-3'-phosphate
  modified_base 16: mod_base = OTHER; note = 2'-fluorouridine-3'-phosphate
  modified_base 17: mod_base = OTHER; note = 2'-O-methylcytidine-3'-phosphate
  modified_base 18: mod_base = OTHER; note = 2'-O-methyluridine-3'-phosphate
  modified_base 19: mod_base = OTHER; note = 2'-O-methyluridine-3'-phosphate
  modified_base 20: mod_base = OTHER; note = 2'-O-methylguanosine-3'-phosphate
  modified_base 21: mod_base = OTHER; note = 2'-O-methyladenosine-3'-phosphorothioate
  modified_base 22: mod_base = OTHER; note = 2'-O-methylcytidine-3'-phosphorothioate
  modified_base 23: mod_base = OTHER; note = 2'-O-methyladenosine
ttgcattcgaaaaagtcttgaca

SEQ ID NO: 1301 - RNA, 23 nt, synthetic construct
  source 1..23: mol_type = other RNA
  modified_base 1: mod_base = OTHER; note = 2'-O-methyladenosine-3'-phosphorothioate
  modified_base 2: mod_base = OTHER; note = 2'-fluorouridine-3'-phosphorothioate
  modified_base 3: mod_base = OTHER; note = 2'-O-methylguanosine-3'-phosphate
  modified_base 4: mod_base = OTHER; note = 2'-O-methyladenosine-3'-phosphate
  modified_base 5: mod_base = OTHER; note = 2'-O-methyladenosine-3'-phosphate
  modified_base 6: mod_base = OTHER; note = 2'-fluorocytidine-3'-phosphate
  modified_base 7: mod_base = OTHER; note = 2'-O-methyladenosine-3'-phosphate
  modified_base 8: mod_base = OTHER; note = 2'-O-methylcytidine-3'-phosphate
  modified_base 9: mod_base = OTHER; note = 2'-O-methylcytidine-3'-phosphate
  modified_base 10: mod_base = OTHER; note = 2'-O-methyluridine-3'-phosphate
  modified_base 11: mod_base = OTHER; note = 2'-O-methyladenosine-3'-phosphate
  modified_base 12: mod_base = OTHER; note = 2'-O-methylguanosine-3'-phosphate
  modified_base 13: mod_base = OTHER; note = 2'-O-methylcytidine-3'-phosphate
  modified_base 14: mod_base = OTHER; note = 2'-fluoroadenosine-3'-phosphate
  modified_base 15: mod_base = OTHER; note = 2'-O-methyluridine-3'-phosphate
  modified_base 16: mod_base = OTHER; note = 2'-fluorocytidine-3'-phosphate
  modified_base 17: mod_base = OTHER; note = 2'-O-methyluridine-3'-phosphate
  modified_base 18: mod_base = OTHER; note = 2'-O-methylguanosine-3'-phosphate
  modified_base 19: mod_base = OTHER; note = 2'-O-methylcytidine-3'-phosphate
  modified_base 20: mod_base = OTHER; note = 2'-O-methyladenosine-3'-phosphate
  modified_base 21: mod_base = OTHER; note = 2'-O-methyladenosine-3'-phosphorothioate
  modified_base 22: mod_base = OTHER; note = 2'-O-methyladenosine-3'-phosphorothioate
  modified_base 23: mod_base = OTHER; note = 2'-O-methylcytidine
atgaacacctagcatctgcaaac

SEQ ID NO: 1302 - RNA, 21 nt, synthetic construct
  source 1..21: mol_type = other RNA
  modified_base 1: mod_base = OTHER; note = 2'-O-methoxyethyl(MOE)-thymidine(or 5-methyluridine)-3'- phosphorothioate
  modified_base 2: mod_base = OTHER; note = 2'-O-methoxyethyl(MOE) guanosine-3'-phosphorothioate
  modified_base 3: mod_base = OTHER; note = 2'-O-methyluridine-3'-phosphate
  modified_base 4: mod_base = OTHER; note = 2'-O-methyluridine-3'-phosphate
  modified_base 5: mod_base = OTHER; note = 2'-O-methylguanosine-3'-phosphate
  modified_base 6: mod_base = OTHER; note = 2'-O-methyluridine-3'-phosphate
  modified_base 7: mod_base = OTHER; note = 2'-fluorocytidine-3'-phosphate
  modified_base 8: mod_base = OTHER; note = 2'-O-methyladenosine-3'-phosphate
  modified_base 9: mod_base = OTHER; note = 2'-fluoroadenosine-3'-phosphate
  modified_base 10: mod_base = OTHER; note = 2'-fluoroguanosine-3'-phosphate
  modified_base 11: mod_base = OTHER; note = 2'-fluoroadenosine-3'-phosphate
  modified_base 12: mod_base = OTHER; note = 2'-O-methylcytidine-3'-phosphate
  modified_base 13: mod_base = OTHER; note = 2'-O-methyluridine-3'-phosphate
  modified_base 14: mod_base = OTHER; note = 2'-O-methyluridine-3'-phosphate
  modified_base 15: mod_base = OTHER; note = 2'-O-methyluridine-3'-phosphate
  modified_base 16: mod_base = OTHER; note = 2'-O-methyluridine-3'-phosphate
  modified_base 17: mod_base = OTHER; note = 2'-O-methyluridine-3'-phosphate
  modified_base 18: mod_base = OTHER; note = 2'-O-methylcytidine-3'-phosphate
  modified_base 19: mod_base = OTHER; note = 2'-O-methylguanosine-3'-phosphate
  modified_base 20: mod_base = OTHER; note = 2'-O-methoxyethyl(MOE) adenosine-3'-phosphate
  modified_base 21: mod_base = OTHER; note = 2'-O-methoxyethyl(MOE) adenosine-3'-phosphate-N-[tris(GalNAc-alkyl)-amidodecanoyl) ]-4-hydroxyprolinol (Hyp-(GalNAc-alkyl)3)
tgttgtcaagactttttcgaa

SEQ ID NO: 1303 - RNA, 21 nt, synthetic construct
  source 1..21: mol_type = other RNA
  modified_base 1: mod_base = OTHER; note = 2'-O-methoxyethyl(MOE)-thymidine(or 5-methyluridine)-3'- phosphorothioate
  modified_base 2: mod_base = OTHER; note = 2'-O-methoxyethyl(MOE)-thymidine(or 5-methyluridine)-3'- phosphorothioate
  modified_base 3: mod_base = OTHER; note = 2'-O-methylguanosine-3'-phosphate
  modified_base 4: mod_base = OTHER; note = 2'-O-methylcytidine-3'-phosphate
  modified_base 5: mod_base = OTHER; note = 2'-O-methyladenosine-3'-phosphate
  modified_base 6: mod_base = OTHER; note = 2'-O-methylguanosine-3'-phosphate
  modified_base 7: mod_base = OTHER; note = 2'-fluoroadenosine-3'-phosphate
  modified_base 8: mod_base = OTHER; note = 2'-O-methyluridine-3'-phosphate
  modified_base 9: mod_base = OTHER; note = 2'-fluoroguanosine-3'-phosphate
  modified_base 10: mod_base = OTHER; note = 2'-fluorocytidine-3'-phosphate
  modified_base 11: mod_base = OTHER; note = 2'-fluorouridine-3'-phosphate
  modified_base 12: mod_base = OTHER; note = 2'-O-methyladenosine-3'-phosphate
  modified_base 13: mod_base = OTHER; note = 2'-O-methylguanosine-3'-phosphate
  modified_base 14: mod_base = OTHER; note = 2'-O-methylguanosine-3'-phosphate
  modified_base 15: mod_base = OTHER; note = 2'-O-methyluridine-3'-phosphate
  modified_base 16: mod_base = OTHER; note = 2'-O-methylguanosine-3'-phosphate
  modified_base 17: mod_base = OTHER; note = 2'-O-methyluridine-3'-phosphate
  modified_base 18: mod_base = OTHER; note = 2'-O-methyluridine-3'-phosphate
  modified_base 19: mod_base = OTHER; note = 2'-O-methylcytidine-3'-phosphate
  modified_base 20: mod_base = OTHER; note = 2'-O-methoxyethyl(MOE) adenosine-3'-phosphate
  modified_base 21: mod_base = OTHER; note = 2'-O-methoxyethyl(MOE) adenosine-3'-phosphate-N-[tris(GalNAc-alkyl)-amidodecanoyl) ]-4-hydroxyprolinol (Hyp-(GalNAc-alkyl)3)
ttgcagatgctaggtgttcaa

SEQ ID NO: 1304 - RNA, 21 nt, synthetic construct
  source 1..21: mol_type = other RNA
  modified_base 1: mod_base = OTHER; note = 2'-O-methoxyethyl(MOE)-thymidine(or 5-methyluridine)-3'- phosphorothioate
  modified_base 2: mod_base = OTHER; note 2'-O-methoxyethyl(MOE)-5-methylcytidine-3'-phosphorothioate
  modified_base 3: mod_base = OTHER; note = 2'-O-methyladenosine-3'-phosphate
  modified_base 4: mod_base = OTHER; note = 2'-O-methyladenosine-3'-phosphate
  modified_base 5: mod_base = OTHER; note = 2'-O-methylguanosine-3'-phosphate
  modified_base 6: mod_base = OTHER; note = 2'-O-methyladenosine-3'-phosphate
  modified_base 7: mod_base = OTHER; note = 2'-fluorocytidine-3'-phosphate
  modified_base 8: mod_base = OTHER; note = 2'-O-methyluridine-3'-phosphate
  modified_base 9: mod_base = OTHER; note = 2'-fluorouridine-3'-phosphate
  modified_base 10: mod_base = OTHER; note = 2'-fluorouridine-3'-phosphate
  modified_base 11: mod_base = OTHER; note = 2'-fluorouridine-3'-phosphate
  modified_base 12: mod_base = OTHER; note = 2'-O-methyluridine-3'-phosphate
  modified_base 13: mod_base = OTHER; note = 2'-O-methylcytidine-3'-phosphate
  modified_base 14: mod_base = OTHER; note = 2'-O-methylguanosine-3'-phosphate
  modified_base 15: mod_base = OTHER; note = 2'-O-methyladenosine-3'-phosphate
  modified_base 16: mod_base = OTHER; note = 2'-O-methyladenosine-3'-phosphate
  modified_base 17: mod_base = OTHER; note = 2'-O-methyluridine-3'-phosphate
  modified_base 18: mod_base = OTHER; note = 2'-O-methylguanosine-3'-phosphate
  modified_base 19: mod_base = OTHER; note = 2'-O-methylcytidine-3'-phosphate
  modified_base 20: mod_base = OTHER; note = 2'-O-methoxyethyl(MOE) adenosine-3'-phosphate
  modified_base 21: mod_base = OTHER; note = 2'-O-methoxyethyl(MOE) adenosine-3'-phosphate-N-[tris(GalNAc-alkyl)-amidodecanoyl) ]-4-hydroxyprolinol (Hyp-(GalNAc-alkyl)3)
tcaagactttttcgaatgcaa

SEQ ID NO: 1305 - RNA, 21 nt, synthetic construct
  source 1..21: mol_type = other RNA
  modified_base 1: mod_base = OTHER; note = 2'-O-methoxyethyl(MOE)-thymidine(or 5-methyluridine)-3'- phosphorothioate
  modified_base 2: mod_base = OTHER; note = 2'-O-methoxyethyl(MOE)-thymidine(or 5-methyluridine)-3'- phosphorothioate
  modified_base 3: mod_base = OTHER; note = 2'-O-methylguanosine-3'-phosphate
  modified_base 4: mod_base = OTHER; note = 2'-O-methylcytidine-3'-phosphate
  modified_base 5: mod_base = OTHER; note = 2'-O-methyladenosine-3'-phosphate
  modified_base 6: mod_base = OTHER; note = 2'-O-methylguanosine-3'-phosphate
  modified_base 7: mod_base = OTHER; note = 2'-fluoroadenosine-3'-phosphate
  modified_base 8: mod_base = OTHER; note = 2'-O-methyluridine-3'-phosphate
  modified_base 9: mod_base = OTHER; note = 2'-fluoroguanosine-3'-phosphate
  modified_base 10: mod_base = OTHER; note = 2'-fluorocytidine-3'-phosphate
  modified_base 11: mod_base = OTHER; note = 2'-fluorouridine-3'-phosphate
  modified_base 12: mod_base = OTHER; note = 2'-O-methyladenosine-3'-phosphate
  modified_base 13: mod_base = OTHER; note = 2'-O-methylguanosine-3'-phosphate
  modified_base 14: mod_base = OTHER; note = 2'-O-methylguanosine-3'-phosphate
  modified_base 15: mod_base = OTHER; note = 2'-O-methyluridine-3'-phosphate
  modified_base 16: mod_base = OTHER; note = 2'-O-methylguanosine-3'-phosphate
  modified_base 17: mod_base = OTHER; note = 2'-O-methyluridine-3'-phosphate
  modified_base 18: mod_base = OTHER; note = 2'-O-methyluridine-3'-phosphate
  modified_base 19: mod_base = OTHER; note = 2'-O-methylcytidine-3'-phosphate
  modified_base 20: mod_base = OTHER; note = 2'-O-methoxyethyl(MOE) adenosine-3'-phosphate
  modified_base 21: mod_base = OTHER; note = 2'-O-methoxyethyl(MOE)-thymidine(or 5-methyluridine)-3'-phosphate-N-[tris(GalNAc-alkyl)-amidode canoyl)]-4-hydroxyprolinol (Hyp-(GalNAc-alkyl)3)
ttgcagatgctaggtgttcat

SEQ ID NO: 1306 - RNA, 23 nt, synthetic construct
  source 1..23: mol_type = other RNA
  modified_base 1: mod_base = OTHER; note 5'-(E)-vinylphosphonate-2'-O-methyluridine-3'-phosphorothio ate
  modified_base 2: mod_base = OTHER; note = 2'-fluorouridine-3'-phosphorothioate
  modified_base 3: mod_base = OTHER; note = 2'-O-methylcytidine-3'-phosphate
  modified_base 4: mod_base = OTHER; note = 2'-O-methylguanosine-3'-phosphate
  modified_base 5: mod_base = OTHER; note = 2'-O-methyladenosine-3'-phosphate
  modified_base 6: mod_base = OTHER; note = 2'-fluoroadenosine-3'-phosphate
  modified_base 7: mod_base = OTHER; note = 2'-O-methyladenosine-3'-phosphate
  modified_base 8: mod_base = OTHER; note = 2'-O-methyladenosine-3'-phosphate
  modified_base 9: mod_base = OTHER; note = 2'-O-methyladenosine-3'-phosphate
  modified_base 10: mod_base = OTHER; note = 2'-O-methylguanosine-3'-phosphate
  modified_base 11: mod_base = OTHER; note = 2'-O-methyluridine-3'-phosphate
  modified_base 12: mod_base = OTHER; note = 2'-O-methylcytidine-3'-phosphate
  modified_base 13: mod_base = OTHER; note = 2'-O-methyluridine-3'-phosphate
  modified_base 14: mod_base = OTHER; note = 2'-fluorouridine-3'-phosphate
  modified_base 15: mod_base = OTHER; note = 2'-O-methylguanosine-3'-phosphate
  modified_base 16: mod_base = OTHER; note = 2'-fluoroadenosine-3'-phosphate
  modified_base 17: mod_base = OTHER; note = 2'-O-methylcytidine-3'-phosphate
  modified_base 18: mod_base = OTHER; note = 2'-O-methyladenosine-3'-phosphate
  modified_base 19: mod_base = OTHER; note = 2'-O-methyladenosine-3'-phosphate
  modified_base 20: mod_base = OTHER; note = 2'-O-methylcytidine-3'-phosphate
  modified_base 21: mod_base = OTHER; note = 2'-O-methyladenosine-3'-phosphorothioate
  modified_base 22: mod_base = OTHER; note = 2'-O-methyluridine-3'-phosphorothioate
  modified_base 23: mod_base = OTHER; note = 2'-O-methyluridine
ttcgaaaaagtcttgacaacatt

SEQ ID NO: 1307 - RNA, 23 nt, synthetic construct
  source 1..23: mol_type = other RNA
  modified_base 1: mod_base = OTHER; note 5'-(E)-vinylphosphonate-2'-O-methyluridine-3'-phosphorothio ate
  modified_base 2: mod_base = OTHER; note = 2'-fluorouridine-3'-phosphorothioate
  modified_base 3: mod_base = OTHER; note = 2'-O-methylguanosine-3'-phosphate
  modified_base 4: mod_base = OTHER; note = 2'-O-methyladenosine-3'-phosphate
  modified_base 5: mod_base = OTHER; note = 2'-O-methyladenosine-3'-phosphate
  modified_base 6: mod_base = OTHER; note = 2'-fluorocytidine-3'-phosphate
  modified_base 7: mod_base = OTHER; note = 2'-O-methyladenosine-3'-phosphate
  modified_base 8: mod_base = OTHER; note = 2'-O-methylcytidine-3'-phosphate
  modified_base 9: mod_base = OTHER; note = 2'-O-methylcytidine-3'-phosphate
  modified_base 10: mod_base = OTHER; note = 2'-O-methyluridine-3'-phosphate
  modified_base 11: mod_base = OTHER; note = 2'-O-methyladenosine-3'-phosphate
  modified_base 12: mod_base = OTHER; note = 2'-O-methylguanosine-3'-phosphate
  modified_base 13: mod_base = OTHER; note = 2'-O-methylcytidine-3'-phosphate
  modified_base 14: mod_base = OTHER; note = 2'-fluoroadenosine-3'-phosphate
  modified_base 15: mod_base = OTHER; note = 2'-O-methyluridine-3'-phosphate
  modified_base 16: mod_base = OTHER; note = 2'-fluorocytidine-3'-phosphate
  modified_base 17: mod_base = OTHER; note = 2'-O-methyluridine-3'-phosphate
  modified_base 18: mod_base = OTHER; note = 2'-O-methylguanosine-3'-phosphate
  modified_base 19: mod_base = OTHER; note = 2'-O-methylcytidine-3'-phosphate
  modified_base 20: mod_base = OTHER; note = 2'-O-methyladenosine-3'-phosphate
  modified_base 21: mod_base = OTHER; note = 2'-O-methyladenosine-3'-phosphorothioate
  modified_base 22: mod_base = OTHER; note = 2'-O-methyladenosine-3'-phosphorothioate
  modified_base 23: mod_base = OTHER; note = 2'-O-methylcytidine
ttgaacacctagcatctgcaaac

SEQ ID NO: 1308 - RNA, 23 nt, synthetic construct
  source 1..23: mol_type = other RNA
  modified_base 1: mod_base = OTHER; note 5'-(E)-vinylphosphonate-2'-O-methyluridine-3'-phosphorothio ate
  modified_base 2: mod_base = OTHER; note = 2'-fluorouridine-3'-phosphorothioate
  modified_base 3: mod_base = OTHER; note = 2'-O-methylguanosine-3'-phosphate
  modified_base 4: mod_base = OTHER; note = 2'-O-methylcytidine-3'-phosphate
  modified_base 5: mod_base = OTHER; note = adenine glycol nucleic acid-2'-phosphate
  modified_base 6: mod_base = OTHER; note = 2'-O-methyluridine-3'-phosphate
  modified_base 7: mod_base = OTHER; note = 2'-O-methyluridine-3'-phosphate
  modified_base 8: mod_base = OTHER; note = 2'-O-methylcytidine-3'-phosphate
  modified_base 9: mod_base = OTHER; note = 2'-O-methylguanosine-3'-phosphate
  modified_base 10: mod_base = OTHER; note = 2'-O-methyladenosine-3'-phosphate
  modified_base 11: mod_base = OTHER; note = 2'-O-methyladenosine-3'-phosphate
  modified_base 12: mod_base = OTHER; note = 2'-O-methyladenosine-3'-phosphate
  modified_base 13: mod_base = OTHER; note = 2'-O-methyladenosine-3'-phosphate
  modified_base 14: mod_base = OTHER; note = 2'-fluoroadenosine-3'-phosphate
  modified_base 15: mod_base = OTHER; note = 2'-O-methylguanosine-3'-phosphate
  modified_base 16: mod_base = OTHER; note = 2'-fluorouridine-3'-phosphate
  modified_base 17: mod_base = OTHER; note = 2'-O-methylcytidine-3'-phosphate
  modified_base 18: mod_base = OTHER; note = 2'-O-methyluridine-3'-phosphate
  modified_base 19: mod_base = OTHER; note = 2'-O-methyluridine-3'-phosphate
  modified_base 20: mod_base = OTHER; note = 2'-O-methylguanosine-3'-phosphate
  modified_base 21: mod_base = OTHER; note = 2'-O-methyladenosine-3'-phosphorothioate
  modified_base 22: mod_base = OTHER; note = 2'-O-methylcytidine-3'-phosphorothioate
  modified_base 23: mod_base = OTHER; note = 2'-O-methyladenosine
ttgcattcgaaaaagtcttgaca

SEQ ID NO: 1309 - RNA, 23 nt, synthetic construct
  source 1..23: mol_type = other RNA
  modified_base 1: mod_base = OTHER; note = 2'-O-methyladenosine-3'-phosphorothioate
  modified_base 2: mod_base = OTHER; note = 2'-fluorouridine-3'-phosphorothioate
  modified_base 3: mod_base = OTHER; note = 2'-O-methylguanosine-3'-phosphate
  modified_base 4: mod_base = OTHER; note = 2'-O-methyladenosine-3'-phosphate
  modified_base 5: mod_base = OTHER; note = 2'-O-methyladenosine-3'-phosphate
  modified_base 6: mod_base = OTHER; note = 2'-fluorocytidine-3'-phosphate
  modified_base 7: mod_base = OTHER; note = 2'-O-methyladenosine-3'-phosphate
  modified_base 8: mod_base = OTHER; note = 2'-O-methylcytidine-3'-phosphate
  modified_base 9: mod_base = OTHER; note = 2'-O-methylcytidine-3'-phosphate
  modified_base 10: mod_base = OTHER; note = 2'-O-methyluridine-3'-phosphate
  modified_base 11: mod_base = OTHER; note = 2'-O-methyladenosine-3'-phosphate
  modified_base 12: mod_base = OTHER; note = 2'-O-methylguanosine-3'-phosphate
  modified_base 13: mod_base = OTHER; note = 2'-O-methylcytidine-3'-phosphate
  modified_base 14: mod_base = OTHER; note = 2'-fluoroadenosine-3'-phosphate
  modified_base 15: mod_base = OTHER; note = 2'-O-methyluridine-3'-phosphate
  modified_base 16: mod_base = OTHER; note = 2'-fluorocytidine-3'-phosphate
  modified_base 17: mod_base = OTHER; note = 2'-O-methyluridine-3'-phosphate
  modified_base 18: mod_base = OTHER; note = 2'-O-methylguanosine-3'-phosphate
  modified_base 19: mod_base = OTHER; note = 2'-O-methylcytidine-3'-phosphate
  modified_base 20: mod_base = OTHER; note = 2'-O-methyladenosine-3'-phosphate
  modified_base 21: mod_base = OTHER; note = 2'-O-methyladenosine-3'-phosphorothioate
  modified_base 22: mod_base = OTHER; note = 2'-O-methyladenosine-3'-phosphorothioate
  modified_base 23: mod_base = OTHER; note = 2'-O-methylcytidine
atgaacacctagcatctgcaaac

SEQ ID NO: 1310 - RNA, 19 nt, synthetic construct
  source 1..19: mol_type = other RNA
  modified_base 1: mod_base = OTHER; note = 2'-fluorouridine-3'-phosphorothioate
  modified_base 2: mod_base = OTHER; note = 2'-O-methyluridine-3'-phosphorothioate
  modified_base 3: mod_base = OTHER; note = 2'-fluoroguanosine-3'-phosphate
  modified_base 4: mod_base = OTHER; note = 2'-O-methyluridine-3'-phosphate
  modified_base 5: mod_base = OTHER; note = 2'-fluorocytidine-3'-phosphate
  modified_base 6: mod_base = OTHER; note = 2'-O-methyladenosine-3'-phosphate
  modified_base 7: mod_base = OTHER; note = 2'-fluoroadenosine-3'-phosphate
  modified_base 8: mod_base = OTHER; note = 2'-O-methylguanosine-3'-phosphate
  modified_base 9: mod_base = OTHER; note = 2'-fluoroadenosine-3'-phosphate
  modified_base 10: mod_base = OTHER; note = 2'-O-methylcytidine-3'-phosphate
  modified_base 11: mod_base = OTHER; note = 2'-fluorouridine-3'-phosphate
  modified_base 12: mod_base = OTHER; note = 2'-O-methyluridine-3'-phosphate
  modified_base 13: mod_base = OTHER; note = 2'-fluorouridine-3'-phosphate
  modified_base 14: mod_base = OTHER; note = 2'-O-methyluridine-3'-phosphate
  modified_base 15: mod_base = OTHER; note = 2'-fluorouridine-3'-phosphate
  modified_base 16: mod_base = OTHER; note = 2'-O-methylcytidine-3'-phosphate
  modified_base 17: mod_base = OTHER; note = 2'-fluoroguanosine-3'-phosphate
  modified_base 18: mod_base = OTHER; note = 2'-O-methyladenosine-3'-phosphate
  modified_base 19: mod_base = OTHER; note 2'-fluoroadenosine-3'-phosphate-(N1-hydroxyethanol-N12[tris (GalNAc-triethyleneglycol)]-diamidodecane]
ttgtcaagactttttcgaa

SEQ ID NO: 1311 - RNA, 19 nt, synthetic construct
  source 1..19: mol_type = other RNA
  modified_base 1: mod_base = OTHER; note = 2'-fluoroguanosine-3'-phosphorothioate
  modified_base 2: mod_base = OTHER; note = 2'-O-methyladenosine-3'-phosphorothioate
  modified_base 3: mod_base = OTHER; note = 2'-fluorouridine-3'-phosphate
  modified_base 4: mod_base = OTHER; note = 2'-O-methyluridine-3'-phosphate
  modified_base 5: mod_base = OTHER; note = 2'-fluoroguanosine-3'-phosphate
  modified_base 6: mod_base = OTHER; note = 2'-O-methylguanosine-3'-phosphate
  modified_base 7: mod_base = OTHER; note = 2'-fluorocytidine-3'-phosphate
  modified_base 8: mod_base = OTHER; note = 2'-O-methyluridine-3'-phosphate
  modified_base 9: mod_base = OTHER; note = 2'-fluoroadenosine-3'-phosphate
  modified_base 10: mod_base = OTHER; note = 2'-O-methyluridine-3'-phosphate
  modified_base 11: mod_base = OTHER; note = 2'-fluoroadenosine-3'-phosphate
  modified_base 12: mod_base = OTHER; note = 2'-O-methyladenosine-3'-phosphate
  modified_base 13: mod_base = OTHER; note = 2'-fluorocytidine-3'-phosphate
  modified_base 14: mod_base = OTHER; note = 2'-O-methyladenosine-3'-phosphate
  modified_base 15: mod_base = OTHER; note = 2'-fluorouridine-3'-phosphate
  modified_base 16: mod_base = OTHER; note = 2'-O-methylguanosine-3'-phosphate
  modified_base 17: mod_base = OTHER; note = 2'-fluorouridine-3'-phosphate
  modified_base 18: mod_base = OTHER; note = 2'-O-methylcytidine-3'-phosphate
  modified_base 19: mod_base = OTHER; note 2'-fluorouridine-3'-phosphate-(N1-hydroxyethanol-N12[tris(G alNAc-triethyleneglycol)]-diamidodecane]
gattggctataacatgtct

SEQ ID NO: 1312 - RNA, 19 nt, synthetic construct
  source 1..19: mol_type = other RNA
  modified_base 1: mod_base = OTHER; note = 2'-fluoroguanosine-3'-phosphorothioate
  modified_base 2: mod_base = OTHER; note = 2'-O-methyladenosine-3'-phosphorothioate
  modified_base 3: mod_base = OTHER; note = 2'-fluoroadenosine-3'-phosphate
  modified_base 4: mod_base = OTHER; note = 2'-O-methylguanosine-3'-phosphate
  modified_base 5: mod_base = OTHER; note = 2'-fluoroguanosine-3'-phosphate
  modified_base 6: mod_base = OTHER; note = 2'-O-methylguanosine-3'-phosphate
  modified_base 7: mod_base = OTHER; note = 2'-fluorouridine-3'-phosphate
  modified_base 8: mod_base = OTHER; note = 2'-O-methyluridine-3'-phosphate
  modified_base 9: mod_base = OTHER; note = 2'-fluorocytidine-3'-phosphate
  modified_base 10: mod_base = OTHER; note = 2'-O-methylguanosine-3'-phosphate
  modified_base 11: mod_base = OTHER; note = 2'-fluorocytidine-3'-phosphate
  modified_base 12: mod_base = OTHER; note = 2'-O-methyladenosine-3'-phosphate
  modified_base 13: mod_base = OTHER; note = 2'-fluoroguanosine-3'-phosphate
  modified_base 14: mod_base = OTHER; note = 2'-O-methyluridine-3'-phosphate
  modified_base 15: mod_base = OTHER; note = 2'-fluoroguanosine-3'-phosphate
  modified_base 16: mod_base = OTHER; note = 2'-O-methyladenosine-3'-phosphate
  modified_base 17: mod_base = OTHER; note = 2'-fluorouridine-3'-phosphate
  modified_base 18: mod_base = OTHER; note = 2'-O-methyladenosine-3'-phosphate
  modified_base 19: mod_base = OTHER; note 2'-fluoroadenosine-3'-phosphate-(N1-hydroxyethanol-N12[tris (GalNAc-triethyleneglycol)]-diamidodecane]
gaagggttcgcagtgataa

SEQ ID NO: 1313 - RNA, 19 nt, synthetic construct
  source 1..19: mol_type = other RNA
  modified_base 1: mod_base = OTHER; note = 2'-fluorouridine-3'-phosphorothioate
  modified_base 2: mod_base = OTHER; note = 2'-O-methylguanosine-3'-phosphorothioate
  modified_base 3: mod_base = OTHER; note = 2'-fluoroadenosine-3'-phosphate
  modified_base 4: mod_base = OTHER; note = 2'-O-methylguanosine-3'-phosphate
  modified_base 5: mod_base = OTHER; note = 2'-fluorocytidine-3'-phosphate
  modified_base 6: mod_base = OTHER; note = 2'-O-methyladenosine-3'-phosphate
  modified_base 7: mod_base = OTHER; note = 2'-fluoroguanosine-3'-phosphate
  modified_base 8: mod_base = OTHER; note = 2'-O-methyluridine-3'-phosphate
  modified_base 9: mod_base = OTHER; note = 2'-fluoroguanosine-3'-phosphate
  modified_base 10: mod_base = OTHER; note = 2'-O-methyladenosine-3'-phosphate
  modified_base 11: mod_base = OTHER; note = 2'-fluorocytidine-3'-phosphate
  modified_base 12: mod_base = OTHER; note = 2'-O-methyladenosine-3'-phosphate
  modified_base 13: mod_base = OTHER; note = 2'-fluorouridine-3'-phosphate
  modified_base 14: mod_base = OTHER; note = 2'-O-methyluridine-3'-phosphate
  modified_base 15: mod_base = OTHER; note = 2'-fluoroadenosine-3'-phosphate
  modified_base 16: mod_base = OTHER; note = 2'-O-methyluridine-3'-phosphate
  modified_base 17: mod_base = OTHER; note = 2'-fluoroadenosine-3'-phosphate
  modified_base 18: mod_base = OTHER; note = 2'-O-methyladenosine-3'-phosphate
  modified_base 19: mod_base = OTHER; note 2'-fluorouridine-3'-phosphate-(N1-hydroxyethanol-N12[tris(G alNAc-triethyleneglycol)]-diamidodecane]
tgagcagtgacattataat

SEQ ID NO: 1314 - RNA, 19 nt, synthetic construct
  source 1..19: mol_type = other RNA
  modified_base 1: mod_base = OTHER; note = 2'-fluorocytidine-3'-phosphorothioate
  modified_base 2: mod_base = OTHER; note = 2'-O-methyladenosine-3'-phosphorothioate
  modified_base 3: mod_base = OTHER; note = 2'-fluoroguanosine-3'-phosphate
  modified_base 4: mod_base = OTHER; note = 2'-O-methyluridine-3'-phosphate
  modified_base 5: mod_base = OTHER; note = 2'-fluorouridine-3'-phosphate
  modified_base 6: mod_base = OTHER; note = 2'-O-methylguanosine-3'-phosphate
  modified_base 7: mod_base = OTHER; note = 2'-fluorouridine-3'-phosphate
  modified_base 8: mod_base = OTHER; note = 2'-O-methylcytidine-3'-phosphate
  modified_base 9: mod_base = OTHER; note = 2'-fluoroadenosine-3'-phosphate
  modified_base 10: mod_base = OTHER; note = 2'-O-methyluridine-3'-phosphate
  modified_base 11: mod_base = OTHER; note = 2'-fluorouridine-3'-phosphate
  modified_base 12: mod_base = OTHER; note = 2'-O-methylcytidine-3'-phosphate
  modified_base 13: mod_base = OTHER; note = 2'-fluoroadenosine-3'-phosphate
  modified_base 14: mod_base = OTHER; note = 2'-O-methylcytidine-3'-phosphate
  modified_base 15: mod_base = OTHER; note = 2'-fluorouridine-3'-phosphate
  modified_base 16: mod_base = OTHER; note = 2'-O-methyluridine-3'-phosphate
  modified_base 17: mod_base = OTHER; note = 2'-fluorocytidine-3'-phosphate
  modified_base 18: mod_base = OTHER; note = 2'-O-methyluridine-3'-phosphate
  modified_base 19: mod_base = OTHER; note 2'-fluorouridine-3'-phosphate-(N1-hydroxyethanol-N12[tris(G alNAc-triethyleneglycol)]-diamidodecane]
cagttgtcattcacttctt

SEQ ID NO: 1315 - RNA, 19 nt, synthetic construct
  source 1..19: mol_type = other RNA
  modified_base 1: mod_base = OTHER; note = 2'-fluorocytidine-3'-phosphorothioate
  modified_base 2: mod_base = OTHER; note = 2'-O-methylcytidine-3'-phosphorothioate
  modified_base 3: mod_base = OTHER; note = 2'-fluoroadenosine-3'-phosphate
  modified_base 4: mod_base = OTHER; note = 2'-O-methyladenosine-3'-phosphate
  modified_base 5: mod_base = OTHER; note = 2'-fluorocytidine-3'-phosphate
  modified_base 6: mod_base = OTHER; note = 2'-O-methyluridine-3'-phosphate
  modified_base 7: mod_base = OTHER; note = 2'-fluoroadenosine-3'-phosphate
  modified_base 8: mod_base = OTHER; note = 2'-O-methylcytidine-3'-phosphate
  modified_base 9: mod_base = OTHER; note = 2'-fluorouridine-3'-phosphate
  modified_base 10: mod_base = OTHER; note = 2'-O-methyluridine-3'-phosphate
  modified_base 11: mod_base = OTHER; note = 2'-fluorocytidine-3'-phosphate
  modified_base 12: mod_base = OTHER; note = 2'-O-methylguanosine-3'-phosphate
  modified_base 13: mod_base = OTHER; note = 2'-fluorouridine-3'-phosphate
  modified_base 14: mod_base = OTHER; note = 2'-O-methylguanosine-3'-phosphate
  modified_base 15: mod_base = OTHER; note = 2'-fluorouridine-3'-phosphate
  modified_base 16: mod_base = OTHER; note = 2'-O-methyluridine-3'-phosphate
  modified_base 17: mod_base = OTHER; note = 2'-fluorocytidine-3'-phosphate
  modified_base 18: mod_base = OTHER; note = 2'-O-methyladenosine-3'-phosphate
  modified_base 19: mod_base = OTHER; note 2'-fluorouridine-3'-phosphate-(N1-hydroxyethanol-N12[tris(G alNAc-triethyleneglycol)]-diamidodecane]
ccaactacttcgtgttcat

SEQ ID NO: 1316 - RNA, 19 nt, synthetic construct
  source 1..19: mol_type = other RNA
  modified_base 1: mod_base = OTHER; note = 2'-fluoroadenosine-3'-phosphorothioate
  modified_base 2: mod_base = OTHER; note = 2'-O-methylcytidine-3'-phosphorothioate
  modified_base 3: mod_base = OTHER; note = 2'-fluorouridine-3'-phosphate
  modified_base 4: mod_base = OTHER; note = 2'-O-methyluridine-3'-phosphate
  modified_base 5: mod_base = OTHER; note = 2'-fluorocytidine-3'-phosphate
  modified_base 6: mod_base = OTHER; note = 2'-O-methylguanosine-3'-phosphate
  modified_base 7: mod_base = OTHER; note = 2'-fluorouridine-3'-phosphate
  modified_base 8: mod_base = OTHER; note = 2'-O-methylguanosine-3'-phosphate
  modified_base 9: mod_base = OTHER; note = 2'-fluorouridine-3'-phosphate
  modified_base 10: mod_base = OTHER; note = 2'-O-methyluridine-3'-phosphate
  modified_base 11: mod_base = OTHER; note = 2'-fluorocytidine-3'-phosphate
  modified_base 12: mod_base = OTHER; note = 2'-O-methyladenosine-3'-phosphate
  modified_base 13: mod_base = OTHER; note = 2'-fluorouridine-3'-phosphate
  modified_base 14: mod_base = OTHER; note = 2'-O-methylguanosine-3'-phosphate
  modified_base 15: mod_base = OTHER; note = 2'-fluoroadenosine-3'-phosphate
  modified_base 16: mod_base = OTHER; note = 2'-O-methylcytidine-3'-phosphate
  modified_base 17: mod_base = OTHER; note = 2'-fluorouridine-3'-phosphate
  modified_base 18: mod_base = OTHER; note = 2'-O-methyluridine-3'-phosphate
  modified_base 19: mod_base = OTHER; note 2'-fluorouridine-3'-phosphate-(N1-hydroxyethanol-N12[tris(G alNAc-triethyleneglycol)]-diamidodecane]
acttcgtgttcatgacttt

SEQ ID NO: 1317 - RNA, 19 nt, synthetic construct
  source 1..19: mol_type = other RNA
  modified_base 1: mod_base = OTHER; note = 2'-fluorouridine-3'-phosphorothioate
  modified_base 2: mod_base = OTHER; note = 2'-O-methylcytidine-3'-phosphorothioate
  modified_base 3: mod_base = OTHER; note = 2'-fluoroguanosine-3'-phosphate
  modified_base 4: mod_base = OTHER; note = 2'-O-methyluridine-3'-phosphate
  modified_base 5: mod_base = OTHER; note = 2'-fluoroguanosine-3'-phosphate
  modified_base 6: mod_base = OTHER; note = 2'-O-methyluridine-3'-phosphate
  modified_base 7: mod_base = OTHER; note = 2'-fluorouridine-3'-phosphate
  modified_base 8: mod_base = OTHER; note = 2'-O-methylcytidine-3'-phosphate
  modified_base 9: mod_base = OTHER; note = 2'-fluoroadenosine-3'-phosphate
  modified_base 10: mod_base = OTHER; note = 2'-O-methyluridine-3'-phosphate
  modified_base 11: mod_base = OTHER; note = 2'-fluoroguanosine-3'-phosphate
  modified_base 12: mod_base = OTHER; note = 2'-O-methyladenosine-3'-phosphate
  modified_base 13: mod_base = OTHER; note = 2'-fluorocytidine-3'-phosphate
  modified_base 14: mod_base = OTHER; note = 2'-O-methyluridine-3'-phosphate
  modified_base 15: mod_base = OTHER; note = 2'-fluorouridine-3'-phosphate
  modified_base 16: mod_base = OTHER; note = 2'-O-methyluridine-3'-phosphate
  modified_base 17: mod_base = OTHER; note = 2'-fluorocytidine-3'-phosphate
  modified_base 18: mod_base = OTHER; note = 2'-O-methyluridine-3'-phosphate
  modified_base 19: mod_base = OTHER; note 2'-fluorouridine-3'-phosphate-(N1-hydroxyethanol-N12[tris(G alNAc-triethyleneglycol)]-diamidodecane]
tcgtgttcatgactttctt

SEQ ID NO: 1318 - RNA, 19 nt, synthetic construct
  source 1..19: mol_type = other RNA
  modified_base 1: mod_base = OTHER; note = 2'-fluorocytidine-3'-phosphorothioate
  modified_base 2: mod_base = OTHER; note = 2'-O-methyluridine-3'-phosphorothioate
  modified_base 3: mod_base = OTHER; note = 2'-fluorouridine-3'-phosphate
  modified_base 4: mod_base = OTHER; note = 2'-O-methyladenosine-3'-phosphate
  modified_base 5: mod_base = OTHER; note = 2'-fluoroguanosine-3'-phosphate
  modified_base 6: mod_base = OTHER; note = 2'-O-methyluridine-3'-phosphate
  modified_base 7: mod_base = OTHER; note = 2'-fluoroguanosine-3'-phosphate
  modified_base 8: mod_base = OTHER; note = 2'-O-methylguanosine-3'-phosphate
  modified_base 9: mod_base = OTHER; note = 2'-fluorocytidine-3'-phosphate
  modified_base 10: mod_base = OTHER; note = 2'-O-methyluridine-3'-phosphate
  modified_base 11: mod_base = OTHER; note = 2'-fluoroguanosine-3'-phosphate
  modified_base 12: mod_base = OTHER; note = 2'-O-methyladenosine-3'-phosphate
  modified_base 13: mod_base = OTHER; note = 2'-fluoroadenosine-3'-phosphate
  modified_base 14: mod_base = OTHER; note = 2'-O-methyladenosine-3'-phosphate
  modified_base 15: mod_base = OTHER; note = 2'-fluorocytidine-3'-phosphate
  modified_base 16: mod_base = OTHER; note = 2'-O-methyladenosine-3'-phosphate
  modified_base 17: mod_base = OTHER; note = 2'-fluoroguanosine-3'-phosphate
  modified_base 18: mod_base = OTHER; note = 2'-O-methyladenosine-3'-phosphate
  modified_base 19: mod_base = OTHER; note 2'-fluorouridine-3'-phosphate-(N1-hydroxyethanol-N12[tris(G alNAc-triethyleneglycol)]-diamidodecane]
cttagtggctgaaacagat

SEQ ID NO: 1319 - RNA, 19 nt, synthetic construct
  source 1..19: mol_type = other RNA
  modified_base 1: mod_base = OTHER; note = 2'-fluorocytidine-3'-phosphorothioate
  modified_base 2: mod_base = OTHER; note = 2'-O-methyluridine-3'-phosphorothioate
  modified_base 3: mod_base = OTHER; note = 2'-fluoroguanosine-3'-phosphate
  modified_base 4: mod_base = OTHER; note = 2'-O-methyladenosine-3'-phosphate
  modified_base 5: mod_base = OTHER; note = 2'-fluoroguanosine-3'-phosphate
  modified_base 6: mod_base = OTHER; note = 2'-O-methyladenosine-3'-phosphate
  modified_base 7: mod_base = OTHER; note = 2'-fluorouridine-3'-phosphate
  modified_base 8: mod_base = OTHER; note = 2'-O-methylcytidine-3'-phosphate
  modified_base 9: mod_base = OTHER; note = 2'-fluoroadenosine-3'-phosphate
  modified_base 10: mod_base = OTHER; note = 2'-O-methyluridine-3'-phosphate
  modified_base 11: mod_base = OTHER; note = 2'-fluorocytidine-3'-phosphate
  modified_base 12: mod_base = OTHER; note = 2'-O-methylcytidine-3'-phosphate
  modified_base 13: mod_base = OTHER; note = 2'-fluoroadenosine-3'-phosphate
  modified_base 14: mod_base = OTHER; note = 2'-O-methylguanosine-3'-phosphate
  modified_base 15: mod_base = OTHER; note = 2'-fluorouridine-3'-phosphate
  modified_base 16: mod_base = OTHER; note = 2'-O-methyluridine-3'-phosphate
  modified_base 17: mod_base = OTHER; note = 2'-fluoroadenosine-3'-phosphate
  modified_base 18: mod_base = OTHER; note = 2'-O-methylguanosine-3'-phosphate
  modified_base 19: mod_base = OTHER; note 2'-fluorouridine-3'-phosphate-(N1-hydroxyethanol-N12[tris(G alNAc-triethyleneglycol)]-diamidodecane]
ctgagatcatccagttagt

SEQ ID NO: 1320 - RNA, 19 nt, synthetic construct
  source 1..19: mol_type = other RNA
  modified_base 1: mod_base = OTHER; note = 2'-fluorocytidine-3'-phosphorothioate
  modified_base 2: mod_base = OTHER; note = 2'-O-methylcytidine-3'-phosphorothioate
  modified_base 3: mod_base = OTHER; note = 2'-fluorouridine-3'-phosphate
  modified_base 4: mod_base = OTHER; note = 2'-O-methyladenosine-3'-phosphate
  modified_base 5: mod_base = OTHER; note = 2'-fluorocytidine-3'-phosphate
  modified_base 6: mod_base = OTHER; note = 2'-O-methyladenosine-3'-phosphate
  modified_base 7: mod_base = OTHER; note = 2'-fluoroadenosine-3'-phosphate
  modified_base 8: mod_base = OTHER; note = 2'-O-methylguanosine-3'-phosphate
  modified_base 9: mod_base = OTHER; note = 2'-fluorouridine-3'-phosphate
  modified_base 10: mod_base = OTHER; note = 2'-O-methyluridine-3'-phosphate
  modified_base 11: mod_base = OTHER; note = 2'-fluoroguanosine-3'-phosphate
  modified_base 12: mod_base = OTHER; note = 2'-O-methylguanosine-3'-phosphate
  modified_base 13: mod_base = OTHER; note = 2'-fluoroadenosine-3'-phosphate
  modified_base 14: mod_base = OTHER; note = 2'-O-methyladenosine-3'-phosphate
  modified_base 15: mod_base = OTHER; note = 2'-fluoroadenosine-3'-phosphate
  modified_base 16: mod_base = OTHER; note = 2'-O-methylcytidine-3'-phosphate
  modified_base 17: mod_base = OTHER; note = 2'-fluorouridine-3'-phosphate
  modified_base 18: mod_base = OTHER; note = 2'-O-methylcytidine-3'-phosphate
  modified_base 19: mod_base = OTHER; note 2'-fluorouridine-3'-phosphate-(N1-hydroxyethanol-N12[tris(G alNAc-triethyleneglycol)]-diamidodecane]
cctacaagttggaaactct

SEQ ID NO: 1321 - RNA, 19 nt, synthetic construct
  source 1..19: mol_type = other RNA
  modified_base 1: mod_base = OTHER; note = 2'-fluoroadenosine-3'-phosphorothioate
  modified_base 2: mod_base = OTHER; note = 2'-O-methylcytidine-3'-phosphorothioate
  modified_base 3: mod_base = OTHER; note = 2'-fluoroadenosine-3'-phosphate
  modified_base 4: mod_base = OTHER; note = 2'-O-methyladenosine-3'-phosphate
  modified_base 5: mod_base = OTHER; note = 2'-fluoroguanosine-3'-phosphate
  modified_base 6: mod_base = OTHER; note = 2'-O-methyluridine-3'-phosphate
  modified_base 7: mod_base = OTHER; note = 2'-fluorouridine-3'-phosphate
  modified_base 8: mod_base = OTHER; note = 2'-O-methylguanosine-3'-phosphate
  modified_base 9: mod_base = OTHER; note = 2'-fluoroguanosine-3'-phosphate
  modified_base 10: mod_base = OTHER; note = 2'-O-methyladenosine-3'-phosphate
  modified_base 11: mod_base = OTHER; note = 2'-fluoroadenosine-3'-phosphate
  modified_base 12: mod_base = OTHER; note = 2'-O-methyladenosine-3'-phosphate
  modified_base 13: mod_base = OTHER; note = 2'-fluorocytidine-3'-phosphate
  modified_base 14: mod_base = OTHER; note = 2'-O-methyluridine-3'-phosphate
  modified_base 15: mod_base = OTHER; note = 2'-fluorocytidine-3'-phosphate
  modified_base 16: mod_base = OTHER; note = 2'-O-methyluridine-3'-phosphate
  modified_base 17: mod_base = OTHER; note = 2'-fluoroguanosine-3'-phosphate
  modified_base 18: mod_base = OTHER; note = 2'-O-methyladenosine-3'-phosphate
  modified_base 19: mod_base = OTHER; note 2'-fluorouridine-3'-phosphate-(N1-hydroxyethanol-N12[tris(G alNAc-triethyleneglycol)]-diamidodecane]
acaagttggaaactctgat

SEQ ID NO: 1322 - RNA, 19 nt, synthetic construct
  source 1..19: mol_type = other RNA
  modified_base 1: mod_base = OTHER; note = 2'-fluorouridine-3'-phosphorothioate
  modified_base 2: mod_base = OTHER; note = 2'-O-methylguanosine-3'-phosphorothioate
  modified_base 3: mod_base = OTHER; note = 2'-fluoroadenosine-3'-phosphate
  modified_base 4: mod_base = OTHER; note = 2'-O-methylguanosine-3'-phosphate
  modified_base 5: mod_base = OTHER; note = 2'-fluorocytidine-3'-phosphate
  modified_base 6: mod_base = OTHER; note = 2'-O-methylguanosine-3'-phosphate
  modified_base 7: mod_base = OTHER; note = 2'-fluorouridine-3'-phosphate
  modified_base 8: mod_base = OTHER; note = 2'-O-methylguanosine-3'-phosphate
  modified_base 9: mod_base = OTHER; note = 2'-fluoroguanosine-3'-phosphate
  modified_base 10: mod_base = OTHER; note = 2'-O-methyluridine-3'-phosphate
  modified_base 11: mod_base = OTHER; note = 2'-fluoroguanosine-3'-phosphate
  modified_base 12: mod_base = OTHER; note = 2'-O-methyluridine-3'-phosphate
  modified_base 13: mod_base = OTHER; note = 2'-fluoroadenosine-3'-phosphate
  modified_base 14: mod_base = OTHER; note = 2'-O-methyluridine-3'-phosphate
  modified_base 15: mod_base = OTHER; note = 2'-fluorocytidine-3'-phosphate
  modified_base 16: mod_base = OTHER; note = 2'-O-methyluridine-3'-phosphate
  modified_base 17: mod_base = OTHER; note = 2'-fluoroadenosine-3'-phosphate
  modified_base 18: mod_base = OTHER; note = 2'-O-methyluridine-3'-phosphate
  modified_base 19: mod_base = OTHER; note 2'-fluorouridine-3'-phosphate-(N1-hydroxyethanol-N12[tris(G alNAc-triethyleneglycol)]-diamidodecane]
tgagcgtggtgtatctatt

SEQ ID NO: 1323 - RNA, 19 nt, synthetic construct
  source 1..19: mol_type = other RNA
  modified_base 1: mod_base = OTHER; note = 2'-fluorocytidine-3'-phosphorothioate
  modified_base 2: mod_base = OTHER; note = 2'-O-methyluridine-3'-phosphorothioate
  modified_base 3: mod_base = OTHER; note = 2'-fluoroadenosine-3'-phosphate
  modified_base 4: mod_base = OTHER; note = 2'-O-methylguanosine-3'-phosphate
  modified_base 5: mod_base = OTHER; note = 2'-fluorocytidine-3'-phosphate
  modified_base 6: mod_base = OTHER; note = 2'-O-methyladenosine-3'-phosphate
  modified_base 7: mod_base = OTHER; note = 2'-fluoroguanosine-3'-phosphate
  modified_base 8: mod_base = OTHER; note = 2'-O-methyladenosine-3'-phosphate
  modified_base 9: mod_base = OTHER; note = 2'-fluorouridine-3'-phosphate
  modified_base 10: mod_base = OTHER; note = 2'-O-methyluridine-3'-phosphate
  modified_base 11: mod_base = OTHER; note = 2'-fluorouridine-3'-phosphate
  modified_base 12: mod_base = OTHER; note = 2'-O-methylguanosine-3'-phosphate
  modified_base 13: mod_base = OTHER; note = 2'-fluorocytidine-3'-phosphate
  modified_base 14: mod_base = OTHER; note = 2'-O-methyladenosine-3'-phosphate
  modified_base 15: mod_base = OTHER; note = 2'-fluorocytidine-3'-phosphate
  modified_base 16: mod_base = OTHER; note = 2'-O-methylguanosine-3'-phosphate
  modified_base 17: mod_base = OTHER; note = 2'-fluorouridine-3'-phosphate
  modified_base 18: mod_base = OTHER; note = 2'-O-methylcytidine-3'-phosphate
  modified_base 19: mod_base = OTHER; note 2'-fluorouridine-3'-phosphate-(N1-hydroxyethanol-N12[tris(G alNAc-triethyleneglycol)]-diamidodecane]
ctagcagatttgcacgtct

SEQ ID NO: 1324 - RNA, 19 nt, synthetic construct
  source 1..19: mol_type = other RNA
  modified_base 1: mod_base = OTHER; note = 2'-fluoroguanosine-3'-phosphorothioate
  modified_base 2: mod_base = OTHER; note = 2'-O-methyluridine-3'-phosphorothioate
  modified_base 3: mod_base = OTHER; note = 2'-fluorouridine-3'-phosphate
  modified_base 4: mod_base = OTHER; note = 2'-O-methyladenosine-3'-phosphate
  modified_base 5: mod_base = OTHER; note = 2'-fluoroguanosine-3'-phosphate
  modified_base 6: mod_base = OTHER; note = 2'-O-methyluridine-3'-phosphate
  modified_base 7: mod_base = OTHER; note = 2'-fluoroguanosine-3'-phosphate
  modified_base 8: mod_base = OTHER; note = 2'-O-methylguanosine-3'-phosphate
  modified_base 9: mod_base = OTHER; note = 2'-fluorouridine-3'-phosphate
  modified_base 10: mod_base = OTHER; note = 2'-O-methyladenosine-3'-phosphate
  modified_base 11: mod_base = OTHER; note = 2'-fluoroadenosine-3'-phosphate
  modified_base 12: mod_base = OTHER; note = 2'-O-methylcytidine-3'-phosphate
  modified_base 13: mod_base = OTHER; note = 2'-fluorouridine-3'-phosphate
  modified_base 14: mod_base = OTHER; note = 2'-O-methyladenosine-3'-phosphate
  modified_base 15: mod_base = OTHER; note = 2'-fluorouridine-3'-phosphate
  modified_base 16: mod_base = OTHER; note = 2'-O-methyluridine-3'-phosphate
  modified_base 17: mod_base = OTHER; note = 2'-fluoroguanosine-3'-phosphate
  modified_base 18: mod_base = OTHER; note = 2'-O-methyluridine-3'-phosphate
  modified_base 19: mod_base = OTHER; note 2'-fluoroadenosine-3'-phosphate-(N1-hydroxyethanol-N12[tris (GalNAc-triethyleneglycol)]-diamidodecane]
gttagtggtaactattgta

SEQ ID NO: 1325 - RNA, 19 nt, synthetic construct
  source 1..19: mol_type = other RNA
  modified_base 1: mod_base = OTHER; note = 2'-fluorouridine-3'-phosphorothioate
  modified_base 2: mod_base = OTHER; note = 2'-O-methyluridine-3'-phosphorothioate
  modified_base 3: mod_base = OTHER; note = 2'-fluoroguanosine-3'-phosphate
  modified_base 4: mod_base = OTHER; note = 2'-O-methyluridine-3'-phosphate
  modified_base 5: mod_base = OTHER; note = 2'-fluorocytidine-3'-phosphate
  modified_base 6: mod_base = OTHER; note = 2'-O-methyladenosine-3'-phosphate
  modified_base 7: mod_base = OTHER; note = 2'-fluoroguanosine-3'-phosphate
  modified_base 8: mod_base = OTHER; note = 2'-O-methyladenosine-3'-phosphate
  modified_base 9: mod_base = OTHER; note = 2'-fluoroguanosine-3'-phosphate
  modified_base 10: mod_base = OTHER; note = 2'-O-methyladenosine-3'-phosphate
  modified_base 11: mod_base = OTHER; note = 2'-fluoroadenosine-3'-phosphate
  modified_base 12: mod_base = OTHER; note = 2'-O-methylguanosine-3'-phosphate
  modified_base 13: mod_base = OTHER; note = 2'-fluorouridine-3'-phosphate
  modified_base 14: mod_base = OTHER; note = 2'-O-methyladenosine-3'-phosphate
  modified_base 15: mod_base = OTHER; note = 2'-fluorouridine-3'-phosphate
  modified_base 16: mod_base = OTHER; note = 2'-O-methyluridine-3'-phosphate
  modified_base 17: mod_base = OTHER; note = 2'-fluoroadenosine-3'-phosphate
  modified_base 18: mod_base = OTHER; note = 2'-O-methyladenosine-3'-phosphate
  modified_base 19: mod_base = OTHER; note 2'-fluoroadenosine-3'-phosphate-(N1-hydroxyethanol-N12[tris (GalNAc-triethyleneglycol)]-diamidodecane]
ttgtcagagaagtattaaa

SEQ ID NO: 1326 - RNA, 19 nt, synthetic construct
  source 1..19: mol_type = other RNA
  modified_base 1: mod_base = OTHER; note = 2'-fluoroadenosine-3'-phosphorothioate
  modified_base 2: mod_base = OTHER; note = 2'-O-methylguanosine-3'-phosphorothioate
  modified_base 3: mod_base = OTHER; note = 2'-fluoroadenosine-3'-phosphate
  modified_base 4: mod_base = OTHER; note = 2'-O-methylguanosine-3'-phosphate
  modified_base 5: mod_base = OTHER; note = 2'-fluoroadenosine-3'-phosphate
  modified_base 6: mod_base = OTHER; note = 2'-O-methyladenosine-3'-phosphate
  modified_base 7: mod_base = OTHER; note = 2'-fluoroguanosine-3'-phosphate
  modified_base 8: mod_base = OTHER; note = 2'-O-methyluridine-3'-phosphate
  modified_base 9: mod_base = OTHER; note = 2'-fluoroadenosine-3'-phosphate
  modified_base 10: mod_base = OTHER; note = 2'-O-methyluridine-3'-phosphate
  modified_base 11: mod_base = OTHER; note = 2'-fluorouridine-3'-phosphate
  modified_base 12: mod_base = OTHER; note = 2'-O-methyladenosine-3'-phosphate
  modified_base 13: mod_base = OTHER; note = 2'-fluoroadenosine-3'-phosphate
  modified_base 14: mod_base = OTHER; note = 2'-O-methyladenosine-3'-phosphate
  modified_base 15: mod_base = OTHER; note = 2'-fluoroguanosine-3'-phosphate
  modified_base 16: mod_base = OTHER; note = 2'-O-methyladenosine-3'-phosphate
  modified_base 17: mod_base = OTHER; note = 2'-fluorocytidine-3'-phosphate
  modified_base 18: mod_base = OTHER; note = 2'-O-methyluridine-3'-phosphate
  modified_base 19: mod_base = OTHER; note 2'-fluoroadenosine-3'-phosphate-(N1-hydroxyethanol-N12[tris (GalNAc-triethyleneglycol)]-diamidodecane]
agagaagtattaaagacta

SEQ ID NO: 1327 - RNA, 19 nt, synthetic construct
  source 1..19: mol_type = other RNA
  modified_base 1: mod_base = OTHER; note = 2'-fluoroguanosine-3'-phosphorothioate
  modified_base 2: mod_base = OTHER; note = 2'-O-methylcytidine-3'-phosphorothioate
  modified_base 3: mod_base = OTHER; note = 2'-fluoroadenosine-3'-phosphate
  modified_base 4: mod_base = OTHER; note = 2'-O-methylguanosine-3'-phosphate
  modified_base 5: mod_base = OTHER; note = 2'-fluorocytidine-3'-phosphate
  modified_base 6: mod_base = OTHER; note = 2'-O-methyladenosine-3'-phosphate
  modified_base 7: mod_base = OTHER; note = 2'-fluorocytidine-3'-phosphate
  modified_base 8: mod_base = OTHER; note = 2'-O-methyladenosine-3'-phosphate
  modified_base 9: mod_base = OTHER; note = 2'-fluoroguanosine-3'-phosphate
  modified_base 10: mod_base = OTHER; note = 2'-O-methyladenosine-3'-phosphate
  modified_base 11: mod_base = OTHER; note = 2'-fluoroadenosine-3'-phosphate
  modified_base 12: mod_base = OTHER; note = 2'-O-methyluridine-3'-phosphate
  modified_base 13: mod_base = OTHER; note = 2'-fluoroguanosine-3'-phosphate
  modified_base 14: mod_base = OTHER; note = 2'-O-methyluridine-3'-phosphate
  modified_base 15: mod_base = OTHER; note = 2'-fluorouridine-3'-phosphate
  modified_base 16: mod_base = OTHER; note = 2'-O-methylguanosine-3'-phosphate
  modified_base 17: mod_base = OTHER; note = 2'-fluoroguanosine-3'-phosphate
  modified_base 18: mod_base = OTHER; note = 2'-O-methyluridine-3'-phosphate
  modified_base 19: mod_base = OTHER; note 2'-fluoroadenosine-3'-phosphate-(N1-hydroxyethanol-N12[tris (GalNAc-triethyleneglycol)]-diamidodecane]
gcagcacagaatgttggta

SEQ ID NO: 1328 - RNA, 19 nt, synthetic construct
  source 1..19: mol_type = other RNA
  modified_base 1: mod_base = OTHER; note = 2'-fluoroadenosine-3'-phosphorothioate
  modified_base 2: mod_base = OTHER; note = 2'-O-methyladenosine-3'-phosphorothioate
  modified_base 3: mod_base = OTHER; note = 2'-fluorouridine-3'-phosphate
  modified_base 4: mod_base = OTHER; note = 2'-O-methylguanosine-3'-phosphate
  modified_base 5: mod_base = OTHER; note = 2'-fluoroadenosine-3'-phosphate
  modified_base 6: mod_base = OTHER; note = 2'-O-methyladenosine-3'-phosphate
  modified_base 7: mod_base = OTHER; note = 2'-fluoroguanosine-3'-phosphate
  modified_base 8: mod_base = OTHER; note = 2'-O-methyladenosine-3'-phosphate
  modified_base 9: mod_base = OTHER; note = 2'-fluorouridine-3'-phosphate
  modified_base 10: mod_base = OTHER; note = 2'-O-methyluridine-3'-phosphate
  modified_base 11: mod_base = OTHER; note = 2'-fluorouridine-3'-phosphate
  modified_base 12: mod_base = OTHER; note = 2'-O-methyladenosine-3'-phosphate
  modified_base 13: mod_base = OTHER; note = 2'-fluorouridine-3'-phosphate
  modified_base 14: mod_base = OTHER; note = 2'-O-methyladenosine-3'-phosphate
  modified_base 15: mod_base = OTHER; note = 2'-fluorouridine-3'-phosphate
  modified_base 16: mod_base = OTHER; note = 2'-O-methyladenosine-3'-phosphate
  modified_base 17: mod_base = OTHER; note = 2'-fluorouridine-3'-phosphate
  modified_base 18: mod_base = OTHER; note = 2'-O-methylcytidine-3'-phosphate
  modified_base 19: mod_base = OTHER; note 2'-fluoroadenosine-3'-phosphate-(N1-hydroxyethanol-N12[tris (GalNAc-triethyleneglycol)]-diamidodecane]
aatgaagatttatatatca

SEQ ID NO: 1329 - RNA, 19 nt, synthetic construct
  source 1..19: mol_type = other RNA
  modified_base 1: mod_base = OTHER; note = 2'-fluorouridine-3'-phosphorothioate
  modified_base 2: mod_base = OTHER; note = 2'-O-methylguanosine-3'-phosphorothioate
  modified_base 3: mod_base = OTHER; note = 2'-fluorocytidine-3'-phosphate
  modified_base 4: mod_base = OTHER; note = 2'-O-methyladenosine-3'-phosphate
  modified_base 5: mod_base = OTHER; note = 2'-fluoroguanosine-3'-phosphate
  modified_base 6: mod_base = OTHER; note = 2'-O-methyladenosine-3'-phosphate
  modified_base 7: mod_base = OTHER; note = 2'-fluorouridine-3'-phosphate
  modified_base 8: mod_base = OTHER; note = 2'-O-methylguanosine-3'-phosphate
  modified_base 9: mod_base = OTHER; note = 2'-fluorocytidine-3'-phosphate
  modified_base 10: mod_base = OTHER; note = 2'-O-methyluridine-3'-phosphate
  modified_base 11: mod_base = OTHER; note = 2'-fluoroadenosine-3'-phosphate
  modified_base 12: mod_base = OTHER; note = 2'-O-methylguanosine-3'-phosphate
  modified_base 13: mod_base = OTHER; note = 2'-fluoroguanosine-3'-phosphate
  modified_base 14: mod_base = OTHER; note = 2'-O-methyluridine-3'-phosphate
  modified_base 15: mod_base = OTHER; note = 2'-fluoroguanosine-3'-phosphate
  modified_base 16: mod_base = OTHER; note = 2'-O-methyluridine-3'-phosphate
  modified_base 17: mod_base = OTHER; note = 2'-fluorouridine-3'-phosphate
  modified_base 18: mod_base = OTHER; note = 2'-O-methylcytidine-3'-phosphate
  modified_base 19: mod_base = OTHER; note 2'-fluoroadenosine-3'-phosphate-(N1-hydroxyethanol-N12[tris (GalNAc-triethyleneglycol)]-diamidodecane]
tgcagatgctaggtgttca

SEQ ID NO: 1330 - RNA, 19 nt, synthetic construct
  source 1..19: mol_type = other RNA
  modified_base 1: mod_base = OTHER; note = 2'-fluoroguanosine-3'-phosphorothioate
  modified_base 2: mod_base = OTHER; note = 2'-O-methylcytidine-3'-phosphorothioate
  modified_base 3: mod_base = OTHER; note = 2'-fluoroadenosine-3'-phosphate
  modified_base 4: mod_base = OTHER; note = 2'-O-methylguanosine-3'-phosphate
  modified_base 5: mod_base = OTHER; note = 2'-fluoroadenosine-3'-phosphate
  modified_base 6: mod_base = OTHER; note = 2'-O-methyluridine-3'-phosphate
  modified_base 7: mod_base = OTHER; note = 2'-fluoroguanosine-3'-phosphate
  modified_base 8: mod_base = OTHER; note = 2'-O-methylcytidine-3'-phosphate
  modified_base 9: mod_base = OTHER; note = 2'-fluorouridine-3'-phosphate
  modified_base 10: mod_base = OTHER; note = 2'-O-methyladenosine-3'-phosphate
  modified_base 11: mod_base = OTHER; note = 2'-fluoroguanosine-3'-phosphate
  modified_base 12: mod_base = OTHER; note = 2'-O-methylguanosine-3'-phosphate
  modified_base 13: mod_base = OTHER; note = 2'-fluorouridine-3'-phosphate
  modified_base 14: mod_base = OTHER; note = 2'-O-methylguanosine-3'-phosphate
  modified_base 15: mod_base = OTHER; note = 2'-fluorouridine-3'-phosphate
  modified_base 16: mod_base = OTHER; note = 2'-O-methyluridine-3'-phosphate
  modified_base 17: mod_base = OTHER; note = 2'-fluorocytidine-3'-phosphate
  modified_base 18: mod_base = OTHER; note = 2'-O-methyladenosine-3'-phosphate
  modified_base 19: mod_base = OTHER; note 2'-fluoroadenosine-3'-phosphate-(N1-hydroxyethanol-N12[tris (GalNAc-triethyleneglycol)]-diamidodecane]
gcagatgctaggtgttcaa

SEQ ID NO: 1331 - RNA, 19 nt, synthetic construct
  source 1..19: mol_type = other RNA
  modified_base 1: mod_base = OTHER; note = 2'-fluorocytidine-3'-phosphorothioate
  modified_base 2: mod_base = OTHER; note = 2'-O-methyladenosine-3'-phosphorothioate
  modified_base 3: mod_base = OTHER; note = 2'-fluoroadenosine-3'-phosphate
  modified_base 4: mod_base = OTHER; note = 2'-O-methylguanosine-3'-phosphate
  modified_base 5: mod_base = OTHER; note = 2'-fluoroguanosine-3'-phosphate
  modified_base 6: mod_base = OTHER; note = 2'-O-methyladenosine-3'-phosphate
  modified_base 7: mod_base = OTHER; note = 2'-fluoroguanosine-3'-phosphate
  modified_base 8: mod_base = OTHER; note = 2'-O-methylcytidine-3'-phosphate
  modified_base 9: mod_base = OTHER; note = 2'-fluoroadenosine-3'-phosphate
  modified_base 10: mod_base = OTHER; note = 2'-O-methyluridine-3'-phosphate
  modified_base 11: mod_base = OTHER; note = 2'-fluoroguanosine-3'-phosphate
  modified_base 12: mod_base = OTHER; note = 2'-O-methylcytidine-3'-phosphate
  modified_base 13: mod_base = OTHER; note = 2'-fluoroadenosine-3'-phosphate
  modified_base 14: mod_base = OTHER; note = 2'-O-methyladenosine-3'-phosphate
  modified_base 15: mod_base = OTHER; note = 2'-fluoroadenosine-3'-phosphate
  modified_base 16: mod_base = OTHER; note = 2'-O-methylguanosine-3'-phosphate
  modified_base 17: mod_base = OTHER; note = 2'-fluoroadenosine-3'-phosphate
  modified_base 18: mod_base = OTHER; note = 2'-O-methyluridine-3'-phosphate
  modified_base 19: mod_base = OTHER; note 2'-fluoroadenosine-3'-phosphate-(N1-hydroxyethanol-N12[tris (GalNAc-triethyleneglycol)]-diamidodecane]
caaggagcatgcaaagata

SEQ ID NO: 1332 - RNA, 19 nt, synthetic construct
  source 1..19: mol_type = other RNA
  modified_base 1: mod_base = OTHER; note = 2'-fluorocytidine-3'-phosphorothioate
  modified_base 2: mod_base = OTHER; note = 2'-O-methylcytidine-3'-phosphorothioate
  modified_base 3: mod_base = OTHER; note = 2'-fluoroguanosine-3'-phosphate
  modified_base 4: mod_base = OTHER; note = 2'-O-methylguanosine-3'-phosphate
  modified_base 5: mod_base = OTHER; note = 2'-fluorocytidine-3'-phosphate
  modified_base 6: mod_base = OTHER; note = 2'-O-methyladenosine-3'-phosphate
  modified_base 7: mod_base = OTHER; note = 2'-fluoroguanosine-3'-phosphate
  modified_base 8: mod_base = OTHER; note = 2'-O-methylcytidine-3'-phosphate
  modified_base 9: mod_base = OTHER; note = 2'-fluorouridine-3'-phosphate
  modified_base 10: mod_base = OTHER; note = 2'-O-methyluridine-3'-phosphate
  modified_base 11: mod_base = OTHER; note = 2'-fluoroguanosine-3'-phosphate
  modified_base 12: mod_base = OTHER; note = 2'-O-methylcytidine-3'-phosphate
  modified_base 13: mod_base = OTHER; note = 2'-fluorocytidine-3'-phosphate
  modified_base 14: mod_base = OTHER; note = 2'-O-methylcytidine-3'-phosphate
  modified_base 15: mod_base = OTHER; note = 2'-fluoroguanosine-3'-phosphate
  modified_base 16: mod_base = OTHER; note = 2'-O-methyladenosine-3'-phosphate
  modified_base 17: mod_base = OTHER; note = 2'-fluoroadenosine-3'-phosphate
  modified_base 18: mod_base = OTHER; note = 2'-O-methyluridine-3'-phosphate
  modified_base 19: mod_base = OTHER; note 2'-fluorouridine-3'-phosphate-(N1-hydroxyethanol-N12[tris(G alNAc-triethyleneglycol)]-diamidodecane]
ccggcagcttgcccgaatt

SEQ ID NO: 1333 - RNA, 19 nt, synthetic construct
  source 1..19: mol_type = other RNA
  modified_base 1: mod_base = OTHER; note = 2'-fluoroadenosine-3'-phosphorothioate
  modified_base 2: mod_base = OTHER; note = 2'-O-methylcytidine-3'-phosphorothioate
  modified_base 3: mod_base = OTHER; note = 2'-fluoroadenosine-3'-phosphate
  modified_base 4: mod_base = OTHER; note = 2'-O-methyladenosine-3'-phosphate
  modified_base 5: mod_base = OTHER; note = 2'-fluorocytidine-3'-phosphate
  modified_base 6: mod_base = OTHER; note = 2'-O-methyladenosine-3'-phosphate
  modified_base 7: mod_base = OTHER; note = 2'-fluoroguanosine-3'-phosphate
  modified_base 8: mod_base = OTHER; note = 2'-O-methylguanosine-3'-phosphate
  modified_base 9: mod_base = OTHER; note = 2'-fluorouridine-3'-phosphate
  modified_base 10: mod_base = OTHER; note = 2'-O-methylcytidine-3'-phosphate
  modified_base 11: mod_base = OTHER; note = 2'-fluoroguanosine-3'-phosphate
  modified_base 12: mod_base = OTHER; note = 2'-O-methyladenosine-3'-phosphate
  modified_base 13: mod_base = OTHER; note = 2'-fluoroadenosine-3'-phosphate
  modified_base 14: mod_base = OTHER; note = 2'-O-methylguanosine-3'-phosphate
  modified_base 15: mod_base = OTHER; note = 2'-fluoroadenosine-3'-phosphate
  modified_base 16: mod_base = OTHER; note = 2'-O-methyluridine-3'-phosphate
  modified_base 17: mod_base = OTHER; note = 2'-fluorocytidine-3'-phosphate
  modified_base 18: mod_base = OTHER; note = 2'-O-methyladenosine-3'-phosphate
  modified_base 19: mod_base = OTHER; note 2'-fluoroadenosine-3'-phosphate-(N1-hydroxyethanol-N12[tris (GalNAc-triethyleneglycol)]-diamidodecane]
acaacaggtcgaagatcaa

SEQ ID NO: 1334 - RNA, 19 nt, synthetic construct
  source 1..19: mol_type = other RNA
  modified_base 1: mod_base = OTHER; note = 2'-fluoroadenosine-3'-phosphorothioate
  modified_base 2: mod_base = OTHER; note = 2'-O-methylcytidine-3'-phosphorothioate
  modified_base 3: mod_base = OTHER; note = 2'-fluoroadenosine-3'-phosphate
  modified_base 4: mod_base = OTHER; note = 2'-O-methylguanosine-3'-phosphate
  modified_base 5: mod_base = OTHER; note = 2'-fluoroguanosine-3'-phosphate
  modified_base 6: mod_base = OTHER; note = 2'-O-methyluridine-3'-phosphate
  modified_base 7: mod_base = OTHER; note = 2'-fluorocytidine-3'-phosphate
  modified_base 8: mod_base = OTHER; note = 2'-O-methylguanosine-3'-phosphate
  modified_base 9: mod_base = OTHER; note = 2'-fluoroadenosine-3'-phosphate
  modified_base 10: mod_base = OTHER; note = 2'-O-methyladenosine-3'-phosphate
  modified_base 11: mod_base = OTHER; note = 2'-fluoroguanosine-3'-phosphate
  modified_base 12: mod_base = OTHER; note = 2'-O-methyladenosine-3'-phosphate
  modified_base 13: mod_base = OTHER; note = 2'-fluorouridine-3'-phosphate
  modified_base 14: mod_base = OTHER; note = 2'-O-methylcytidine-3'-phosphate
  modified_base 15: mod_base = OTHER; note = 2'-fluoroadenosine-3'-phosphate
  modified_base 16: mod_base = OTHER; note = 2'-O-methyladenosine-3'-phosphate
  modified_base 17: mod_base = OTHER; note = 2'-fluorouridine-3'-phosphate
  modified_base 18: mod_base = OTHER; note = 2'-O-methyluridine-3'-phosphate
  modified_base 19: mod_base = OTHER; note 2'-fluorouridine-3'-phosphate-(N1-hydroxyethanol-N12[tris(G alNAc-triethyleneglycol)]-diamidodecane]
acaggtcgaagatcaattt

SEQ ID NO: 1335 - RNA, 19 nt, synthetic construct
  source 1..19: mol_type = other RNA
  modified_base 1: mod_base = OTHER; note = 2'-fluorocytidine-3'-phosphorothioate
  modified_base 2: mod_base = OTHER; note = 2'-O-methylguanosine-3'-phosphorothioate
  modified_base 3: mod_base = OTHER; note = 2'-fluoroadenosine-3'-phosphate
  modified_base 4: mod_base = OTHER; note = 2'-O-methyladenosine-3'-phosphate
  modified_base 5: mod_base = OTHER; note = 2'-fluoroguanosine-3'-phosphate
  modified_base 6: mod_base = OTHER; note = 2'-O-methyladenosine-3'-phosphate
  modified_base 7: mod_base = OTHER; note = 2'-fluorouridine-3'-phosphate
  modified_base 8: mod_base = OTHER; note = 2'-O-methylcytidine-3'-phosphate
  modified_base 9: mod_base = OTHER; note = 2'-fluoroadenosine-3'-phosphate
  modified_base 10: mod_base = OTHER; note = 2'-O-methyladenosine-3'-phosphate
  modified_base 11: mod_base = OTHER; note = 2'-fluorouridine-3'-phosphate
  modified_base 12: mod_base = OTHER; note = 2'-O-methyluridine-3'-phosphate
  modified_base 13: mod_base = OTHER; note = 2'-fluorouridine-3'-phosphate
  modified_base 14: mod_base = OTHER; note = 2'-O-methyladenosine-3'-phosphate
  modified_base 15: mod_base = OTHER; note = 2'-fluorocytidine-3'-phosphate
  modified_base 16: mod_base = OTHER; note = 2'-O-methyladenosine-3'-phosphate
  modified_base 17: mod_base = OTHER; note = 2'-fluoroadenosine-3'-phosphate
  modified_base 18: mod_base = OTHER; note = 2'-O-methylguanosine-3'-phosphate
  modified_base 19: mod_base = OTHER; note 2'-fluoroadenosine-3'-phosphate-(N1-hydroxyethanol-N12[tris (GalNAc-triethyleneglycol)]-diamidodecane]
cgaagatcaatttacaaga

SEQ ID NO: 1336 - RNA, 19 nt, synthetic construct
  source 1..19: mol_type = other RNA
  modified_base 1: mod_base = OTHER; note = 2'-fluoroadenosine-3'-phosphorothioate
  modified_base 2: mod_base = OTHER; note = 2'-O-methylguanosine-3'-phosphorothioate
  modified_base 3: mod_base = OTHER; note = 2'-fluoroadenosine-3'-phosphate
  modified_base 4: mod_base = OTHER; note = 2'-O-methylguanosine-3'-phosphate
  modified_base 5: mod_base = OTHER; note = 2'-fluoroadenosine-3'-phosphate
  modified_base 6: mod_base = OTHER; note = 2'-O-methylguanosine-3'-phosphate
  modified_base 7: mod_base = OTHER; note = 2'-fluoroguanosine-3'-phosphate
  modified_base 8: mod_base = OTHER; note = 2'-O-methyluridine-3'-phosphate
  modified_base 9: mod_base = OTHER; note = 2'-fluorocytidine-3'-phosphate
  modified_base 10: mod_base = OTHER; note = 2'-O-methyluridine-3'-phosphate
  modified_base 11: mod_base = OTHER; note = 2'-fluorocytidine-3'-phosphate
  modified_base 12: mod_base = OTHER; note = 2'-O-methyladenosine-3'-phosphate
  modified_base 13: mod_base = OTHER; note = 2'-fluoroguanosine-3'-phosphate
  modified_base 14: mod_base = OTHER; note = 2'-O-methylguanosine-3'-phosphate
  modified_base 15: mod_base = OTHER; note = 2'-fluorouridine-3'-phosphate
  modified_base 16: mod_base = OTHER; note = 2'-O-methyluridine-3'-phosphate
  modified_base 17: mod_base = OTHER; note = 2'-fluorocytidine-3'-phosphate
  modified_base 18: mod_base = OTHER; note = 2'-O-methyluridine-3'-phosphate
  modified_base 19: mod_base = OTHER; note 2'-fluorouridine-3'-phosphate-(N1-hydroxyethanol-N12[tris(G alNAc-triethyleneglycol)]-diamidodecane]
agagaggtctcaggttctt

SEQ ID NO: 1337 - RNA, 19 nt, synthetic construct
  source 1..19: mol_type = other RNA
  modified_base 1: mod_base = OTHER; note = 2'-fluorouridine-3'-phosphorothioate
  modified_base 2: mod_base = OTHER; note = 2'-O-methylguanosine-3'-phosphorothioate
  modified_base 3: mod_base = OTHER; note = 2'-fluoroadenosine-3'-phosphate
  modified_base 4: mod_base = OTHER; note = 2'-O-methyluridine-3'-phosphate
  modified_base 5: mod_base = OTHER; note = 2'-fluoroguanosine-3'-phosphate
  modified_base 6: mod_base = OTHER; note = 2'-O-methyladenosine-3'-phosphate
  modified_base 7: mod_base = OTHER; note = 2'-fluoroadenosine-3'-phosphate
  modified_base 8: mod_base = OTHER; note = 2'-O-methyladenosine-3'-phosphate
  modified_base 9: mod_base = OTHER; note = 2'-fluorouridine-3'-phosphate
  modified_base 10: mod_base = OTHER; note = 2'-O-methyluridine-3'-phosphate
  modified_base 11: mod_base = OTHER; note = 2'-fluorocytidine-3'-phosphate
  modified_base 12: mod_base = OTHER; note = 2'-O-methyluridine-3'-phosphate
  modified_base 13: mod_base = OTHER; note = 2'-fluorouridine-3'-phosphate
  modified_base 14: mod_base = OTHER; note = 2'-O-methylguanosine-3'-phosphate
  modified_base 15: mod_base = OTHER; note = 2'-fluoroadenosine-3'-phosphate
  modified_base 16: mod_base = OTHER; note = 2'-O-methyladenosine-3'-phosphate
  modified_base 17: mod_base = OTHER; note = 2'-fluoroguanosine-3'-phosphate
  modified_base 18: mod_base = OTHER; note = 2'-O-methyluridine-3'-phosphate
  modified_base 19: mod_base = OTHER; note 2'-fluorouridine-3'-phosphate-(N1-hydroxyethanol-N12[tris(G alNAc-triethyleneglycol)]-diamidodecane]
tgatgaaattcttgaagtt

SEQ ID NO: 1338 - RNA, 19 nt, synthetic construct
  source 1..19: mol_type = other RNA
  modified_base 1: mod_base = OTHER; note = 2'-fluorouridine-3'-phosphorothioate
  modified_base 2: mod_base = OTHER; note = 2'-O-methylguanosine-3'-phosphorothioate
  modified_base 3: mod_base = OTHER; note = 2'-fluoroadenosine-3'-phosphate
  modified_base 4: mod_base = OTHER; note = 2'-O-methyladenosine-3'-phosphate
  modified_base 5: mod_base = OTHER; note = 2'-fluoroadenosine-3'-phosphate
  modified_base 6: mod_base = OTHER; note = 2'-O-methyluridine-3'-phosphate
  modified_base 7: mod_base = OTHER; note = 2'-fluorouridine-3'-phosphate
  modified_base 8: mod_base = OTHER; note = 2'-O-methylcytidine-3'-phosphate
  modified_base 9: mod_base = OTHER; note = 2'-fluorouridine-3'-phosphate
  modified_base 10: mod_base = OTHER; note = 2'-O-methyluridine-3'-phosphate
  modified_base 11: mod_base = OTHER; note = 2'-fluoroguanosine-3'-phosphate
  modified_base 12: mod_base = OTHER; note = 2'-O-methyladenosine-3'-phosphate
  modified_base 13: mod_base = OTHER; note = 2'-fluoroadenosine-3'-phosphate
  modified_base 14: mod_base = OTHER; note = 2'-O-methylguanosine-3'-phosphate
  modified_base 15: mod_base = OTHER; note = 2'-fluorouridine-3'-phosphate
  modified_base 16: mod_base = OTHER; note = 2'-O-methyluridine-3'-phosphate
  modified_base 17: mod_base = OTHER; note = 2'-fluorocytidine-3'-phosphate
  modified_base 18: mod_base = OTHER; note = 2'-O-methyladenosine-3'-phosphate
  modified_base 19: mod_base = OTHER; note 2'-fluorouridine-3'-phosphate-(N1-hydroxyethanol-N12[tris(G alNAc-triethyleneglycol)]-diamidodecane]
tgaaattcttgaagttcat

SEQ ID NO: 1339 - RNA, 19 nt, synthetic construct
  source 1..19: mol_type = other RNA
  modified_base 1: mod_base = OTHER; note = 2'-fluoroadenosine-3'-phosphorothioate
  modified_base 2: mod_base = OTHER; note = 2'-O-methylcytidine-3'-phosphorothioate
  modified_base 3: mod_base = OTHER; note = 2'-fluorouridine-3'-phosphate
  modified_base 4: mod_base = OTHER; note = 2'-O-methylcytidine-3'-phosphate
  modified_base 5: mod_base = OTHER; note = 2'-fluorocytidine-3'-phosphate
  modified_base 6: mod_base = OTHER; note = 2'-O-methyluridine-3'-phosphate
  modified_base 7: mod_base = OTHER; note = 2'-fluoroguanosine-3'-phosphate
  modified_base 8: mod_base = OTHER; note = 2'-O-methyladenosine-3'-phosphate
  modified_base 9: mod_base = OTHER; note = 2'-fluorouridine-3'-phosphate
  modified_base 10: mod_base = OTHER; note = 2'-O-methyluridine-3'-phosphate
  modified_base 11: mod_base = OTHER; note = 2'-fluorouridine-3'-phosphate
  modified_base 12: mod_base = OTHER; note = 2'-O-methyluridine-3'-phosphate
  modified_base 13: mod_base = OTHER; note = 2'-fluoroguanosine-3'-phosphate
  modified_base 14: mod_base = OTHER; note = 2'-O-methyluridine-3'-phosphate
  modified_base 15: mod_base = OTHER; note = 2'-fluoroadenosine-3'-phosphate
  modified_base 16: mod_base = OTHER; note = 2'-O-methylguanosine-3'-phosphate
  modified_base 17: mod_base = OTHER; note = 2'-fluorouridine-3'-phosphate
  modified_base 18: mod_base = OTHER; note = 2'-O-methyluridine-3'-phosphate
  modified_base 19: mod_base = OTHER; note 2'-fluoroadenosine-3'-phosphate-(N1-hydroxyethanol-N12[tris (GalNAc-triethyleneglycol)]-diamidodecane]
actcctgattttgtagtta

SEQ ID NO: 1340 - RNA, 19 nt, synthetic construct
  source 1..19: mol_type = other RNA
  modified_base 1: mod_base = OTHER; note = 2'-fluorocytidine-3'-phosphorothioate
  modified_base 2: mod_base = OTHER; note = 2'-O-methyluridine-3'-phosphorothioate
  modified_base 3: mod_base = OTHER; note = 2'-fluorocytidine-3'-phosphate
  modified_base 4: mod_base = OTHER; note = 2'-O-methylcytidine-3'-phosphate
  modified_base 5: mod_base = OTHER; note = 2'-fluorouridine-3'-phosphate
  modified_base 6: mod_base = OTHER; note = 2'-O-methylguanosine-3'-phosphate
  modified_base 7: mod_base = OTHER; note = 2'-fluoroadenosine-3'-phosphate
  modified_base 8: mod_base = OTHER; note = 2'-O-methyluridine-3'-phosphate
  modified_base 9: mod_base = OTHER; note = 2'-fluorouridine-3'-phosphate
  modified_base 10: mod_base = OTHER; note = 2'-O-methyluridine-3'-phosphate
  modified_base 11: mod_base = OTHER; note = 2'-fluorouridine-3'-phosphate
  modified_base 12: mod_base = OTHER; note = 2'-O-methylguanosine-3'-phosphate
  modified_base 13: mod_base = OTHER; note = 2'-fluorouridine-3'-phosphate
  modified_base 14: mod_base = OTHER; note = 2'-O-methyladenosine-3'-phosphate
  modified_base 15: mod_base = OTHER; note = 2'-fluoroguanosine-3'-phosphate
  modified_base 16: mod_base = OTHER; note = 2'-O-methyluridine-3'-phosphate
  modified_base 17: mod_base = OTHER; note = 2'-fluorouridine-3'-phosphate
  modified_base 18: mod_base = OTHER; note = 2'-O-methyladenosine-3'-phosphate
  modified_base 19: mod_base = OTHER; note 2'-fluoroadenosine-3'-phosphate-(N1-hydroxyethanol-N12[tris (GalNAc-triethyleneglycol)]-diamidodecane]
ctcctgattttgtagttaa

SEQ ID NO: 1341 - RNA, 19 nt, synthetic construct
  source 1..19: mol_type = other RNA
  modified_base 1: mod_base = OTHER; note = 2'-fluorouridine-3'-phosphorothioate
  modified_base 2: mod_base = OTHER; note = 2'-O-methylcytidine-3'-phosphorothioate
  modified_base 3: mod_base = OTHER; note = 2'-fluorocytidine-3'-phosphate
  modified_base 4: mod_base = OTHER; note = 2'-O-methyluridine-3'-phosphate
  modified_base 5: mod_base = OTHER; note = 2'-fluoroguanosine-3'-phosphate
  modified_base 6: mod_base = OTHER; note = 2'-O-methyladenosine-3'-phosphate
  modified_base 7: mod_base = OTHER; note = 2'-fluorouridine-3'-phosphate
  modified_base 8: mod_base = OTHER; note = 2'-O-methyluridine-3'-phosphate
  modified_base 9: mod_base = OTHER; note = 2'-fluorouridine-3'-phosphate
  modified_base 10: mod_base = OTHER; note = 2'-O-methyluridine-3'-phosphate
  modified_base 11: mod_base = OTHER; note = 2'-fluoroguanosine-3'-phosphate
  modified_base 12: mod_base = OTHER; note = 2'-O-methyluridine-3'-phosphate
  modified_base 13: mod_base = OTHER; note = 2'-fluoroadenosine-3'-phosphate
  modified_base 14: mod_base = OTHER; note = 2'-O-methylguanosine-3'-phosphate
  modified_base 15: mod_base = OTHER; note = 2'-fluorouridine-3'-phosphate
  modified_base 16: mod_base = OTHER; note = 2'-O-methyluridine-3'-phosphate
  modified_base 17: mod_base = OTHER; note = 2'-fluoroadenosine-3'-phosphate
  modified_base 18: mod_base = OTHER; note = 2'-O-methyladenosine-3'-phosphate
  modified_base 19: mod_base = OTHER; note 2'-fluorouridine-3'-phosphate-(N1-hydroxyethanol-N12[tris(G alNAc-triethyleneglycol)]-diamidodecane]
tcctgattttgtagttaat

SEQ ID NO: 1342 - RNA, 19 nt, synthetic construct
  source 1..19: mol_type = other RNA
  modified_base 1: mod_base = OTHER; note = 2'-fluorocytidine-3'-phosphorothioate
  modified_base 2: mod_base = OTHER; note = 2'-O-methyladenosine-3'-phosphorothioate
  modified_base 3: mod_base = OTHER; note = 2'-fluoroadenosine-3'-phosphate
  modified_base 4: mod_base = OTHER; note = 2'-O-methylguanosine-3'-phosphate
  modified_base 5: mod_base = OTHER; note = 2'-fluoroadenosine-3'-phosphate
  modified_base 6: mod_base = OTHER; note = 2'-O-methyladenosine-3'-phosphate
  modified_base 7: mod_base = OTHER; note = 2'-fluoroguanosine-3'-phosphate
  modified_base 8: mod_base = OTHER; note = 2'-O-methyluridine-3'-phosphate
  modified_base 9: mod_base = OTHER; note = 2'-fluoroadenosine-3'-phosphate
  modified_base 10: mod_base = OTHER; note = 2'-O-methyladenosine-3'-phosphate
  modified_base 11: mod_base = OTHER; note = 2'-fluoroguanosine-3'-phosphate
  modified_base 12: mod_base = OTHER; note = 2'-O-methyladenosine-3'-phosphate
  modified_base 13: mod_base = OTHER; note = 2'-fluoroguanosine-3'-phosphate
  modified_base 14: mod_base = OTHER; note = 2'-O-methylcytidine-3'-phosphate
  modified_base 15: mod_base = OTHER; note = 2'-fluorouridine-3'-phosphate
  modified_base 16: mod_base = OTHER; note = 2'-O-methyladenosine-3'-phosphate
  modified_base 17: mod_base = OTHER; note = 2'-fluoroadenosine-3'-phosphate
  modified_base 18: mod_base = OTHER; note = 2'-O-methylguanosine-3'-phosphate
  modified_base 19: mod_base = OTHER; note 2'-fluorouridine-3'-phosphate-(N1-hydroxyethanol-N12[tris(G alNAc-triethyleneglycol)]-diamidodecane]
caagaagtaagagctaagt

SEQ ID NO: 1343 - RNA, 19 nt, synthetic construct
  source 1..19: mol_type = other RNA
  modified_base 1: mod_base = OTHER; note = 2'-fluoroadenosine-3'-phosphorothioate
  modified_base 2: mod_base = OTHER; note = 2'-O-methylcytidine-3'-phosphorothioate
  modified_base 3: mod_base = OTHER; note = 2'-fluorouridine-3'-phosphate
  modified_base 4: mod_base = OTHER; note = 2'-O-methyladenosine-3'-phosphate
  modified_base 5: mod_base = OTHER; note = 2'-fluorocytidine-3'-phosphate
  modified_base 6: mod_base = OTHER; note = 2'-O-methyladenosine-3'-phosphate
  modified_base 7: mod_base = OTHER; note = 2'-fluoroguanosine-3'-phosphate
  modified_base 8: mod_base = OTHER; note = 2'-O-methyladenosine-3'-phosphate
  modified_base 9: mod_base = OTHER; note = 2'-fluoroadenosine-3'-phosphate
  modified_base 10: mod_base = OTHER; note = 2'-O-methyluridine-3'-phosphate
  modified_base 11: mod_base = OTHER; note = 2'-fluoroadenosine-3'-phosphate
  modified_base 12: mod_base = OTHER; note = 2'-O-methyladenosine-3'-phosphate
  modified_base 13: mod_base = OTHER; note = 2'-fluorouridine-3'-phosphate
  modified_base 14: mod_base = OTHER; note = 2'-O-methylguanosine-3'-phosphate
  modified_base 15: mod_base = OTHER; note = 2'-fluorouridine-3'-phosphate
  modified_base 16: mod_base = OTHER; note = 2'-O-methylguanosine-3'-phosphate
  modified_base 17: mod_base = OTHER; note = 2'-fluorouridine-3'-phosphate
  modified_base 18: mod_base = OTHER; note = 2'-O-methyluridine-3'-phosphate
  modified_base 19: mod_base = OTHER; note 2'-fluoroadenosine-3'-phosphate-(N1-hydroxyethanol-N12[tris (GalNAc-triethyleneglycol)]-diamidodecane]
actacagaataatgtgtta

SEQ ID NO: 1344 - RNA, 19 nt, synthetic construct
  source 1..19: mol_type = other RNA
  modified_base 1: mod_base = OTHER; note = 2'-fluorocytidine-3'-phosphorothioate
  modified_base 2: mod_base = OTHER; note = 2'-O-methyluridine-3'-phosphorothioate
  modified_base 3: mod_base = OTHER; note = 2'-fluoroadenosine-3'-phosphate
  modified_base 4: mod_base = OTHER; note = 2'-O-methylcytidine-3'-phosphate
  modified_base 5: mod_base = OTHER; note = 2'-fluoroadenosine-3'-phosphate
  modified_base 6: mod_base = OTHER; note = 2'-O-methylguanosine-3'-phosphate
  modified_base 7: mod_base = OTHER; note = 2'-fluoroadenosine-3'-phosphate
  modified_base 8: mod_base = OTHER; note = 2'-O-methyladenosine-3'-phosphate
  modified_base 9: mod_base = OTHER; note = 2'-fluorouridine-3'-phosphate
  modified_base 10: mod_base = OTHER; note = 2'-O-methyladenosine-3'-phosphate
  modified_base 11: mod_base = OTHER; note = 2'-fluoroadenosine-3'-phosphate
  modified_base 12: mod_base = OTHER; note = 2'-O-methyluridine-3'-phosphate
  modified_base 13: mod_base = OTHER; note = 2'-fluoroguanosine-3'-phosphate
  modified_base 14: mod_base = OTHER; note = 2'-O-methyluridine-3'-phosphate
  modified_base 15: mod_base = OTHER; note = 2'-fluoroguanosine-3'-phosphate
  modified_base 16: mod_base = OTHER; note = 2'-O-methyluridine-3'-phosphate
  modified_base 17: mod_base = OTHER; note = 2'-fluorouridine-3'-phosphate
  modified_base 18: mod_base = OTHER; note = 2'-O-methyladenosine-3'-phosphate
  modified_base 19: mod_base = OTHER; note 2'-fluoroadenosine-3'-phosphate-(N1-hydroxyethanol-N12[tris (GalNAc-triethyleneglycol)]-diamidodecane]
ctacagaataatgtgttaa

SEQ ID NO: 1345 - RNA, 19 nt, synthetic construct
  source 1..19: mol_type = other RNA
  modified_base 1: mod_base = OTHER; note = 2'-fluoroadenosine-3'-phosphorothioate
  modified_base 2: mod_base = OTHER; note = 2'-O-methylguanosine-3'-phosphorothioate
  modified_base 3: mod_base = OTHER; note = 2'-fluoroadenosine-3'-phosphate
  modified_base 4: mod_base = OTHER; note = 2'-O-methylguanosine-3'-phosphate
  modified_base 5: mod_base = OTHER; note = 2'-fluoroadenosine-3'-phosphate
  modified_base 6: mod_base = OTHER; note = 2'-O-methylguanosine-3'-phosphate
  modified_base 7: mod_base = OTHER; note = 2'-fluoroguanosine-3'-phosphate
  modified_base 8: mod_base = OTHER; note = 2'-O-methylcytidine-3'-phosphate
  modified_base 9: mod_base = OTHER; note = 2'-fluorocytidine-3'-phosphate
  modified_base 10: mod_base = OTHER; note = 2'-O-methyluridine-3'-phosphate
  modified_base 11: mod_base = OTHER; note = 2'-fluorouridine-3'-phosphate
  modified_base 12: mod_base = OTHER; note = 2'-O-methyluridine-3'-phosphate
  modified_base 13: mod_base = OTHER; note = 2'-fluorouridine-3'-phosphate
  modified_base 14: mod_base = OTHER; note = 2'-O-methylguanosine-3'-phosphate
  modified_base 15: mod_base = OTHER; note = 2'-fluorouridine-3'-phosphate
  modified_base 16: mod_base = OTHER; note = 2'-O-methyluridine-3'-phosphate
  modified_base 17: mod_base = OTHER; note = 2'-fluorouridine-3'-phosphate
  modified_base 18: mod_base = OTHER; note = 2'-O-methyladenosine-3'-phosphate
  modified_base 19: mod_base = OTHER; note 2'-fluoroadenosine-3'-phosphate-(N1-hydroxyethanol-N12[tris (GalNAc-triethyleneglycol)]-diamidodecane]
agagaggccttttgtttaa

SEQ ID NO: 1346 - RNA, 19 nt, synthetic construct
  source 1..19: mol_type = other RNA
  modified_base 1: mod_base = OTHER; note = 2'-fluoroguanosine-3'-phosphorothioate
  modified_base 2: mod_base = OTHER; note = 2'-O-methyladenosine-3'-phosphorothioate
  modified_base 3: mod_base = OTHER; note = 2'-fluoroguanosine-3'-phosphate
  modified_base 4: mod_base = OTHER; note = 2'-O-methyladenosine-3'-phosphate
  modified_base 5: mod_base = OTHER; note = 2'-fluoroguanosine-3'-phosphate
  modified_base 6: mod_base = OTHER; note = 2'-O-methylguanosine-3'-phosphate
  modified_base 7: mod_base = OTHER; note = 2'-fluorocytidine-3'-phosphate
  modified_base 8: mod_base = OTHER; note = 2'-O-methylcytidine-3'-phosphate
  modified_base 9: mod_base = OTHER; note = 2'-fluorouridine-3'-phosphate
  modified_base 10: mod_base = OTHER; note = 2'-O-methyluridine-3'-phosphate
  modified_base 11: mod_base = OTHER; note = 2'-fluorouridine-3'-phosphate
  modified_base 12: mod_base = OTHER; note = 2'-O-methyluridine-3'-phosphate
  modified_base 13: mod_base = OTHER; note = 2'-fluoroguanosine-3'-phosphate
  modified_base 14: mod_base = OTHER; note = 2'-O-methyluridine-3'-phosphate
  modified_base 15: mod_base = OTHER; note = 2'-fluorouridine-3'-phosphate
  modified_base 16: mod_base = OTHER; note = 2'-O-methyluridine-3'-phosphate
  modified_base 17: mod_base = OTHER; note = 2'-fluoroadenosine-3'-phosphate
  modified_base 18: mod_base = OTHER; note = 2'-O-methyladenosine-3'-phosphate
  modified_base 19: mod_base = OTHER; note 2'-fluoroadenosine-3'-phosphate-(N1-hydroxyethanol-N12[tris (GalNAc-triethyleneglycol)]-diamidodecane]
gagaggccttttgtttaaa

SEQ ID NO: 1347 - RNA, 19 nt, synthetic construct
  source 1..19: mol_type = other RNA
  modified_base 1: mod_base = OTHER; note = 2'-fluoroadenosine-3'-phosphorothioate
  modified_base 2: mod_base = OTHER; note = 2'-O-methylguanosine-3'-phosphorothioate
  modified_base 3: mod_base = OTHER; note = 2'-fluoroadenosine-3'-phosphate
  modified_base 4: mod_base = OTHER; note = 2'-O-methylguanosine-3'-phosphate
  modified_base 5: mod_base = OTHER; note = 2'-fluoroguanosine-3'-phosphate
  modified_base 6: mod_base = OTHER; note = 2'-O-methylcytidine-3'-phosphate
  modified_base 7: mod_base = OTHER; note = 2'-fluorocytidine-3'-phosphate
  modified_base 8: mod_base = OTHER; note = 2'-O-methyluridine-3'-phosphate
  modified_base 9: mod_base = OTHER; note = 2'-fluorouridine-3'-phosphate
  modified_base 10: mod_base = OTHER; note = 2'-O-methyluridine-3'-phosphate
  modified_base 11: mod_base = OTHER; note = 2'-fluorouridine-3'-phosphate
  modified_base 12: mod_base = OTHER; note = 2'-O-methylguanosine-3'-phosphate
  modified_base 13: mod_base = OTHER; note = 2'-fluorouridine-3'-phosphate
  modified_base 14: mod_base = OTHER; note = 2'-O-methyluridine-3'-phosphate
  modified_base 15: mod_base = OTHER; note = 2'-fluorouridine-3'-phosphate
  modified_base 16: mod_base = OTHER; note = 2'-O-methyladenosine-3'-phosphate
  modified_base 17: mod_base = OTHER; note = 2'-fluoroadenosine-3'-phosphate
  modified_base 18: mod_base = OTHER; note = 2'-O-methyladenosine-3'-phosphate
  modified_base 19: mod_base = OTHER; note 2'-fluorouridine-3'-phosphate-(N1-hydroxyethanol-N12[tris(G alNAc-triethyleneglycol)]-diamidodecane]
agaggccttttgtttaaat

SEQ ID NO: 1348 - RNA, 19 nt, synthetic construct
  source 1..19: mol_type = other RNA
  modified_base 1: mod_base = OTHER; note = 2'-fluoroguanosine-3'-phosphorothioate
  modified_base 2: mod_base = OTHER; note = 2'-O-methyladenosine-3'-phosphorothioate
  modified_base 3: mod_base = OTHER; note = 2'-fluorouridine-3'-phosphate
  modified_base 4: mod_base = OTHER; note = 2'-O-methyluridine-3'-phosphate
  modified_base 5: mod_base = OTHER; note = 2'-fluoroguanosine-3'-phosphate
  modified_base 6: mod_base = OTHER; note = 2'-O-methylguanosine-3'-phosphate
  modified_base 7: mod_base = OTHER; note = 2'-fluorocytidine-3'-phosphate
  modified_base 8: mod_base = OTHER; note = 2'-O-methyluridine-3'-phosphate
  modified_base 9: mod_base = OTHER; note = 2'-fluoroadenosine-3'-phosphate
  modified_base 10: mod_base = OTHER; note = 2'-O-methyluridine-3'-phosphate
  modified_base 11: mod_base = OTHER; note = 2'-fluoroadenosine-3'-phosphate
  modified_base 12: mod_base = OTHER; note = 2'-O-methyladenosine-3'-phosphate
  modified_base 13: mod_base = OTHER; note = 2'-fluorocytidine-3'-phosphate
  modified_base 14: mod_base = OTHER; note = 2'-O-methyladenosine-3'-phosphate
  modified_base 15: mod_base = OTHER; note = 2'-fluorouridine-3'-phosphate
  modified_base 16: mod_base = OTHER; note = 2'-O-methylguanosine-3'-phosphate
  modified_base 17: mod_base = OTHER; note = 2'-fluorouridine-3'-phosphate
  modified_base 18: mod_base = OTHER; note = 2'-O-methylcytidine-3'-phosphate
  modified_base 19: mod_base = OTHER; note 2'-fluorouridine-3'-phosphate-(N1-hydroxyethanol-N12[tris(G alNAc-triethyleneglycol)]-diamidodecane]
gattggctataacatgtct

SEQ ID NO: 1349 - RNA, 19 nt, synthetic construct
  source 1..19: mol_type = other RNA
  modified_base 1: mod_base = OTHER; note = 2'-fluorouridine-3'-phosphorothioate
  modified_base 2: mod_base = OTHER; note = 2'-O-methyladenosine-3'-phosphorothioate
  modified_base 3: mod_base = OTHER; note = 2'-fluoroadenosine-3'-phosphate
  modified_base 4: mod_base = OTHER; note = 2'-O-methyladenosine-3'-phosphate
  modified_base 5: mod_base = OTHER; note = 2'-fluoroguanosine-3'-phosphate
  modified_base 6: mod_base = OTHER; note = 2'-O-methyladenosine-3'-phosphate
  modified_base 7: mod_base = OTHER; note = 2'-fluorouridine-3'-phosphate
  modified_base 8: mod_base = OTHER; note = 2'-O-methyladenosine-3'-phosphate
  modified_base 9: mod_base = OTHER; note = 2'-fluorouridine-3'-phosphate
  modified_base 10: mod_base = OTHER; note = 2'-O-methylcytidine-3'-phosphate
  modified_base 11: mod_base = OTHER; note = 2'-fluoroadenosine-3'-phosphate
  modified_base 12: mod_base = OTHER; note = 2'-O-methylguanosine-3'-phosphate
  modified_base 13: mod_base = OTHER; note = 2'-fluoroadenosine-3'-phosphate
  modified_base 14: mod_base = OTHER; note = 2'-O-methylguanosine-3'-phosphate
  modified_base 15: mod_base = OTHER; note = 2'-fluorocytidine-3'-phosphate
  modified_base 16: mod_base = OTHER; note = 2'-O-methyluridine-3'-phosphate
  modified_base 17: mod_base = OTHER; note = 2'-fluorocytidine-3'-phosphate
  modified_base 18: mod_base = OTHER; note = 2'-O-methyluridine-3'-phosphate
  modified_base 19: mod_base = OTHER; note 2'-fluorouridine-3'-phosphate-(N1-hydroxyethanol-N12[tris(G alNAc-triethyleneglycol)]-diamidodecane]
taaagatatcagagctctt

SEQ ID NO: 1350 - RNA, 19 nt, synthetic construct
  source 1..19: mol_type = other RNA
  modified_base 1: mod_base = OTHER; note = 2'-fluoroadenosine-3'-phosphorothioate
  modified_base 2: mod_base = OTHER; note = 2'-O-methylguanosine-3'-phosphorothioate
  modified_base 3: mod_base = OTHER; note = 2'-fluoroadenosine-3'-phosphate
  modified_base 4: mod_base = OTHER; note = 2'-O-methylcytidine-3'-phosphate
  modified_base 5: mod_base = OTHER; note = 2'-fluorouridine-3'-phosphate
  modified_base 6: mod_base = OTHER; note = 2'-O-methylguanosine-3'-phosphate
  modified_base 7: mod_base = OTHER; note = 2'-fluoroguanosine-3'-phosphate
  modified_base 8: mod_base = OTHER; note = 2'-O-methylguanosine-3'-phosphate
  modified_base 9: mod_base = OTHER; note = 2'-fluoroadenosine-3'-phosphate
  modified_base 10: mod_base = OTHER; note = 2'-O-methylcytidine-3'-phosphate
  modified_base 11: mod_base = OTHER; note = 2'-fluorocytidine-3'-phosphate
  modified_base 12: mod_base = OTHER; note = 2'-O-methyluridine-3'-phosphate
  modified_base 13: mod_base = OTHER; note = 2'-fluorouridine-3'-phosphate
  modified_base 14: mod_base = OTHER; note = 2'-O-methyladenosine-3'-phosphate
  modified_base 15: mod_base = OTHER; note = 2'-fluoroguanosine-3'-phosphate
  modified_base 16: mod_base = OTHER; note = 2'-O-methyladenosine-3'-phosphate
  modified_base 17: mod_base = OTHER; note = 2'-fluoroadenosine-3'-phosphate
  modified_base 18: mod_base = OTHER; note = 2'-O-methyladenosine-3'-phosphate
  modified_base 19: mod_base = OTHER; note 2'-fluorouridine-3'-phosphate-(N1-hydroxyethanol-N12[tris(G alNAc-triethyleneglycol)]-diamidodecane]
agactgggaccttagaaat

SEQ ID NO: 1351 - RNA, 19 nt, synthetic construct
  source 1..19: mol_type = other RNA
  modified_base 1: mod_base = OTHER; note = 2'-fluoroguanosine-3'-phosphorothioate
  modified_base 2: mod_base = OTHER; note = 2'-O-methylguanosine-3'-phosphorothioate
  modified_base 3: mod_base = OTHER; note = 2'-fluoroadenosine-3'-phosphate
  modified_base 4: mod_base = OTHER; note = 2'-O-methyladenosine-3'-phosphate
  modified_base 5: mod_base = OTHER; note = 2'-fluoroguanosine-3'-phosphate
  modified_base 6: mod_base = OTHER; note = 2'-O-methyluridine-3'-phosphate
  modified_base 7: mod_base = OTHER; note = 2'-fluoroguanosine-3'-phosphate
  modified_base 8: mod_base = OTHER; note = 2'-O-methyluridine-3'-phosphate
  modified_base 9: mod_base = OTHER; note = 2'-fluorouridine-3'-phosphate
  modified_base 10: mod_base = OTHER; note = 2'-O-methylcytidine-3'-phosphate
  modified_base 11: mod_base = OTHER; note = 2'-fluoroadenosine-3'-phosphate
  modified_base 12: mod_base = OTHER; note = 2'-O-methyladenosine-3'-phosphate
  modified_base 13: mod_base = OTHER; note = 2'-fluoroguanosine-3'-phosphate
  modified_base 14: mod_base = OTHER; note = 2'-O-methyladenosine-3'-phosphate
  modified_base 15: mod_base = OTHER; note = 2'-fluoroadenosine-3'-phosphate
  modified_base 16: mod_base = OTHER; note = 2'-O-methyladenosine-3'-phosphate
  modified_base 17: mod_base = OTHER; note = 2'-fluorouridine-3'-phosphate
  modified_base 18: mod_base = OTHER; note = 2'-O-methyladenosine-3'-phosphate
  modified_base 19: mod_base = OTHER; note 2'-fluoroadenosine-3'-phosphate-(N1-hydroxyethanol-N12[tris (GalNAc-triethyleneglycol)]-diamidodecane]
ggaagtgttcaagaaataa

SEQ ID NO: 1352 - RNA, 19 nt, synthetic construct
  source 1..19: mol_type = other RNA
  modified_base 1: mod_base = OTHER; note = 2'-fluoroguanosine-3'-phosphorothioate
  modified_base 2: mod_base = OTHER; note = 2'-O-methylcytidine-3'-phosphorothioate
  modified_base 3: mod_base = OTHER; note = 2'-fluoroadenosine-3'-phosphate
  modified_base 4: mod_base = OTHER; note = 2'-O-methylguanosine-3'-phosphate
  modified_base 5: mod_base = OTHER; note = 2'-fluoroadenosine-3'-phosphate
  modified_base 6: mod_base = OTHER; note = 2'-O-methylguanosine-3'-phosphate
  modified_base 7: mod_base = OTHER; note = 2'-fluorouridine-3'-phosphate
  modified_base 8: mod_base = OTHER; note = 2'-O-methyluridine-3'-phosphate
  modified_base 9: mod_base = OTHER; note = 2'-fluoroadenosine-3'-phosphate
  modified_base 10: mod_base = OTHER; note = 2'-O-methyluridine-3'-phosphate
  modified_base 11: mod_base = OTHER; note = 2'-fluorouridine-3'-phosphate
  modified_base 12: mod_base = OTHER; note = 2'-O-methylguanosine-3'-phosphate
  modified_base 13: mod_base = OTHER; note = 2'-fluoroadenosine-3'-phosphate
  modified_base 14: mod_base = OTHER; note = 2'-O-methyladenosine-3'-phosphate
  modified_base 15: mod_base = OTHER; note = 2'-fluorouridine-3'-phosphate
  modified_base 16: mod_base = OTHER; note = 2'-O-methylcytidine-3'-phosphate
  modified_base 17: mod_base = OTHER; note = 2'-fluorouridine-3'-phosphate
  modified_base 18: mod_base = OTHER; note = 2'-O-methyluridine-3'-phosphate
  modified_base 19: mod_base = OTHER; note 2'-fluoroadenosine-3'-phosphate-(N1-hydroxyethanol-N12[tris (GalNAc-triethyleneglycol)]-diamidodecane]
gcagagttattgaatctta

SEQ ID NO: 1353 - RNA, 19 nt, synthetic construct
  source 1..19: mol_type = other RNA
  modified_base 1: mod_base = OTHER; note = 2'-fluorocytidine-3'-phosphorothioate
  modified_base 2: mod_base = OTHER; note = 2'-O-methyladenosine-3'-phosphorothioate
  modified_base 3: mod_base = OTHER; note = 2'-fluoroguanosine-3'-phosphate
  modified_base 4: mod_base = OTHER; note = 2'-O-methyladenosine-3'-phosphate
  modified_base 5: mod_base = OTHER; note = 2'-fluoroguanosine-3'-phosphate
  modified_base 6: mod_base = OTHER; note = 2'-O-methyluridine-3'-phosphate
  modified_base 7: mod_base = OTHER; note = 2'-fluorouridine-3'-phosphate
  modified_base 8: mod_base = OTHER; note = 2'-O-methyladenosine-3'-phosphate
  modified_base 9: mod_base = OTHER; note = 2'-fluorouridine-3'-phosphate
  modified_base 10: mod_base = OTHER; note = 2'-O-methyluridine-3'-phosphate
  modified_base 11: mod_base = OTHER; note = 2'-fluoroguanosine-3'-phosphate
  modified_base 12: mod_base = OTHER; note = 2'-O-methyladenosine-3'-phosphate
  modified_base 13: mod_base = OTHER; note = 2'-fluoroadenosine-3'-phosphate
  modified_base 14: mod_base = OTHER; note = 2'-O-methyluridine-3'-phosphate
  modified_base 15: mod_base = OTHER; note = 2'-fluorocytidine-3'-phosphate
  modified_base 16: mod_base = OTHER; note = 2'-O-methyluridine-3'-phosphate
  modified_base 17: mod_base = OTHER; note = 2'-fluorouridine-3'-phosphate
  modified_base 18: mod_base = OTHER; note = 2'-O-methyladenosine-3'-phosphate
  modified_base 19: mod_base = OTHER; note 2'-fluoroadenosine-3'-phosphate-(N1-hydroxyethanol-N12[tris (GalNAc-triethyleneglycol)]-diamidodecane]
cagagttattgaatcttaa

SEQ ID NO: 1354 - RNA, 19 nt, synthetic construct
  source 1..19: mol_type = other RNA
  modified_base 1: mod_base = OTHER; note = 2'-fluoroguanosine-3'-phosphorothioate
  modified_base 2: mod_base = OTHER; note = 2'-O-methyladenosine-3'-phosphorothioate
  modified_base 3: mod_base = OTHER; note = 2'-fluoroguanosine-3'-phosphate
  modified_base 4: mod_base = OTHER; note = 2'-O-methyluridine-3'-phosphate
  modified_base 5: mod_base = OTHER; note = 2'-fluorouridine-3'-phosphate
  modified_base 6: mod_base = OTHER; note = 2'-O-methyladenosine-3'-phosphate
  modified_base 7: mod_base = OTHER; note = 2'-fluorouridine-3'-phosphate
  modified_base 8: mod_base = OTHER; note = 2'-O-methyluridine-3'-phosphate
  modified_base 9: mod_base = OTHER; note = 2'-fluoroguanosine-3'-phosphate
  modified_base 10: mod_base = OTHER; note = 2'-O-methyladenosine-3'-phosphate
  modified_base 11: mod_base = OTHER; note = 2'-fluoroadenosine-3'-phosphate
  modified_base 12: mod_base = OTHER; note = 2'-O-methyluridine-3'-phosphate
  modified_base 13: mod_base = OTHER; note = 2'-fluorocytidine-3'-phosphate
  modified_base 14: mod_base = OTHER; note = 2'-O-methyluridine-3'-phosphate
  modified_base 15: mod_base = OTHER; note = 2'-fluorouridine-3'-phosphate
  modified_base 16: mod_base = OTHER; note = 2'-O-methyladenosine-3'-phosphate
  modified_base 17: mod_base = OTHER; note = 2'-fluoroadenosine-3'-phosphate
  modified_base 18: mod_base = OTHER; note = 2'-O-methyluridine-3'-phosphate
  modified_base 19: mod_base = OTHER; note 2'-fluorouridine-3'-phosphate-(N1-hydroxyethanol-N12[tris(G alNAc-triethyleneglycol)]-diamidodecane]
gagttattgaatcttaatt

SEQ ID NO: 1355 - RNA, 19 nt, synthetic construct
  source 1..19: mol_type = other RNA
  modified_base 1: mod_base = OTHER; note = 2'-fluoroadenosine-3'-phosphorothioate
  modified_base 2: mod_base = OTHER; note = 2'-O-methylguanosine-3'-phosphorothioate
  modified_base 3: mod_base = OTHER; note = 2'-fluorouridine-3'-phosphate
  modified_base 4: mod_base = OTHER; note = 2'-O-methyluridine-3'-phosphate
  modified_base 5: mod_base = OTHER; note = 2'-fluoroadenosine-3'-phosphate
  modified_base 6: mod_base = OTHER; note = 2'-O-methyluridine-3'-phosphate
  modified_base 7: mod_base = OTHER; note = 2'-fluorouridine-3'-phosphate
  modified_base 8: mod_base = OTHER; note = 2'-O-methylguanosine-3'-phosphate
  modified_base 9: mod_base = OTHER; note = 2'-fluoroadenosine-3'-phosphate
  modified_base 10: mod_base = OTHER; note = 2'-O-methyladenosine-3'-phosphate
  modified_base 11: mod_base = OTHER; note = 2'-fluorouridine-3'-phosphate
  modified_base 12: mod_base = OTHER; note = 2'-O-methylcytidine-3'-phosphate
  modified_base 13: mod_base = OTHER; note = 2'-fluorouridine-3'-phosphate
  modified_base 14: mod_base = OTHER; note = 2'-O-methyluridine-3'-phosphate
  modified_base 15: mod_base = OTHER; note = 2'-fluoroadenosine-3'-phosphate
  modified_base 16: mod_base = OTHER; note = 2'-O-methyladenosine-3'-phosphate
  modified_base 17: mod_base = OTHER; note = 2'-fluorouridine-3'-phosphate
  modified_base 18: mod_base = OTHER; note = 2'-O-methyluridine-3'-phosphate
  modified_base 19: mod_base = OTHER; note 2'-fluorouridine-3'-phosphate-(N1-hydroxyethanol-N12[tris(G alNAc-triethyleneglycol)]-diamidodecane]
agttattgaatcttaattt

SEQ ID NO: 1356 - RNA, 19 nt, synthetic construct
  source 1..19: mol_type = other RNA
  modified_base 1: mod_base = OTHER; note = 2'-fluoroadenosine-3'-phosphorothioate
  modified_base 2: mod_base = OTHER; note = 2'-O-methylguanosine-3'-phosphorothioate
  modified_base 3: mod_base = OTHER; note = 2'-fluoroadenosine-3'-phosphate
  modified_base 4: mod_base = OTHER; note = 2'-O-methyladenosine-3'-phosphate
  modified_base 5: mod_base = OTHER; note = 2'-fluorocytidine-3'-phosphate
  modified_base 6: mod_base = OTHER; note = 2'-O-methyluridine-3'-phosphate
  modified_base 7: mod_base = OTHER; note = 2'-fluorocytidine-3'-phosphate
  modified_base 8: mod_base = OTHER; note = 2'-O-methylcytidine-3'-phosphate
  modified_base 9: mod_base = OTHER; note = 2'-fluorouridine-3'-phosphate
  modified_base 10: mod_base = OTHER; note = 2'-O-methyluridine-3'-phosphate
  modified_base 11: mod_base = OTHER; note = 2'-fluoroadenosine-3'-phosphate
  modified_base 12: mod_base = OTHER; note = 2'-O-methyluridine-3'-phosphate
  modified_base 13: mod_base = OTHER; note = 2'-fluorouridine-3'-phosphate
  modified_base 14: mod_base = OTHER; note = 2'-O-methyluridine-3'-phosphate
  modified_base 15: mod_base = OTHER; note = 2'-fluorouridine-3'-phosphate
  modified_base 16: mod_base = OTHER; note = 2'-O-methylguanosine-3'-phosphate
  modified_base 17: mod_base = OTHER; note = 2'-fluorouridine-3'-phosphate
  modified_base 18: mod_base = OTHER; note = 2'-O-methyladenosine-3'-phosphate
  modified_base 19: mod_base = OTHER; note 2'-fluorouridine-3'-phosphate-(N1-hydroxyethanol-N12[tris(G alNAc-triethyleneglycol)]-diamidodecane]
agaactccttattttgtat

SEQ ID NO: 1357 - RNA, 21 nt, synthetic construct
  source 1..21: mol_type = other RNA
  modified_base 1: mod_base = OTHER; note = 2'-O-methyluridine-3'-phosphorothioate
  modified_base 2: mod_base = OTHER; note = 2'-fluorouridine-3'-phosphorothioate
  modified_base 3: mod_base = OTHER; note = 2'-O-methylcytidine-3'-phosphate
  modified_base 4: mod_base = OTHER; note = 2'-fluoroguanosine-3'-phosphate
  modified_base 5: mod_base = OTHER; note = 2'-O-methyladenosine-3'-phosphate
  modified_base 6: mod_base = OTHER; note = 2'-fluoroadenosine-3'-phosphate
  modified_base 7: mod_base = OTHER; note = 2'-O-methyladenosine-3'-phosphate
  modified_base 8: mod_base = OTHER; note = 2'-fluoroadenosine-3'-phosphate
  modified_base 9: mod_base = OTHER; note = 2'-O-methyladenosine-3'-phosphate
  modified_base 10: mod_base = OTHER; note = 2'-fluoroguanosine-3'-phosphate
  modified_base 11: mod_base = OTHER; note = 2'-O-methyluridine-3'-phosphate
  modified_base 12: mod_base = OTHER; note = 2'-fluorocytidine-3'-phosphate
  modified_base 13: mod_base = OTHER; note = 2'-O-methyluridine-3'-phosphate
  modified_base 14: mod_base = OTHER; note = 2'-fluorouridine-3'-phosphate
  modified_base 15: mod_base = OTHER; note = 2'-O-methylguanosine-3'-phosphate
  modified_base 16: mod_base = OTHER; note = 2'-fluoroadenosine-3'-phosphate
  modified_base 17: mod_base = OTHER; note = 2'-O-methylcytidine-3'-phosphate
  modified_base 18: mod_base = OTHER; note = 2'-fluoroadenosine-3'-phosphate
  modified_base 19: mod_base = OTHER; note = 2'-O-methyladenosine-3'-phosphorothioate
  modified_base 20: mod_base = OTHER; note = 2'-O-methyluridine-3'-phosphorothioate
  modified_base 21: mod_base = OTHER; note = 2'-O-methyluridine
ttcgaaaaagtcttgacaatt

SEQ ID NO: 1358 - RNA, 21 nt, synthetic construct
  source 1..21: mol_type = other RNA
  modified_base 1: mod_base = OTHER; note = 2'-O-methyladenosine-3'-phosphorothioate
  modified_base 2: mod_base = OTHER; note = 2'-fluoroguanosine-3'-phosphorothioate
  modified_base 3: mod_base = OTHER; note = 2'-O-methyladenosine-3'-phosphate
  modified_base 4: mod_base = OTHER; note = 2'-fluorocytidine-3'-phosphate
  modified_base 5: mod_base = OTHER; note = 2'-O-methyladenosine-3'-phosphate
  modified_base 6: mod_base = OTHER; note = 2'-fluorouridine-3'-phosphate
  modified_base 7: mod_base = OTHER; note = 2'-O-methylguanosine-3'-phosphate
  modified_base 8: mod_base = OTHER; note = 2'-fluorouridine-3'-phosphate
  modified_base 9: mod_base = OTHER; note = 2'-O-methyluridine-3'-phosphate
  modified_base 10: mod_base = OTHER; note = 2'-fluoroadenosine-3'-phosphate
  modified_base 11: mod_base = OTHER; note = 2'-O-methyluridine-3'-phosphate
  modified_base 12: mod_base = OTHER; note = 2'-fluoroadenosine-3'-phosphate
  modified_base 13: mod_base = OTHER; note = 2'-O-methylguanosine-3'-phosphate
  modified_base 14: mod_base = OTHER; note = 2'-fluorocytidine-3'-phosphate
  modified_base 15: mod_base = OTHER; note = 2'-O-methylcytidine-3'-phosphate
  modified_base 16: mod_base = OTHER; note = 2'-fluoroadenosine-3'-phosphate
  modified_base 17: mod_base = OTHER; note = 2'-O-methyladenosine-3'-phosphate
  modified_base 18: mod_base = OTHER; note = 2'-fluorouridine-3'-phosphate
  modified_base 19: mod_base = OTHER; note = 2'-O-methylcytidine-3'-phosphorothioate
  modified_base 20: mod_base = OTHER; note = 2'-O-methyluridine-3'-phosphorothioate
  modified_base 21: mod_base = OTHER; note = 2'-O-methyluridine
agacatgttatagccaatctt

SEQ ID NO: 1359 - RNA, 21 nt, synthetic construct
  source 1..21: mol_type = other RNA
  modified_base 1: mod_base = OTHER; note = 2'-O-methyluridine-3'-phosphorothioate
  modified_base 2: mod_base = OTHER; note = 2'-fluorouridine-3'-phosphorothioate
  modified_base 3: mod_base = OTHER; note = 2'-O-methyladenosine-3'-phosphate
  modified_base 4: mod_base = OTHER; note = 2'-fluorouridine-3'-phosphate
  modified_base 5: mod_base = OTHER; note = 2'-O-methylcytidine-3'-phosphate
  modified_base 6: mod_base = OTHER; note = 2'-fluoroadenosine-3'-phosphate
  modified_base 7: mod_base = OTHER; note = 2'-O-methylcytidine-3'-phosphate
  modified_base 8: mod_base = OTHER; note = 2'-fluorouridine-3'-phosphate
  modified_base 9: mod_base = OTHER; note = 2'-O-methylguanosine-3'-phosphate
  modified_base 10: mod_base = OTHER; note = 2'-fluorocytidine-3'-phosphate
  modified_base 11: mod_base = OTHER; note = 2'-O-methylguanosine-3'-phosphate
  modified_base 12: mod_base = OTHER; note = 2'-fluoroadenosine-3'-phosphate
  modified_base 13: mod_base = OTHER; note = 2'-O-methyladenosine-3'-phosphate
  modified_base 14: mod_base = OTHER; note = 2'-fluorocytidine-3'-phosphate
  modified_base 15: mod_base = OTHER; note = 2'-O-methylcytidine-3'-phosphate
  modified_base 16: mod_base = OTHER; note = 2'-fluorocytidine-3'-phosphate
  modified_base 17: mod_base = OTHER; note = 2'-O-methyluridine-3'-phosphate
  modified_base 18: mod_base = OTHER; note = 2'-fluorouridine-3'-phosphate
  modified_base 19: mod_base = OTHER; note = 2'-O-methylcytidine-3'-phosphorothioate
  modified_base 20: mod_base = OTHER; note = 2'-O-methyluridine-3'-phosphorothioate
  modified_base 21: mod_base = OTHER; note = 2'-O-methyluridine
ttatcactgcgaacccttctt

SEQ ID NO: 1360 - RNA, 21 nt, synthetic construct
  source 1..21: mol_type = other RNA
  modified_base 1: mod_base = OTHER; note = 2'-O-methyladenosine-3'-phosphorothioate
  modified_base 2: mod_base = OTHER; note = 2'-fluorouridine-3'-phosphorothioate
  modified_base 3: mod_base = OTHER; note = 2'-O-methyluridine-3'-phosphate
  modified_base 4: mod_base = OTHER; note = 2'-fluoroadenosine-3'-phosphate
  modified_base 5: mod_base = OTHER; note = 2'-O-methyluridine-3'-phosphate
  modified_base 6: mod_base = OTHER; note = 2'-fluoroadenosine-3'-phosphate
  modified_base 7: mod_base = OTHER; note = 2'-O-methyladenosine-3'-phosphate
  modified_base 8: mod_base = OTHER; note = 2'-fluorouridine-3'-phosphate
  modified_base 9: mod_base = OTHER; note = 2'-O-methylguanosine-3'-phosphate
  modified_base 10: mod_base = OTHER; note = 2'-fluorouridine-3'-phosphate
  modified_base 11: mod_base = OTHER; note = 2'-O-methylcytidine-3'-phosphate
  modified_base 12: mod_base = OTHER; note = 2'-fluoroadenosine-3'-phosphate
  modified_base 13: mod_base = OTHER; note = 2'-O-methylcytidine-3'-phosphate
  modified_base 14: mod_base = OTHER; note = 2'-fluorouridine-3'-phosphate
  modified_base 15: mod_base = OTHER; note = 2'-O-methylguanosine-3'-phosphate
  modified_base 16: mod_base = OTHER; note = 2'-fluorocytidine-3'-phosphate
  modified_base 17: mod_base = OTHER; note = 2'-O-methyluridine-3'-phosphate
  modified_base 18: mod_base = OTHER; note = 2'-fluorocytidine-3'-phosphate
  modified_base 19: mod_base = OTHER; note = 2'-O-methyladenosine-3'-phosphorothioate
  modified_base 20: mod_base = OTHER; note = 2'-O-methyluridine-3'-phosphorothioate
  modified_base 21: mod_base = OTHER; note = 2'-O-methyluridine
attataatgtcactgctcatt

SEQ ID NO: 1361 - RNA, 21 nt, synthetic construct
  source 1..21: mol_type = other RNA
  modified_base 1: mod_base = OTHER; note = 2'-O-methyladenosine-3'-phosphorothioate
  modified_base 2: mod_base = OTHER; note = 2'-fluoroadenosine-3'-phosphorothioate
  modified_base 3: mod_base = OTHER; note = 2'-O-methylguanosine-3'-phosphate
  modified_base 4: mod_base = OTHER; note = 2'-fluoroadenosine-3'-phosphate
  modified_base 5: mod_base = OTHER; note = 2'-O-methyladenosine-3'-phosphate
  modified_base 6: mod_base = OTHER; note = 2'-fluoroguanosine-3'-phosphate
  modified_base 7: mod_base = OTHER; note = 2'-O-methyluridine-3'-phosphate
  modified_base 8: mod_base = OTHER; note = 2'-fluoroguanosine-3'-phosphate
  modified_base 9: mod_base = OTHER; note = 2'-O-methyladenosine-3'-phosphate
  modified_base 10: mod_base = OTHER; note = 2'-fluoroadenosine-3'-phosphate
  modified_base 11: mod_base = OTHER; note = 2'-O-methyluridine-3'-phosphate
  modified_base 12: mod_base = OTHER; note = 2'-fluoroguanosine-3'-phosphate
  modified_base 13: mod_base = OTHER; note = 2'-O-methyladenosine-3'-phosphate
  modified_base 14: mod_base = OTHER; note = 2'-fluorocytidine-3'-phosphate
  modified_base 15: mod_base = OTHER; note = 2'-O-methyladenosine-3'-phosphate
  modified_base 16: mod_base = OTHER; note = 2'-fluoroadenosine-3'-phosphate
  modified_base 17: mod_base = OTHER; note = 2'-O-methylcytidine-3'-phosphate
  modified_base 18: mod_base = OTHER; note = 2'-fluorouridine-3'-phosphate
  modified_base 19: mod_base = OTHER; note = 2'-O-methylguanosine-3'-phosphorothioate
  modified_base 20: mod_base = OTHER; note = 2'-O-methyluridine-3'-phosphorothioate
  modified_base 21: mod_base = OTHER; note = 2'-O-methyluridine
aagaagtgaatgacaactgtt

SEQ ID NO: 1362 - RNA, 21 nt, synthetic construct
  source 1..21: mol_type = other RNA
  modified_base 1: mod_base = OTHER; note = 2'-O-methyladenosine-3'-phosphorothioate
  modified_base 2: mod_base = OTHER; note = 2'-fluorouridine-3'-phosphorothioate
  modified_base 3: mod_base = OTHER; note = 2'-O-methylguanosine-3'-phosphate
  modified_base 4: mod_base = OTHER; note = 2'-fluoroadenosine-3'-phosphate
  modified_base 5: mod_base = OTHER; note = 2'-O-methyladenosine-3'-phosphate
  modified_base 6: mod_base = OTHER; note = 2'-fluorocytidine-3'-phosphate
  modified_base 7: mod_base = OTHER; note = 2'-O-methyladenosine-3'-phosphate
  modified_base 8: mod_base = OTHER; note = 2'-fluorocytidine-3'-phosphate
  modified_base 9: mod_base = OTHER; note = 2'-O-methylguanosine-3'-phosphate
  modified_base 10: mod_base = OTHER; note = 2'-fluoroadenosine-3'-phosphate
  modified_base 11: mod_base = OTHER; note = 2'-O-methyladenosine-3'-phosphate
  modified_base 12: mod_base = OTHER; note = 2'-fluoroguanosine-3'-phosphate
  modified_base 13: mod_base = OTHER; note = 2'-O-methyluridine-3'-phosphate
  modified_base 14: mod_base = OTHER; note = 2'-fluoroadenosine-3'-phosphate
  modified_base 15: mod_base = OTHER; note = 2'-O-methylguanosine-3'-phosphate
  modified_base 16: mod_base = OTHER; note = 2'-fluorouridine-3'-phosphate
  modified_base 17: mod_base = OTHER; note = 2'-O-methyluridine-3'-phosphate
  modified_base 18: mod_base = OTHER; note = 2'-fluoroguanosine-3'-phosphate
  modified_base 19: mod_base = OTHER; note = 2'-O-methylguanosine-3'-phosphorothioate
  modified_base 20: mod_base = OTHER; note = 2'-O-methyluridine-3'-phosphorothioate
  modified_base 21: mod_base = OTHER; note = 2'-O-methyluridine
atgaacacgaagtagttggtt

SEQ ID NO: 1363 - RNA, 21 nt, synthetic construct
  source 1..21: mol_type = other RNA
  modified_base 1: mod_base = OTHER; note = 2'-O-methyladenosine-3'-phosphorothioate
  modified_base 2: mod_base = OTHER; note = 2'-fluoroadenosine-3'-phosphorothioate
  modified_base 3: mod_base = OTHER; note = 2'-O-methyladenosine-3'-phosphate
  modified_base 4: mod_base = OTHER; note = 2'-fluoroguanosine-3'-phosphate
  modified_base 5: mod_base = OTHER; note = 2'-O-methyluridine-3'-phosphate
  modified_base 6: mod_base = OTHER; note = 2'-fluorocytidine-3'-phosphate
  modified_base 7: mod_base = OTHER; note = 2'-O-methyladenosine-3'-phosphate
  modified_base 8: mod_base = OTHER; note = 2'-fluorouridine-3'-phosphate
  modified_base 9: mod_base = OTHER; note = 2'-O-methylguanosine-3'-phosphate
  modified_base 10: mod_base = OTHER; note = 2'-fluoroadenosine-3'-phosphate
  modified_base 11: mod_base = OTHER; note = 2'-O-methyladenosine-3'-phosphate
  modified_base 12: mod_base = OTHER; note = 2'-fluorocytidine-3'-phosphate
  modified_base 13: mod_base = OTHER; note = 2'-O-methyladenosine-3'-phosphate
  modified_base 14: mod_base = OTHER; note = 2'-fluorocytidine-3'-phosphate
  modified_base 15: mod_base = OTHER; note = 2'-O-methylguanosine-3'-phosphate
  modified_base 16: mod_base = OTHER; note = 2'-fluoroadenosine-3'-phosphate
  modified_base 17: mod_base = OTHER; note = 2'-O-methyladenosine-3'-phosphate
  modified_base 18: mod_base = OTHER; note = 2'-fluoroguanosine-3'-phosphate
  modified_base 19: mod_base = OTHER; note = 2'-O-methyluridine-3'-phosphorothioate
  modified_base 20: mod_base = OTHER; note = 2'-O-methyluridine-3'-phosphorothioate
  modified_base 21: mod_base = OTHER; note = 2'-O-methyluridine
aaagtcatgaacacgaagttt

SEQ ID NO: 1364 - RNA, 21 nt, synthetic construct
  source 1..21: mol_type = other RNA
  modified_base 1: mod_base = OTHER; note = 2'-O-methyladenosine-3'-phosphorothioate
  modified_base 2: mod_base = OTHER; note = 2'-fluoroadenosine-3'-phosphorothioate
  modified_base 3: mod_base = OTHER; note = 2'-O-methylguanosine-3'-phosphate
  modified_base 4: mod_base = OTHER; note = 2'-fluoroadenosine-3'-phosphate
  modified_base 5: mod_base = OTHER; note = 2'-O-methyladenosine-3'-phosphate
  modified_base 6: mod_base = OTHER; note = 2'-fluoroadenosine-3'-phosphate
  modified_base 7: mod_base = OTHER; note = 2'-O-methylguanosine-3'-phosphate
  modified_base 8: mod_base = OTHER; note = 2'-fluorouridine-3'-phosphate
  modified_base 9: mod_base = OTHER; note = 2'-O-methylcytidine-3'-phosphate
  modified_base 10: mod_base = OTHER; note = 2'-fluoroadenosine-3'-phosphate
  modified_base 11: mod_base = OTHER; note = 2'-O-methyluridine-3'-phosphate
  modified_base 12: mod_base = OTHER; note = 2'-fluoroguanosine-3'-phosphate
  modified_base 13: mod_base = OTHER; note = 2'-O-methyladenosine-3'-phosphate
  modified_base 14: mod_base = OTHER; note = 2'-fluoroadenosine-3'-phosphate
  modified_base 15: mod_base = OTHER; note = 2'-O-methylcytidine-3'-phosphate
  modified_base 16: mod_base = OTHER; note = 2'-fluoroadenosine-3'-phosphate
  modified_base 17: mod_base = OTHER; note = 2'-O-methylcytidine-3'-phosphate
  modified_base 18: mod_base = OTHER; note = 2'-fluoroguanosine-3'-phosphate
  modified_base 19: mod_base = OTHER; note = 2'-O-methyladenosine-3'-phosphorothioate
  modified_base 20: mod_base = OTHER; note = 2'-O-methyluridine-3'-phosphorothioate
  modified_base 21: mod_base = OTHER; note = 2'-O-methyluridine
aagaaagtcatgaacacgatt

SEQ ID NO: 1365 - RNA, 21 nt, synthetic construct
  source 1..21: mol_type = other RNA
  modified_base 1: mod_base = OTHER; note = 2'-O-methyladenosine-3'-phosphorothioate
  modified_base 2: mod_base = OTHER; note = 2'-fluorouridine-3'-phosphorothioate
  modified_base 3: mod_base = OTHER; note = 2'-O-methylcytidine-3'-phosphate
  modified_base 4: mod_base = OTHER; note = 2'-fluorouridine-3'-phosphate
  modified_base 5: mod_base = OTHER; note = 2'-O-methylguanosine-3'-phosphate
  modified_base 6: mod_base = OTHER; note = 2'-fluorouridine-3'-phosphate
  modified_base 7: mod_base = OTHER; note = 2'-O-methyluridine-3'-phosphate
  modified_base 8: mod_base = OTHER; note = 2'-fluorouridine-3'-phosphate
  modified_base 9: mod_base = OTHER; note = 2'-O-methylcytidine-3'-phosphate
  modified_base 10: mod_base = OTHER; note = 2'-fluoroadenosine-3'-phosphate
  modified_base 11: mod_base = OTHER; note = 2'-O-methylguanosine-3'-phosphate
  modified_base 12: mod_base = OTHER; note = 2'-fluorocytidine-3'-phosphate
  modified_base 13: mod_base = OTHER; note = 2'-O-methylcytidine-3'-phosphate
  modified_base 14: mod_base = OTHER; note = 2'-fluoroadenosine-3'-phosphate
  modified_base 15: mod_base = OTHER; note = 2'-O-methylcytidine-3'-phosphate
  modified_base 16: mod_base = OTHER; note = 2'-fluorouridine-3'-phosphate
  modified_base 17: mod_base = OTHER; note = 2'-O-methyladenosine-3'-phosphate
  modified_base 18: mod_base = OTHER; note = 2'-fluoroadenosine-3'-phosphate
  modified_base 19: mod_base = OTHER; note = 2'-O-methylguanosine-3'-phosphorothioate
  modified_base 20: mod_base = OTHER; note = 2'-O-methyluridine-3'-phosphorothioate
  modified_base 21: mod_base = OTHER; note = 2'-O-methyluridine
atctgtttcagccactaagtt

SEQ ID NO: 1366 - RNA, 21 nt, synthetic construct
  source 1..21: mol_type = other RNA
  modified_base 1: mod_base = OTHER; note = 2'-O-methyladenosine-3'-phosphorothioate
  modified_base 2: mod_base = OTHER; note = 2'-fluorocytidine-3'-phosphorothioate
  modified_base 3: mod_base = OTHER; note = 2'-O-methyluridine-3'-phosphate
  modified_base 4: mod_base = OTHER; note = 2'-fluoroadenosine-3'-phosphate
  modified_base 5: mod_base = OTHER; note = 2'-O-methyladenosine-3'-phosphate
  modified_base 6: mod_base = OTHER; note = 2'-fluorocytidine-3'-phosphate
  modified_base 7: mod_base = OTHER; note = 2'-O-methyluridine-3'-phosphate
  modified_base 8: mod_base = OTHER; note = 2'-fluoroguanosine-3'-phosphate
  modified_base 9: mod_base = OTHER; note = 2'-O-methylguanosine-3'-phosphate
  modified_base 10: mod_base = OTHER; note = 2'-fluoroadenosine-3'-phosphate
  modified_base 11: mod_base = OTHER; note = 2'-O-methyluridine-3'-phosphate
  modified_base 12: mod_base = OTHER; note = 2'-fluoroguanosine-3'-phosphate
  modified_base 13: mod_base = OTHER; note = 2'-O-methyladenosine-3'-phosphate
  modified_base 14: mod_base = OTHER; note = 2'-fluorouridine-3'-phosphate
  modified_base 15: mod_base = OTHER; note = 2'-O-methylcytidine-3'-phosphate
  modified_base 16: mod_base = OTHER; note = 2'-fluorouridine-3'-phosphate
  modified_base 17: mod_base = OTHER; note = 2'-O-methylcytidine-3'-phosphate
  modified_base 18: mod_base = OTHER; note = 2'-fluoroadenosine-3'-phosphate
  modified_base 19: mod_base = OTHER; note = 2'-O-methylguanosine-3'-phosphorothioate
  modified_base 20: mod_base = OTHER; note = 2'-O-methyluridine-3'-phosphorothioate
  modified_base 21: mod_base = OTHER; note = 2'-O-methyluridine
actaactggatgatctcagtt

SEQ ID NO: 1367 - RNA, 21 nt, synthetic construct
  source 1..21: mol_type = other RNA
  modified_base 1: mod_base = OTHER; note = 2'-O-methyladenosine-3'-phosphorothioate
  modified_base 2: mod_base = OTHER; note = 2'-fluoroguanosine-3'-phosphorothioate
  modified_base 3: mod_base = OTHER; note = 2'-O-methyladenosine-3'-phosphate
  modified_base 4: mod_base = OTHER; note = 2'-fluoroguanosine-3'-phosphate
  modified_base 5: mod_base = OTHER; note = 2'-O-methyluridine-3'-phosphate
  modified_base 6: mod_base = OTHER; note = 2'-fluorouridine-3'-phosphate
  modified_base 7: mod_base = OTHER; note = 2'-O-methyluridine-3'-phosphate
  modified_base 8: mod_base = OTHER; note = 2'-fluorocytidine-3'-phosphate
  modified_base 9: mod_base = OTHER; note = 2'-O-methylcytidine-3'-phosphate
  modified_base 10: mod_base = OTHER; note = 2'-fluoroadenosine-3'-phosphate
  modified_base 11: mod_base = OTHER; note = 2'-O-methyladenosine-3'-phosphate
  modified_base 12: mod_base = OTHER; note = 2'-fluorocytidine-3'-phosphate
  modified_base 13: mod_base = OTHER; note = 2'-O-methyluridine-3'-phosphate
  modified_base 14: mod_base = OTHER; note = 2'-fluorouridine-3'-phosphate
  modified_base 15: mod_base = OTHER; note = 2'-O-methylguanosine-3'-phosphate
  modified_base 16: mod_base = OTHER; note = 2'-fluorouridine-3'-phosphate
  modified_base 17: mod_base = OTHER; note = 2'-O-methyladenosine-3'-phosphate
  modified_base 18: mod_base = OTHER; note = 2'-fluoroguanosine-3'-phosphate
  modified_base 19: mod_base = OTHER; note = 2'-O-methylguanosine-3'-phosphorothioate
  modified_base 20: mod_base = OTHER; note = 2'-O-methyluridine-3'-phosphorothioate
  modified_base 21: mod_base = OTHER; note = 2'-O-methyluridine
agagtttccaacttgtaggtt

SEQ ID NO: 1368 - RNA, 21 nt, synthetic construct
  source 1..21: mol_type = other RNA
  modified_base 1: mod_base = OTHER; note = 2'-O-methyladenosine-3'-phosphorothioate
  modified_base 2: mod_base = OTHER; note = 2'-fluorouridine-3'-phosphorothioate
  modified_base 3: mod_base = OTHER; note = 2'-O-methylcytidine-3'-phosphate
  modified_base 4: mod_base = OTHER; note = 2'-fluoroadenosine-3'-phosphate
  modified_base 5: mod_base = OTHER; note = 2'-O-methylguanosine-3'-phosphate
  modified_base 6: mod_base = OTHER; note = 2'-fluoroadenosine-3'-phosphate
  modified_base 7: mod_base = OTHER; note = 2'-O-methylguanosine-3'-phosphate
  modified_base 8: mod_base = OTHER; note = 2'-fluorouridine-3'-phosphate
  modified_base 9: mod_base = OTHER; note = 2'-O-methyluridine-3'-phosphate
  modified_base 10: mod_base = OTHER; note = 2'-fluorouridine-3'-phosphate
  modified_base 11: mod_base = OTHER; note = 2'-O-methylcytidine-3'-phosphate
  modified_base 12: mod_base = OTHER; note = 2'-fluorocytidine-3'-phosphate
  modified_base 13: mod_base = OTHER; note = 2'-O-methyladenosine-3'-phosphate
  modified_base 14: mod_base = OTHER; note = 2'-fluoroadenosine-3'-phosphate
  modified_base 15: mod_base = OTHER; note = 2'-O-methylcytidine-3'-phosphate
  modified_base 16: mod_base = OTHER; note = 2'-fluorouridine-3'-phosphate
  modified_base 17: mod_base = OTHER; note = 2'-O-methyluridine-3'-phosphate
  modified_base 18: mod_base = OTHER; note = 2'-fluoroguanosine-3'-phosphate
  modified_base 19: mod_base = OTHER; note = 2'-O-methyluridine-3'-phosphorothioate
  modified_base 20: mod_base = OTHER; note = 2'-O-methyluridine-3'-phosphorothioate
  modified_base 21: mod_base = OTHER; note = 2'-O-methyluridine
atcagagtttccaacttgttt

SEQ ID NO: 1369 - RNA, 21 nt, synthetic construct
  source 1..21: mol_type = other RNA
  modified_base 1: mod_base = OTHER; note = 2'-O-methyladenosine-3'-phosphorothioate
  modified_base 2: mod_base = OTHER; note = 2'-fluoroadenosine-3'-phosphorothioate
  modified_base 3: mod_base = OTHER; note = 2'-O-methyluridine-3'-phosphate
  modified_base 4: mod_base = OTHER; note = 2'-fluoroadenosine-3'-phosphate
  modified_base 5: mod_base = OTHER; note = 2'-O-methylguanosine-3'-phosphate
  modified_base 6: mod_base = OTHER; note = 2'-fluoroadenosine-3'-phosphate
  modified_base 7: mod_base = OTHER; note = 2'-O-methyluridine-3'-phosphate
  modified_base 8: mod_base = OTHER; note = 2'-fluoroadenosine-3'-phosphate
  modified_base 9: mod_base = OTHER; note = 2'-O-methylcytidine-3'-phosphate
  modified_base 10: mod_base = OTHER; note = 2'-fluoroadenosine-3'-phosphate
  modified_base 11: mod_base = OTHER; note = 2'-O-methylcytidine-3'-phosphate
  modified_base 12: mod_base = OTHER; note = 2'-fluorocytidine-3'-phosphate
  modified_base 13: mod_base = OTHER; note = 2'-O-methyladenosine-3'-phosphate
  modified_base 14: mod_base = OTHER; note = 2'-fluorocytidine-3'-phosphate
  modified_base 15: mod_base = OTHER; note = 2'-O-methylguanosine-3'-phosphate
  modified_base 16: mod_base = OTHER; note = 2'-fluorocytidine-3'-phosphate
  modified_base 17: mod_base = OTHER; note = 2'-O-methyluridine-3'-phosphate
  modified_base 18: mod_base = OTHER; note = 2'-fluorocytidine-3'-phosphate
  modified_base 19: mod_base = OTHER; note = 2'-O-methyladenosine-3'-phosphorothioate
  modified_base 20: mod_base = OTHER; note = 2'-O-methyluridine-3'-phosphorothioate
  modified_base 21: mod_base = OTHER; note = 2'-O-methyluridine
aatagatacaccacgctcatt

SEQ ID NO: 1370 - RNA, 21 nt, synthetic construct
  source 1..21: mol_type = other RNA
  modified_base 1: mod_base = OTHER; note = 2'-O-methyladenosine-3'-phosphorothioate
  modified_base 2: mod_base = OTHER; note = 2'-fluoroguanosine-3'-phosphorothioate
  modified_base 3: mod_base = OTHER; note = 2'-O-methyladenosine-3'-phosphate
  modified_base 4: mod_base = OTHER; note = 2'-fluorocytidine-3'-phosphate
  modified_base 5: mod_base = OTHER; note = 2'-O-methylguanosine-3'-phosphate
  modified_base 6: mod_base = OTHER; note = 2'-fluorouridine-3'-phosphate
  modified_base 7: mod_base = OTHER; note = 2'-O-methylguanosine-3'-phosphate
  modified_base 8: mod_base = OTHER; note = 2'-fluorocytidine-3'-phosphate
  modified_base 9: mod_base = OTHER; note = 2'-O-methyladenosine-3'-phosphate
  modified_base 10: mod_base = OTHER; note = 2'-fluoroadenosine-3'-phosphate
  modified_base 11: mod_base = OTHER; note = 2'-O-methyladenosine-3'-phosphate
  modified_base 12: mod_base = OTHER; note = 2'-fluorouridine-3'-phosphate
  modified_base 13: mod_base = OTHER; note = 2'-O-methylcytidine-3'-phosphate
  modified_base 14: mod_base = OTHER; note = 2'-fluorouridine-3'-phosphate
  modified_base 15: mod_base = OTHER; note = 2'-O-methylguanosine-3'-phosphate
  modified_base 16: mod_base = OTHER; note = 2'-fluorocytidine-3'-phosphate
  modified_base 17: mod_base = OTHER; note = 2'-O-methyluridine-3'-phosphate
  modified_base 18: mod_base = OTHER; note = 2'-fluoroadenosine-3'-phosphate
  modified_base 19: mod_base = OTHER; note = 2'-O-methylguanosine-3'-phosphorothioate
  modified_base 20: mod_base = OTHER; note = 2'-O-methyluridine-3'-phosphorothioate
  modified_base 21: mod_base = OTHER; note = 2'-O-methyluridine
agacgtgcaaatctgctagtt

SEQ ID NO: 1371 - RNA, 21 nt, synthetic construct
  source 1..21: mol_type = other RNA
  modified_base 1: mod_base = OTHER; note = 2'-O-methyluridine-3'-phosphorothioate
  modified_base 2: mod_base = OTHER; note = 2'-fluoroadenosine-3'-phosphorothioate
  modified_base 3: mod_base = OTHER; note = 2'-O-methylcytidine-3'-phosphate
  modified_base 4: mod_base = OTHER; note = 2'-fluoroadenosine-3'-phosphate
  modified_base 5: mod_base = OTHER; note = 2'-O-methyladenosine-3'-phosphate
  modified_base 6: mod_base = OTHER; note = 2'-fluorouridine-3'-phosphate
  modified_base 7: mod_base = OTHER; note = 2'-O-methyladenosine-3'-phosphate
  modified_base 8: mod_base = OTHER; note = 2'-fluoroguanosine-3'-phosphate
  modified_base 9: mod_base = OTHER; note = 2'-O-methyluridine-3'-phosphate
  modified_base 10: mod_base = OTHER; note = 2'-fluorouridine-3'-phosphate
  modified_base 11: mod_base = OTHER; note = 2'-O-methyladenosine-3'-phosphate
  modified_base 12: mod_base = OTHER; note = 2'-fluorocytidine-3'-phosphate
  modified_base 13: mod_base = OTHER; note = 2'-O-methylcytidine-3'-phosphate
  modified_base 14: mod_base = OTHER; note = 2'-fluoroadenosine-3'-phosphate
  modified_base 15: mod_base = OTHER; note = 2'-O-methylcytidine-3'-phosphate
  modified_base 16: mod_base = OTHER; note = 2'-fluorouridine-3'-phosphate
  modified_base 17: mod_base = OTHER; note = 2'-O-methyladenosine-3'-phosphate
  modified_base 18: mod_base = OTHER; note = 2'-fluoroadenosine-3'-phosphate
  modified_base 19: mod_base = OTHER; note = 2'-O-methylcytidine-3'-phosphorothioate
  modified_base 20: mod_base = OTHER; note = 2'-O-methyluridine-3'-phosphorothioate
  modified_base 21: mod_base = OTHER; note = 2'-O-methyluridine
tacaatagttaccactaactt

SEQ ID NO: 1372 - RNA, 21 nt, synthetic construct
  source 1..21: mol_type = other RNA
  modified_base 1: mod_base = OTHER; note = 2'-O-methyluridine-3'-phosphorothioate
  modified_base 2: mod_base = OTHER; note = 2'-fluorouridine-3'-phosphorothioate
  modified_base 3: mod_base = OTHER; note = 2'-O-methyluridine-3'-phosphate
  modified_base 4: mod_base = OTHER; note = 2'-fluoroadenosine-3'-phosphate
  modified_base 5: mod_base = OTHER; note = 2'-O-methyladenosine-3'-phosphate
  modified_base 6: mod_base = OTHER; note = 2'-fluorouridine-3'-phosphate
  modified_base 7: mod_base = OTHER; note = 2'-O-methyladenosine-3'-phosphate
  modified_base 8: mod_base = OTHER; note = 2'-fluorocytidine-3'-phosphate
  modified_base 9: mod_base = OTHER; note = 2'-O-methyluridine-3'-phosphate
  modified_base 10: mod_base = OTHER; note = 2'-fluorouridine-3'-phosphate
  modified_base 11: mod_base = OTHER; note = 2'-O-methylcytidine-3'-phosphate
  modified_base 12: mod_base = OTHER; note = 2'-fluorouridine-3'-phosphate
  modified_base 13: mod_base = OTHER; note = 2'-O-methylcytidine-3'-phosphate
  modified_base 14: mod_base = OTHER; note = 2'-fluorouridine-3'-phosphate
  modified_base 15: mod_base = OTHER; note = 2'-O-methylguanosine-3'-phosphate
  modified_base 16: mod_base = OTHER; note = 2'-fluoroadenosine-3'-phosphate
  modified_base 17: mod_base = OTHER; note = 2'-O-methylcytidine-3'-phosphate
  modified_base 18: mod_base = OTHER; note = 2'-fluoroadenosine-3'-phosphate
  modified_base 19: mod_base = OTHER; note = 2'-O-methyladenosine-3'-phosphorothioate
  modified_base 20: mod_base = OTHER; note = 2'-O-methyluridine-3'-phosphorothioate
  modified_base 21: mod_base = OTHER; note = 2'-O-methyluridine
tttaatacttctctgacaatt

SEQ ID NO: 1373 - RNA, 21 nt, synthetic construct
  source 1..21: mol_type = other RNA
  modified_base 1: mod_base = OTHER; note = 2'-O-methyluridine-3'-phosphorothioate
  modified_base 2: mod_base = OTHER; note = 2'-fluoroadenosine-3'-phosphorothioate
  modified_base 3: mod_base = OTHER; note = 2'-O-methylguanosine-3'-phosphate
  modified_base 4: mod_base = OTHER; note = 2'-fluorouridine-3'-phosphate
  modified_base 5: mod_base = OTHER; note = 2'-O-methylcytidine-3'-phosphate
  modified_base 6: mod_base = OTHER; note = 2'-fluorouridine-3'-phosphate
  modified_base 7: mod_base = OTHER; note = 2'-O-methyluridine-3'-phosphate
  modified_base 8: mod_base = OTHER; note = 2'-fluorouridine-3'-phosphate
  modified_base 9: mod_base = OTHER; note = 2'-O-methyladenosine-3'-phosphate
  modified_base 10: mod_base = OTHER; note = 2'-fluoroadenosine-3'-phosphate
  modified_base 11: mod_base = OTHER; note = 2'-O-methyluridine-3'-phosphate
  modified_base 12: mod_base = OTHER; note = 2'-fluoroadenosine-3'-phosphate
  modified_base 13: mod_base = OTHER; note = 2'-O-methylcytidine-3'-phosphate
  modified_base 14: mod_base = OTHER; note = 2'-fluorouridine-3'-phosphate
  modified_base 15: mod_base = OTHER; note = 2'-O-methyluridine-3'-phosphate
  modified_base 16: mod_base = OTHER; note = 2'-fluorocytidine-3'-phosphate
  modified_base 17: mod_base = OTHER; note = 2'-O-methyluridine-3'-phosphate
  modified_base 18: mod_base = OTHER; note = 2'-fluorocytidine-3'-phosphate
  modified_base 19: mod_base = OTHER; note = 2'-O-methyluridine-3'-phosphorothioate
  modified_base 20: mod_base = OTHER; note = 2'-O-methyluridine-3'-phosphorothioate
  modified_base 21: mod_base = OTHER; note = 2'-O-methyluridine
tagtctttaatacttctcttt

SEQ ID NO: 1374 - RNA, 21 nt, synthetic construct
  source 1..21: mol_type = other RNA
  modified_base 1: mod_base = OTHER; note = 2'-O-methyluridine-3'-phosphorothioate
  modified_base 2: mod_base = OTHER; note = 2'-fluoroadenosine-3'-phosphorothioate
  modified_base 3: mod_base = OTHER; note = 2'-O-methylcytidine-3'-phosphate
  modified_base 4: mod_base = OTHER; note = 2'-fluorocytidine-3'-phosphate
  modified_base 5: mod_base = OTHER; note = 2'-O-methyladenosine-3'-phosphate
  modified_base 6: mod_base = OTHER; note = 2'-fluoroadenosine-3'-phosphate
  modified_base 7: mod_base = OTHER; note = 2'-O-methylcytidine-3'-phosphate
  modified_base 8: mod_base = OTHER; note = 2'-fluoroadenosine-3'-phosphate
  modified_base 9: mod_base = OTHER; note = 2'-O-methyluridine-3'-phosphate
  modified_base 10: mod_base = OTHER; note = 2'-fluorouridine-3'-phosphate
  modified_base 11: mod_base = OTHER; note = 2'-O-methylcytidine-3'-phosphate
  modified_base 12: mod_base = OTHER; note = 2'-fluorouridine-3'-phosphate
  modified_base 13: mod_base = OTHER; note = 2'-O-methylguanosine-3'-phosphate
  modified_base 14: mod_base = OTHER; note = 2'-fluorouridine-3'-phosphate
  modified_base 15: mod_base = OTHER; note = 2'-O-methylguanosine-3'-phosphate
  modified_base 16: mod_base = OTHER; note = 2'-fluorocytidine-3'-phosphate
  modified_base 17: mod_base = OTHER; note = 2'-O-methyluridine-3'-phosphate
  modified_base 18: mod_base = OTHER; note = 2'-fluoroguanosine-3'-phosphate
  modified_base 19: mod_base = OTHER; note = 2'-O-methylcytidine-3'-phosphorothioate
  modified_base 20: mod_base = OTHER; note = 2'-O-methyluridine-3'-phosphorothioate
  modified_base 21: mod_base = OTHER; note = 2'-O-methyluridine
taccaacattctgtgctgctt

SEQ ID NO: 1375 - RNA, 21 nt, synthetic construct
  source 1..21: mol_type = other RNA
  modified_base 1: mod_base = OTHER; note = 2'-O-methyluridine-3'-phosphorothioate
  modified_base 2: mod_base = OTHER; note = 2'-fluoroguanosine-3'-phosphorothioate
  modified_base 3: mod_base = OTHER; note = 2'-O-methyladenosine-3'-phosphate
  modified_base 4: mod_base = OTHER; note = 2'-fluorouridine-3'-phosphate
  modified_base 5: mod_base = OTHER; note = 2'-O-methyladenosine-3'-phosphate
  modified_base 6: mod_base = OTHER; note = 2'-fluorouridine-3'-phosphate
  modified_base 7: mod_base = OTHER; note = 2'-O-methyladenosine-3'-phosphate
  modified_base 8: mod_base = OTHER; note = 2'-fluorouridine-3'-phosphate
  modified_base 9: mod_base = OTHER; note = 2'-O-methyladenosine-3'-phosphate
  modified_base 10: mod_base = OTHER; note = 2'-fluoroadenosine-3'-phosphate
  modified_base 11: mod_base = OTHER; note = 2'-O-methyladenosine-3'-phosphate
  modified_base 12: mod_base = OTHER; note = 2'-fluorouridine-3'-phosphate
  modified_base 13: mod_base = OTHER; note = 2'-O-methylcytidine-3'-phosphate
  modified_base 14: mod_base = OTHER; note = 2'-fluorouridine-3'-phosphate
  modified_base 15: mod_base = OTHER; note = 2'-O-methyluridine-3'-phosphate
  modified_base 16: mod_base = OTHER; note = 2'-fluorocytidine-3'-phosphate
  modified_base 17: mod_base = OTHER; note = 2'-O-methyladenosine-3'-phosphate
  modified_base 18: mod_base = OTHER; note = 2'-fluorouridine-3'-phosphate
  modified_base 19: mod_base = OTHER; note = 2'-O-methyluridine-3'-phosphorothioate
  modified_base 20: mod_base = OTHER; note = 2'-O-methyluridine-3'-phosphorothioate
  modified_base 21: mod_base = OTHER; note = 2'-O-methyluridine
tgatatataaatcttcatttt

SEQ ID NO: 1376 - RNA, 21 nt, synthetic construct
  source 1..21: mol_type = other RNA
  modified_base 1: mod_base = OTHER; note = 2'-O-methyluridine-3'-phosphorothioate
  modified_base 2: mod_base = OTHER; note = 2'-fluoroguanosine-3'-phosphorothioate
  modified_base 3: mod_base = OTHER; note = 2'-O-methyladenosine-3'-phosphate
  modified_base 4: mod_base = OTHER; note = 2'-fluoroadenosine-3'-phosphate
  modified_base 5: mod_base = OTHER; note = 2'-O-methylcytidine-3'-phosphate
  modified_base 6: mod_base = OTHER; note = 2'-fluoroadenosine-3'-phosphate
  modified_base 7: mod_base = OTHER; note = 2'-O-methylcytidine-3'-phosphate
  modified_base 8: mod_base = OTHER; note = 2'-fluorocytidine-3'-phosphate
  modified_base 9: mod_base = OTHER; note = 2'-O-methyluridine-3'-phosphate
  modified_base 10: mod_base = OTHER; note = 2'-fluoroadenosine-3'-phosphate
  modified_base 11: mod_base = OTHER; note = 2'-O-methylguanosine-3'-phosphate
  modified_base 12: mod_base = OTHER; note = 2'-fluorocytidine-3'-phosphate
  modified_base 13: mod_base = OTHER; note = 2'-O-methyladenosine-3'-phosphate
  modified_base 14: mod_base = OTHER; note = 2'-fluorouridine-3'-phosphate
  modified_base 15: mod_base = OTHER; note = 2'-O-methylcytidine-3'-phosphate
  modified_base 16: mod_base = OTHER; note = 2'-fluorouridine-3'-phosphate
  modified_base 17: mod_base = OTHER; note = 2'-O-methylguanosine-3'-phosphate
  modified_base 18: mod_base = OTHER; note = 2'-fluorocytidine-3'-phosphate
  modified_base 19: mod_base = OTHER; note = 2'-O-methyladenosine-3'-phosphorothioate
  modified_base 20: mod_base = OTHER; note = 2'-O-methyluridine-3'-phosphorothioate
  modified_base 21: mod_base = OTHER; note = 2'-O-methyluridine
tgaacacctagcatctgcatt

SEQ ID NO: 1377 - RNA, 21 nt, synthetic construct
  source 1..21: mol_type = other RNA
  modified_base 1: mod_base = OTHER; note = 2'-O-methyluridine-3'-phosphorothioate
  modified_base 2: mod_base = OTHER; note = 2'-fluorouridine-3'-phosphorothioate
  modified_base 3: mod_base = OTHER; note = 2'-O-methylguanosine-3'-phosphate
  modified_base 4: mod_base = OTHER; note = 2'-fluoroadenosine-3'-phosphate
  modified_base 5: mod_base = OTHER; note = 2'-O-methyladenosine-3'-phosphate
  modified_base 6: mod_base = OTHER; note = 2'-fluorocytidine-3'-phosphate
  modified_base 7: mod_base = OTHER; note = 2'-O-methyladenosine-3'-phosphate
  modified_base 8: mod_base = OTHER; note = 2'-fluorocytidine-3'-phosphate
  modified_base 9: mod_base = OTHER; note = 2'-O-methylcytidine-3'-phosphate
  modified_base 10: mod_base = OTHER; note = 2'-fluorouridine-3'-phosphate
  modified_base 11: mod_base = OTHER; note = 2'-O-methyladenosine-3'-phosphate
  modified_base 12: mod_base = OTHER; note = 2'-fluoroguanosine-3'-phosphate
  modified_base 13: mod_base = OTHER; note = 2'-O-methylcytidine-3'-phosphate
  modified_base 14: mod_base = OTHER; note = 2'-fluoroadenosine-3'-phosphate
  modified_base 15: mod_base = OTHER; note = 2'-O-methyluridine-3'-phosphate
  modified_base 16: mod_base = OTHER; note = 2'-fluorocytidine-3'-phosphate
  modified_base 17: mod_base = OTHER; note = 2'-O-methyluridine-3'-phosphate
  modified_base 18: mod_base = OTHER; note = 2'-fluoroguanosine-3'-phosphate
  modified_base 19: mod_base = OTHER; note = 2'-O-methylcytidine-3'-phosphorothioate
  modified_base 20: mod_base = OTHER; note = 2'-O-methyluridine-3'-phosphorothioate
  modified_base 21: mod_base = OTHER; note = 2'-O-methyluridine
ttgaacacctagcatctgctt

SEQ ID NO: 1378 - RNA, 21 nt, synthetic construct
  source 1..21: mol_type = other RNA
  modified_base 1: mod_base = OTHER; note = 2'-O-methyluridine-3'-phosphorothioate
  modified_base 2: mod_base = OTHER; note = 2'-fluoroadenosine-3'-phosphorothioate
  modified_base 3: mod_base = OTHER; note = 2'-O-methyluridine-3'-phosphate
  modified_base 4: mod_base = OTHER; note = 2'-fluorocytidine-3'-phosphate
  modified_base 5: mod_base = OTHER; note = 2'-O-methyluridine-3'-phosphate
  modified_base 6: mod_base = OTHER; note = 2'-fluorouridine-3'-phosphate
  modified_base 7: mod_base = OTHER; note = 2'-O-methyluridine-3'-phosphate
  modified_base 8: mod_base = OTHER; note = 2'-fluoroguanosine-3'-phosphate
  modified_base 9: mod_base = OTHER; note = 2'-O-methylcytidine-3'-phosphate
  modified_base 10: mod_base = OTHER; note = 2'-fluoroadenosine-3'-phosphate
  modified_base 11: mod_base = OTHER; note = 2'-O-methyluridine-3'-phosphate
  modified_base 12: mod_base = OTHER; note = 2'-fluoroguanosine-3'-phosphate
  modified_base 13: mod_base = OTHER; note = 2'-O-methylcytidine-3'-phosphate
  modified_base 14: mod_base = OTHER; note = 2'-fluorouridine-3'-phosphate
  modified_base 15: mod_base = OTHER; note = 2'-O-methylcytidine-3'-phosphate
  modified_base 16: mod_base = OTHER; note = 2'-fluorocytidine-3'-phosphate
  modified_base 17: mod_base = OTHER; note = 2'-O-methyluridine-3'-phosphate
  modified_base 18: mod_base = OTHER; note = 2'-fluorouridine-3'-phosphate
  modified_base 19: mod_base = OTHER; note = 2'-O-methylguanosine-3'-phosphorothioate
  modified_base 20: mod_base = OTHER; note = 2'-O-methyluridine-3'-phosphorothioate
  modified_base 21: mod_base = OTHER; note = 2'-O-methyluridine
tatctttgcatgctccttgtt

SEQ ID NO: 1379 - RNA, 21 nt, synthetic construct
  source 1..21: mol_type = other RNA
  modified_base 1: mod_base = OTHER; note = 2'-O-methyladenosine-3'-phosphorothioate
  modified_base 2: mod_base = OTHER; note = 2'-fluoroadenosine-3'-phosphorothioate
  modified_base 3: mod_base = OTHER; note = 2'-O-methyluridine-3'-phosphate
  modified_base 4: mod_base = OTHER; note = 2'-fluorouridine-3'-phosphate
  modified_base 5: mod_base = OTHER; note = 2'-O-methylcytidine-3'-phosphate
  modified_base 6: mod_base = OTHER; note = 2'-fluoroguanosine-3'-phosphate
  modified_base 7: mod_base = OTHER; note = 2'-O-methylguanosine-3'-phosphate
  modified_base 8: mod_base = OTHER; note = 2'-fluoroguanosine-3'-phosphate
  modified_base 9: mod_base = OTHER; note = 2'-O-methylcytidine-3'-phosphate
  modified_base 10: mod_base = OTHER; note = 2'-fluoroadenosine-3'-phosphate
  modified_base 11: mod_base = OTHER; note = 2'-O-methyladenosine-3'-phosphate
  modified_base 12: mod_base = OTHER; note = 2'-fluoroguanosine-3'-phosphate
  modified_base 13: mod_base = OTHER; note = 2'-O-methylcytidine-3'-phosphate
  modified_base 14: mod_base = OTHER; note = 2'-fluorouridine-3'-phosphate
  modified_base 15: mod_base = OTHER; note = 2'-O-methylguanosine-3'-phosphate
  modified_base 16: mod_base = OTHER; note = 2'-fluorocytidine-3'-phosphate
  modified_base 17: mod_base = OTHER; note = 2'-O-methylcytidine-3'-phosphate
  modified_base 18: mod_base = OTHER; note = 2'-fluoroguanosine-3'-phosphate
  modified_base 19: mod_base = OTHER; note = 2'-O-methylguanosine-3'-phosphorothioate
  modified_base 20: mod_base = OTHER; note = 2'-O-methyluridine-3'-phosphorothioate
  modified_base 21: mod_base = OTHER; note = 2'-O-methyluridine
aattcgggcaagctgccggtt

SEQ ID NO: 1380 - RNA, 21 nt, synthetic construct
  source 1..21: mol_type = other RNA
  modified_base 1: mod_base = OTHER; note = 2'-O-methyluridine-3'-phosphorothioate
  modified_base 2: mod_base = OTHER; note = 2'-fluorouridine-3'-phosphorothioate
  modified_base 3: mod_base = OTHER; note = 2'-O-methylguanosine-3'-phosphate
  modified_base 4: mod_base = OTHER; note = 2'-fluoroadenosine-3'-phosphate
  modified_base 5: mod_base = OTHER; note = 2'-O-methyluridine-3'-phosphate
  modified_base 6: mod_base = OTHER; note = 2'-fluorocytidine-3'-phosphate
  modified_base 7: mod_base = OTHER; note = 2'-O-methyluridine-3'-phosphate
  modified_base 8: mod_base = OTHER; note = 2'-fluorouridine-3'-phosphate
  modified_base 9: mod_base = OTHER; note = 2'-O-methylcytidine-3'-phosphate
  modified_base 10: mod_base = OTHER; note = 2'-fluoroguanosine-3'-phosphate
  modified_base 11: mod_base = OTHER; note = 2'-O-methyladenosine-3'-phosphate
  modified_base 12: mod_base = OTHER; note = 2'-fluorocytidine-3'-phosphate
  modified_base 13: mod_base = OTHER; note = 2'-O-methylcytidine-3'-phosphate
  modified_base 14: mod_base = OTHER; note = 2'-fluorouridine-3'-phosphate
  modified_base 15: mod_base = OTHER; note = 2'-O-methylguanosine-3'-phosphate
  modified_base 16: mod_base = OTHER; note = 2'-fluorouridine-3'-phosphate
  modified_base 17: mod_base = OTHER; note = 2'-O-methyluridine-3'-phosphate
  modified_base 18: mod_base = OTHER; note = 2'-fluoroguanosine-3'-phosphate
  modified_base 19: mod_base = OTHER; note = 2'-O-methyluridine-3'-phosphorothioate
  modified_base 20: mod_base = OTHER; note = 2'-O-methyluridine-3'-phosphorothioate
  modified_base 21: mod_base = OTHER; note = 2'-O-methyluridine
ttgatcttcgacctgttgttt

SEQ ID NO: 1381 - RNA, 21 nt, synthetic construct
  source 1..21: mol_type = other RNA
  modified_base 1: mod_base = OTHER; note = 2'-O-methyladenosine-3'-phosphorothioate
  modified_base 2: mod_base = OTHER; note = 2'-fluoroadenosine-3'-phosphorothioate
  modified_base 3: mod_base = OTHER; note = 2'-O-methyladenosine-3'-phosphate
  modified_base 4: mod_base = OTHER; note = 2'-fluorouridine-3'-phosphate
  modified_base 5: mod_base = OTHER; note = 2'-O-methyluridine-3'-phosphate
  modified_base 6: mod_base = OTHER; note = 2'-fluoroguanosine-3'-phosphate
  modified_base 7: mod_base = OTHER; note = 2'-O-methyladenosine-3'-phosphate
  modified_base 8: mod_base = OTHER; note = 2'-fluorouridine-3'-phosphate
  modified_base 9: mod_base = OTHER; note = 2'-O-methylcytidine-3'-phosphate
  modified_base 10: mod_base = OTHER; note = 2'-fluorouridine-3'-phosphate
  modified_base 11: mod_base = OTHER; note = 2'-O-methyluridine-3'-phosphate
  modified_base 12: mod_base = OTHER; note = 2'-fluorocytidine-3'-phosphate
  modified_base 13: mod_base = OTHER; note = 2'-O-methylguanosine-3'-phosphate
  modified_base 14: mod_base = OTHER; note = 2'-fluoroadenosine-3'-phosphate
  modified_base 15: mod_base = OTHER; note = 2'-O-methylcytidine-3'-phosphate
  modified_base 16: mod_base = OTHER; note = 2'-fluorocytidine-3'-phosphate
  modified_base 17: mod_base = OTHER; note = 2'-O-methyluridine-3'-phosphate
  modified_base 18: mod_base = OTHER; note = 2'-fluoroguanosine-3'-phosphate
  modified_base 19: mod_base = OTHER; note = 2'-O-methyluridine-3'-phosphorothioate
  modified_base 20: mod_base = OTHER; note = 2'-O-methyluridine-3'-phosphorothioate
  modified_base 21: mod_base = OTHER; note = 2'-O-methyluridine
aaattgatcttcgacctgttt

SEQ ID NO: 1382 - RNA, 21 nt, synthetic construct
  source 1..21: mol_type = other RNA
  modified_base 1: mod_base = OTHER; note = 2'-O-methyluridine-3'-phosphorothioate
  modified_base 2: mod_base = OTHER; note = 2'-fluorocytidine-3'-phosphorothioate
  modified_base 3: mod_base = OTHER; note = 2'-O-methyluridine-3'-phosphate
  modified_base 4: mod_base = OTHER; note = 2'-fluorouridine-3'-phosphate
  modified_base 5: mod_base = OTHER; note = 2'-O-methylguanosine-3'-phosphate
  modified_base 6: mod_base = OTHER; note = 2'-fluorouridine-3'-phosphate
  modified_base 7: mod_base = OTHER; note = 2'-O-methyladenosine-3'-phosphate
  modified_base 8: mod_base = OTHER; note = 2'-fluoroadenosine-3'-phosphate
  modified_base 9: mod_base = OTHER; note = 2'-O-methyladenosine-3'-phosphate
  modified_base 10: mod_base = OTHER; note = 2'-fluorouridine-3'-phosphate
  modified_base 11: mod_base = OTHER; note = 2'-O-methyluridine-3'-phosphate
  modified_base 12: mod_base = OTHER; note = 2'-fluoroguanosine-3'-phosphate
  modified_base 13: mod_base = OTHER; note = 2'-O-methyladenosine-3'-phosphate
  modified_base 14: mod_base = OTHER; note = 2'-fluorouridine-3'-phosphate
  modified_base 15: mod_base = OTHER; note = 2'-O-methylcytidine-3'-phosphate
  modified_base 16: mod_base = OTHER; note = 2'-fluorouridine-3'-phosphate
  modified_base 17: mod_base = OTHER; note = 2'-O-methyluridine-3'-phosphate
  modified_base 18: mod_base = OTHER; note = 2'-fluorocytidine-3'-phosphate
  modified_base 19: mod_base = OTHER; note = 2'-O-methylguanosine-3'-phosphorothioate
  modified_base 20: mod_base = OTHER; note = 2'-O-methyluridine-3'-phosphorothioate
  modified_base 21: mod_base = OTHER; note = 2'-O-methyluridine
tcttgtaaattgatcttcgtt

SEQ ID NO: 1383 - RNA, 21 nt, synthetic construct
  source 1..21: mol_type = other RNA
  modified_base 1: mod_base = OTHER; note = 2'-O-methyladenosine-3'-phosphorothioate
  modified_base 2: mod_base = OTHER; note = 2'-fluoroadenosine-3'-phosphorothioate
  modified_base 3: mod_base = OTHER; note = 2'-O-methylguanosine-3'-phosphate
  modified_base 4: mod_base = OTHER; note = 2'-fluoroadenosine-3'-phosphate
  modified_base 5: mod_base = OTHER; note = 2'-O-methyladenosine-3'-phosphate
  modified_base 6: mod_base = OTHER; note = 2'-fluorocytidine-3'-phosphate
  modified_base 7: mod_base = OTHER; note = 2'-O-methylcytidine-3'-phosphate
  modified_base 8: mod_base = OTHER; note = 2'-fluorouridine-3'-phosphate
  modified_base 9: mod_base = OTHER; note = 2'-O-methylguanosine-3'-phosphate
  modified_base 10: mod_base = OTHER; note = 2'-fluoroadenosine-3'-phosphate
  modified_base 11: mod_base = OTHER; note = 2'-O-methylguanosine-3'-phosphate
  modified_base 12: mod_base = OTHER; note = 2'-fluoroadenosine-3'-phosphate
  modified_base 13: mod_base = OTHER; note = 2'-O-methylcytidine-3'-phosphate
  modified_base 14: mod_base = OTHER; note = 2'-fluorocytidine-3'-phosphate
  modified_base 15: mod_base = OTHER; note = 2'-O-methyluridine-3'-phosphate
  modified_base 16: mod_base = OTHER; note = 2'-fluorocytidine-3'-phosphate
  modified_base 17: mod_base = OTHER; note = 2'-O-methyluridine-3'-phosphate
  modified_base 18: mod_base = OTHER; note = 2'-fluorocytidine-3'-phosphate
  modified_base 19: mod_base = OTHER; note = 2'-O-methyluridine-3'-phosphorothioate
  modified_base 20: mod_base = OTHER; note = 2'-O-methyluridine-3'-phosphorothioate
  modified_base 21: mod_base = OTHER; note = 2'-O-methyluridine
aagaacctgagacctctcttt

SEQ ID NO: 1384 - RNA, 21 nt, synthetic construct
  source 1..21: mol_type = other RNA
  modified_base 1: mod_base = OTHER; note = 2'-O-methyladenosine-3'-phosphorothioate
  modified_base 2: mod_base = OTHER; note = 2'-fluoroadenosine-3'-phosphorothioate
  modified_base 3: mod_base = OTHER; note = 2'-O-methylcytidine-3'-phosphate
  modified_base 4: mod_base = OTHER; note = 2'-fluorouridine-3'-phosphate
  modified_base 5: mod_base = OTHER; note = 2'-O-methyluridine-3'-phosphate
  modified_base 6: mod_base = OTHER; note = 2'-fluorocytidine-3'-phosphate
  modified_base 7: mod_base = OTHER; note = 2'-O-methyladenosine-3'-phosphate
  modified_base 8: mod_base = OTHER; note = 2'-fluoroadenosine-3'-phosphate
  modified_base 9: mod_base = OTHER; note = 2'-O-methylguanosine-3'-phosphate
  modified_base 10: mod_base = OTHER; note = 2'-fluoroadenosine-3'-phosphate
  modified_base 11: mod_base = OTHER; note = 2'-O-methyladenosine-3'-phosphate
  modified_base 12: mod_base = OTHER; note = 2'-fluorouridine-3'-phosphate
  modified_base 13: mod_base = OTHER; note = 2'-O-methyluridine-3'-phosphate
  modified_base 14: mod_base = OTHER; note = 2'-fluorouridine-3'-phosphate
  modified_base 15: mod_base = OTHER; note = 2'-O-methylcytidine-3'-phosphate
  modified_base 16: mod_base = OTHER; note = 2'-fluoroadenosine-3'-phosphate
  modified_base 17: mod_base = OTHER; note = 2'-O-methyluridine-3'-phosphate
  modified_base 18: mod_base = OTHER; note = 2'-fluorocytidine-3'-phosphate
  modified_base 19: mod_base = OTHER; note = 2'-O-methyladenosine-3'-phosphorothioate
  modified_base 20: mod_base = OTHER; note = 2'-O-methyluridine-3'-phosphorothioate
  modified_base 21: mod_base = OTHER; note = 2'-O-methyluridine
aacttcaagaatttcatcatt

SEQ ID NO: 1385 - RNA, 21 nt, synthetic construct
  source 1..21: mol_type = other RNA
  modified_base 1: mod_base = OTHER; note = 2'-O-methyladenosine-3'-phosphorothioate
  modified_base 2: mod_base = OTHER; note = 2'-fluorouridine-3'-phosphorothioate
  modified_base 3: mod_base = OTHER; note = 2'-O-methylguanosine-3'-phosphate
  modified_base 4: mod_base = OTHER; note = 2'-fluoroadenosine-3'-phosphate
  modified_base 5: mod_base = OTHER; note = 2'-O-methyladenosine-3'-phosphate
  modified_base 6: mod_base = OTHER; note = 2'-fluorocytidine-3'-phosphate
  modified_base 7: mod_base = OTHER; note = 2'-O-methyluridine-3'-phosphate
  modified_base 8: mod_base = OTHER; note = 2'-fluorouridine-3'-phosphate
  modified_base 9: mod_base = OTHER; note = 2'-O-methylcytidine-3'-phosphate
  modified_base 10: mod_base = OTHER; note = 2'-fluoroadenosine-3'-phosphate
  modified_base 11: mod_base = OTHER; note = 2'-O-methyladenosine-3'-phosphate
  modified_base 12: mod_base = OTHER; note = 2'-fluoroguanosine-3'-phosphate
  modified_base 13: mod_base = OTHER; note = 2'-O-methyladenosine-3'-phosphate
  modified_base 14: mod_base = OTHER; note = 2'-fluoroadenosine-3'-phosphate
  modified_base 15: mod_base = OTHER; note = 2'-O-methyluridine-3'-phosphate
  modified_base 16: mod_base = OTHER; note = 2'-fluorouridine-3'-phosphate
  modified_base 17: mod_base = OTHER; note = 2'-O-methyluridine-3'-phosphate
  modified_base 18: mod_base = OTHER; note = 2'-fluorocytidine-3'-phosphate
  modified_base 19: mod_base = OTHER; note = 2'-O-methyladenosine-3'-phosphorothioate
  modified_base 20: mod_base = OTHER; note = 2'-O-methyluridine-3'-phosphorothioate
  modified_base 21: mod_base = OTHER; note = 2'-O-methyluridine
atgaacttcaagaatttcatt

SEQ ID NO: 1386 - RNA, 21 nt, synthetic construct
  source 1..21: mol_type = other RNA
  modified_base 1: mod_base = OTHER; note = 2'-O-methyluridine-3'-phosphorothioate
  modified_base 2: mod_base = OTHER; note = 2'-fluoroadenosine-3'-phosphorothioate
  modified_base 3: mod_base = OTHER; note = 2'-O-methyladenosine-3'-phosphate
  modified_base 4: mod_base = OTHER; note = 2'-fluorocytidine-3'-phosphate
  modified_base 5: mod_base = OTHER; note = 2'-O-methyluridine-3'-phosphate
  modified_base 6: mod_base = OTHER; note = 2'-fluoroadenosine-3'-phosphate
  modified_base 7: mod_base = OTHER; note = 2'-O-methylcytidine-3'-phosphate
  modified_base 8: mod_base = OTHER; note = 2'-fluoroadenosine-3'-phosphate
  modified_base 9: mod_base = OTHER; note = 2'-O-methyladenosine-3'-phosphate
  modified_base 10: mod_base = OTHER; note = 2'-fluoroadenosine-3'-phosphate
  modified_base 11: mod_base = OTHER; note = 2'-O-methyladenosine-3'-phosphate
  modified_base 12: mod_base = OTHER; note = 2'-fluorouridine-3'-phosphate
  modified_base 13: mod_base = OTHER; note = 2'-O-methylcytidine-3'-phosphate
  modified_base 14: mod_base = OTHER; note = 2'-fluoroadenosine-3'-phosphate
  modified_base 15: mod_base = OTHER; note = 2'-O-methylguanosine-3'-phosphate
  modified_base 16: mod_base = OTHER; note = 2'-fluoroguanosine-3'-phosphate
  modified_base 17: mod_base = OTHER; note = 2'-O-methyladenosine-3'-phosphate
  modified_base 18: mod_base = OTHER; note = 2'-fluoroguanosine-3'-phosphate
  modified_base 19: mod_base = OTHER; note = 2'-O-methyluridine-3'-phosphorothioate
  modified_base 20: mod_base = OTHER; note = 2'-O-methyluridine-3'-phosphorothioate
  modified_base 21: mod_base = OTHER; note = 2'-O-methyluridine
taactacaaaatcaggagttt

SEQ ID NO: 1387 - RNA, 21 nt, synthetic construct
  source 1..21: mol_type = other RNA
  modified_base 1: mod_base = OTHER; note = 2'-O-methyluridine-3'-phosphorothioate
  modified_base 2: mod_base = OTHER; note = 2'-fluorouridine-3'-phosphorothioate
  modified_base 3: mod_base = OTHER; note = 2'-O-methyladenosine-3'-phosphate
  modified_base 4: mod_base = OTHER; note = 2'-fluoroadenosine-3'-phosphate
  modified_base 5: mod_base = OTHER; note = 2'-O-methylcytidine-3'-phosphate
  modified_base 6: mod_base = OTHER; note = 2'-fluorouridine-3'-phosphate
  modified_base 7: mod_base = OTHER; note = 2'-O-methyladenosine-3'-phosphate
  modified_base 8: mod_base = OTHER; note = 2'-fluorocytidine-3'-phosphate
  modified_base 9: mod_base = OTHER; note = 2'-O-methyladenosine-3'-phosphate
  modified_base 10: mod_base = OTHER; note = 2'-fluoroadenosine-3'-phosphate
  modified_base 11: mod_base = OTHER; note = 2'-O-methyladenosine-3'-phosphate
  modified_base 12: mod_base = OTHER; note = 2'-fluoroadenosine-3'-phosphate
  modified_base 13: mod_base = OTHER; note = 2'-O-methyluridine-3'-phosphate
  modified_base 14: mod_base = OTHER; note = 2'-fluorocytidine-3'-phosphate
  modified_base 15: mod_base = OTHER; note = 2'-O-methyladenosine-3'-phosphate
  modified_base 16: mod_base = OTHER; note = 2'-fluoroguanosine-3'-phosphate
  modified_base 17: mod_base = OTHER; note = 2'-O-methylguanosine-3'-phosphate
  modified_base 18: mod_base = OTHER; note = 2'-fluoroadenosine-3'-phosphate
  modified_base 19: mod_base = OTHER; note = 2'-O-methylguanosine-3'-phosphorothioate
  modified_base 20: mod_base = OTHER; note = 2'-O-methyluridine-3'-phosphorothioate
  modified_base 21: mod_base = OTHER; note = 2'-O-methyluridine
ttaactacaaaatcaggagtt

SEQ ID NO: 1388 - RNA, 21 nt, synthetic construct
  source 1..21: mol_type = other RNA
  modified_base 1: mod_base = OTHER; note = 2'-O-methyladenosine-3'-phosphorothioate
  modified_base 2: mod_base = OTHER; note = 2'-fluorouridine-3'-phosphorothioate
  modified_base 3: mod_base = OTHER; note = 2'-O-methyluridine-3'-phosphate
  modified_base 4: mod_base = OTHER; note = 2'-fluoroadenosine-3'-phosphate
  modified_base 5: mod_base = OTHER; note = 2'-O-methyladenosine-3'-phosphate
  modified_base 6: mod_base = OTHER; note = 2'-fluorocytidine-3'-phosphate
  modified_base 7: mod_base = OTHER; note = 2'-O-methyluridine-3'-phosphate
  modified_base 8: mod_base = OTHER; note = 2'-fluoroadenosine-3'-phosphate
  modified_base 9: mod_base = OTHER; note = 2'-O-methylcytidine-3'-phosphate
  modified_base 10: mod_base = OTHER; note = 2'-fluoroadenosine-3'-phosphate
  modified_base 11: mod_base = OTHER; note = 2'-O-methyladenosine-3'-phosphate
  modified_base 12: mod_base = OTHER; note = 2'-fluoroadenosine-3'-phosphate
  modified_base 13: mod_base = OTHER; note = 2'-O-methyladenosine-3'-phosphate
  modified_base 14: mod_base = OTHER; note = 2'-fluorouridine-3'-phosphate
  modified_base 15: mod_base = OTHER; note = 2'-O-methylcytidine-3'-phosphate
  modified_base 16: mod_base = OTHER; note = 2'-fluoroadenosine-3'-phosphate
  modified_base 17: mod_base = OTHER; note = 2'-O-methylguanosine-3'-phosphate
  modified_base 18: mod_base = OTHER; note = 2'-fluoroguanosine-3'-phosphate
  modified_base 19: mod_base = OTHER; note = 2'-O-methyladenosine-3'-phosphorothioate
  modified_base 20: mod_base = OTHER; note = 2'-O-methyluridine-3'-phosphorothioate
  modified_base 21: mod_base = OTHER; note = 2'-O-methyluridine
attaactacaaaatcaggatt

SEQ ID NO: 1389 - RNA, 21 nt, synthetic construct
  source 1..21: mol_type = other RNA
  modified_base 1: mod_base = OTHER; note = 2'-O-methyladenosine-3'-phosphorothioate
  modified_base 2: mod_base = OTHER; note = 2'-fluorocytidine-3'-phosphorothioate
  modified_base 3: mod_base = OTHER; note = 2'-O-methyluridine-3'-phosphate
  modified_base 4: mod_base = OTHER; note = 2'-fluorouridine-3'-phosphate
  modified_base 5: mod_base = OTHER; note = 2'-O-methyladenosine-3'-phosphate
  modified_base 6: mod_base = OTHER; note = 2'-fluoroguanosine-3'-phosphate
  modified_base 7: mod_base = OTHER; note = 2'-O-methylcytidine-3'-phosphate
  modified_base 8: mod_base = OTHER; note = 2'-fluorouridine-3'-phosphate
  modified_base 9: mod_base = OTHER; note = 2'-O-methylcytidine-3'-phosphate
  modified_base 10: mod_base = OTHER; note = 2'-fluorouridine-3'-phosphate
  modified_base 11: mod_base = OTHER; note = 2'-O-methyluridine-3'-phosphate
  modified_base 12: mod_base = OTHER; note = 2'-fluoroadenosine-3'-phosphate
  modified_base 13: mod_base = OTHER; note = 2'-O-methylcytidine-3'-phosphate
  modified_base 14: mod_base = OTHER; note = 2'-fluorouridine-3'-phosphate
  modified_base 15: mod_base = OTHER; note = 2'-O-methyluridine-3'-phosphate
  modified_base 16: mod_base = OTHER; note = 2'-fluorocytidine-3'-phosphate
  modified_base 17: mod_base = OTHER; note = 2'-O-methyluridine-3'-phosphate
  modified_base 18: mod_base = OTHER; note = 2'-fluorouridine-3'-phosphate
  modified_base 19: mod_base = OTHER; note = 2'-O-methylguanosine-3'-phosphorothioate
  modified_base 20: mod_base = OTHER; note = 2'-O-methyluridine-3'-phosphorothioate
  modified_base 21: mod_base = OTHER; note = 2'-O-methyluridine
acttagctcttacttcttgtt

SEQ ID NO: 1390 - RNA, 21 nt, synthetic construct
  source 1..21: mol_type = other RNA
  modified_base 1: mod_base = OTHER; note = 2'-O-methyluridine-3'-phosphorothioate
  modified_base 2: mod_base = OTHER; note = 2'-fluoroadenosine-3'-phosphorothioate
  modified_base 3: mod_base = OTHER; note = 2'-O-methyladenosine-3'-phosphate
  modified_base 4: mod_base = OTHER; note = 2'-fluorocytidine-3'-phosphate
  modified_base 5: mod_base = OTHER; note = 2'-O-methyladenosine-3'-phosphate
  modified_base 6: mod_base = OTHER; note = 2'-fluorocytidine-3'-phosphate
  modified_base 7: mod_base = OTHER; note = 2'-O-methyladenosine-3'-phosphate
  modified_base 8: mod_base = OTHER; note = 2'-fluorouridine-3'-phosphate
  modified_base 9: mod_base = OTHER; note = 2'-O-methyluridine-3'-phosphate
  modified_base 10: mod_base = OTHER; note = 2'-fluoroadenosine-3'-phosphate
  modified_base 11: mod_base = OTHER; note = 2'-O-methyluridine-3'-phosphate
  modified_base 12: mod_base = OTHER; note = 2'-fluorouridine-3'-phosphate
  modified_base 13: mod_base = OTHER; note = 2'-O-methylcytidine-3'-phosphate
  modified_base 14: mod_base = OTHER; note = 2'-fluorouridine-3'-phosphate
  modified_base 15: mod_base = OTHER; note = 2'-O-methylguanosine-3'-phosphate
  modified_base 16: mod_base = OTHER; note = 2'-fluorouridine-3'-phosphate
  modified_base 17: mod_base = OTHER; note = 2'-O-methyladenosine-3'-phosphate
  modified_base 18: mod_base = OTHER; note = 2'-fluoroguanosine-3'-phosphate
  modified_base 19: mod_base = OTHER; note = 2'-O-methyluridine-3'-phosphorothioate
  modified_base 20: mod_base = OTHER; note = 2'-O-methyluridine-3'-phosphorothioate
  modified_base 21: mod_base = OTHER; note = 2'-O-methyluridine
taacacattattctgtagttt

SEQ ID NO: 1391 - RNA, 21 nt, synthetic construct
  source 1..21: mol_type = other RNA
  modified_base 1: mod_base = OTHER; note = 2'-O-methyluridine-3'-phosphorothioate
  modified_base 2: mod_base = OTHER; note = 2'-fluorouridine-3'-phosphorothioate
  modified_base 3: mod_base = OTHER; note = 2'-O-methyladenosine-3'-phosphate
  modified_base 4: mod_base = OTHER; note = 2'-fluoroadenosine-3'-phosphate
  modified_base 5: mod_base = OTHER; note = 2'-O-methylcytidine-3'-phosphate
  modified_base 6: mod_base = OTHER; note = 2'-fluoroadenosine-3'-phosphate
  modified_base 7: mod_base = OTHER; note = 2'-O-methylcytidine-3'-phosphate
  modified_base 8: mod_base = OTHER; note = 2'-fluoroadenosine-3'-phosphate
  modified_base 9: mod_base = OTHER; note = 2'-O-methyluridine-3'-phosphate
  modified_base 10: mod_base = OTHER; note = 2'-fluorouridine-3'-phosphate
  modified_base 11: mod_base = OTHER; note = 2'-O-methyladenosine-3'-phosphate
  modified_base 12: mod_base = OTHER; note = 2'-fluorouridine-3'-phosphate
  modified_base 13: mod_base = OTHER; note = 2'-O-methyluridine-3'-phosphate
  modified_base 14: mod_base = OTHER; note = 2'-fluorocytidine-3'-phosphate
  modified_base 15: mod_base = OTHER; note = 2'-O-methyluridine-3'-phosphate
  modified_base 16: mod_base = OTHER; note = 2'-fluoroguanosine-3'-phosphate
  modified_base 17: mod_base = OTHER; note = 2'-O-methyluridine-3'-phosphate
  modified_base 18: mod_base = OTHER; note = 2'-fluoroadenosine-3'-phosphate
  modified_base 19: mod_base = OTHER; note = 2'-O-methylguanosine-3'-phosphorothioate
  modified_base 20: mod_base = OTHER; note = 2'-O-methyluridine-3'-phosphorothioate
  modified_base 21: mod_base = OTHER; note = 2'-O-methyluridine
ttaacacattattctgtagtt

SEQ ID NO: 1392 - RNA, 21 nt, synthetic construct
  source 1..21: mol_type = other RNA
  modified_base 1: mod_base = OTHER; note = 2'-O-methyluridine-3'-phosphorothioate
  modified_base 2: mod_base = OTHER; note = 2'-fluorouridine-3'-phosphorothioate
  modified_base 3: mod_base = OTHER; note = 2'-O-methyladenosine-3'-phosphate
  modified_base 4: mod_base = OTHER; note = 2'-fluoroadenosine-3'-phosphate
  modified_base 5: mod_base = OTHER; note = 2'-O-methyladenosine-3'-phosphate
  modified_base 6: mod_base = OTHER; note = 2'-fluorocytidine-3'-phosphate
  modified_base 7: mod_base = OTHER; note = 2'-O-methyladenosine-3'-phosphate
  modified_base 8: mod_base = OTHER; note = 2'-fluoroadenosine-3'-phosphate
  modified_base 9: mod_base = OTHER; note = 2'-O-methyladenosine-3'-phosphate
  modified_base 10: mod_base = OTHER; note = 2'-fluoroadenosine-3'-phosphate
  modified_base 11: mod_base = OTHER; note = 2'-O-methylguanosine-3'-phosphate
  modified_base 12: mod_base = OTHER; note = 2'-fluoroguanosine-3'-phosphate
  modified_base 13: mod_base = OTHER; note = 2'-O-methylcytidine-3'-phosphate
  modified_base 14: mod_base = OTHER; note = 2'-fluorocytidine-3'-phosphate
  modified_base 15: mod_base = OTHER; note = 2'-O-methyluridine-3'-phosphate
  modified_base 16: mod_base = OTHER; note = 2'-fluorocytidine-3'-phosphate
  modified_base 17: mod_base = OTHER; note = 2'-O-methyluridine-3'-phosphate
  modified_base 18: mod_base = OTHER; note = 2'-fluorocytidine-3'-phosphate
  modified_base 19: mod_base = OTHER; note = 2'-O-methyluridine-3'-phosphorothioate
  modified_base 20: mod_base = OTHER; note = 2'-O-methyluridine-3'-phosphorothioate
  modified_base 21: mod_base = OTHER; note = 2'-O-methyluridine
ttaaacaaaaggcctctcttt

SEQ ID NO: 1393 - RNA, 21 nt, synthetic construct
  source 1..21: mol_type = other RNA
  modified_base 1: mod_base = OTHER; note = 2'-O-methyluridine-3'-phosphorothioate
  modified_base 2: mod_base = OTHER; note = 2'-fluorouridine-3'-phosphorothioate
  modified_base 3: mod_base = OTHER; note = 2'-O-methyluridine-3'-phosphate
  modified_base 4: mod_base = OTHER; note = 2'-fluoroadenosine-3'-phosphate
  modified_base 5: mod_base = OTHER; note = 2'-O-methyladenosine-3'-phosphate
  modified_base 6: mod_base = OTHER; note = 2'-fluoroadenosine-3'-phosphate
  modified_base 7: mod_base = OTHER; note = 2'-O-methylcytidine-3'-phosphate
  modified_base 8: mod_base = OTHER; note = 2'-fluoroadenosine-3'-phosphate
  modified_base 9: mod_base = OTHER; note = 2'-O-methyladenosine-3'-phosphate
  modified_base 10: mod_base = OTHER; note = 2'-fluoroadenosine-3'-phosphate
  modified_base 11: mod_base = OTHER; note = 2'-O-methyladenosine-3'-phosphate
  modified_base 12: mod_base = OTHER; note = 2'-fluoroguanosine-3'-phosphate
  modified_base 13: mod_base = OTHER; note = 2'-O-methylguanosine-3'-phosphate
  modified_base 14: mod_base = OTHER; note = 2'-fluorocytidine-3'-phosphate
  modified_base 15: mod_base = OTHER; note = 2'-O-methylcytidine-3'-phosphate
  modified_base 16: mod_base = OTHER; note = 2'-fluorouridine-3'-phosphate
  modified_base 17: mod_base = OTHER; note = 2'-O-methylcytidine-3'-phosphate
  modified_base 18: mod_base = OTHER; note = 2'-fluorouridine-3'-phosphate
  modified_base 19: mod_base = OTHER; note = 2'-O-methylcytidine-3'-phosphorothioate
  modified_base 20: mod_base = OTHER; note = 2'-O-methyluridine-3'-phosphorothioate
  modified_base 21: mod_base = OTHER; note = 2'-O-methyluridine
tttaaacaaaaggcctctctt

SEQ ID NO: 1394 - RNA, 21 nt, synthetic construct
  source 1..21: mol_type = other RNA
  modified_base 1: mod_base = OTHER; note = 2'-O-methyladenosine-3'-phosphorothioate
  modified_base 2: mod_base = OTHER; note = 2'-fluorouridine-3'-phosphorothioate
  modified_base 3: mod_base = OTHER; note = 2'-O-methyluridine-3'-phosphate
  modified_base 4: mod_base = OTHER; note = 2'-fluorouridine-3'-phosphate
  modified_base 5: mod_base = OTHER; note = 2'-O-methyladenosine-3'-phosphate
  modified_base 6: mod_base = OTHER; note = 2'-fluoroadenosine-3'-phosphate
  modified_base 7: mod_base = OTHER; note = 2'-O-methyladenosine-3'-phosphate
  modified_base 8: mod_base = OTHER; note = 2'-fluorocytidine-3'-phosphate
  modified_base 9: mod_base = OTHER; note = 2'-O-methyladenosine-3'-phosphate
  modified_base 10: mod_base = OTHER; note = 2'-fluoroadenosine-3'-phosphate
  modified_base 11: mod_base = OTHER; note = 2'-O-methyladenosine-3'-phosphate
  modified_base 12: mod_base = OTHER; note = 2'-fluoroadenosine-3'-phosphate
  modified_base 13: mod_base = OTHER; note = 2'-O-methylguanosine-3'-phosphate
  modified_base 14: mod_base = OTHER; note = 2'-fluoroguanosine-3'-phosphate
  modified_base 15: mod_base = OTHER; note = 2'-O-methylcytidine-3'-phosphate
  modified_base 16: mod_base = OTHER; note = 2'-fluorocytidine-3'-phosphate
  modified_base 17: mod_base = OTHER; note = 2'-O-methyluridine-3'-phosphate
  modified_base 18: mod_base = OTHER; note = 2'-fluorocytidine-3'-phosphate
  modified_base 19: mod_base = OTHER; note = 2'-O-methyluridine-3'-phosphorothioate
  modified_base 20: mod_base = OTHER; note = 2'-O-methyluridine-3'-phosphorothioate
  modified_base 21: mod_base = OTHER; note = 2'-O-methyluridine
atttaaacaaaaggcctcttt

SEQ ID NO: 1395 - RNA, 21 nt, synthetic construct
  source 1..21: mol_type = other RNA
  modified_base 1: mod_base = OTHER; note = 2'-O-methyladenosine-3'-phosphorothioate
  modified_base 2: mod_base = OTHER; note = 2'-fluoroguanosine-3'-phosphorothioate
  modified_base 3: mod_base = OTHER; note = 2'-O-methyladenosine-3'-phosphate
  modified_base 4: mod_base = OTHER; note = 2'-fluorocytidine-3'-phosphate
  modified_base 5: mod_base = OTHER; note = 2'-O-methyladenosine-3'-phosphate
  modified_base 6: mod_base = OTHER; note = 2'-fluorouridine-3'-phosphate
  modified_base 7: mod_base = OTHER; note = 2'-O-methylguanosine-3'-phosphate
  modified_base 8: mod_base = OTHER; note = 2'-fluorouridine-3'-phosphate
  modified_base 9: mod_base = OTHER; note = 2'-O-methyluridine-3'-phosphate
  modified_base 10: mod_base = OTHER; note = 2'-fluoroadenosine-3'-phosphate
  modified_base 11: mod_base = OTHER; note = 2'-O-methyluridine-3'-phosphate
  modified_base 12: mod_base = OTHER; note = 2'-fluoroadenosine-3'-phosphate
  modified_base 13: mod_base = OTHER; note = 2'-O-methylguanosine-3'-phosphate
  modified_base 14: mod_base = OTHER; note = 2'-fluorocytidine-3'-phosphate
  modified_base 15: mod_base = OTHER; note = 2'-O-methylcytidine-3'-phosphate
  modified_base 16: mod_base = OTHER; note = 2'-fluoroadenosine-3'-phosphate
  modified_base 17: mod_base = OTHER; note = 2'-O-methyladenosine-3'-phosphate
  modified_base 18: mod_base = OTHER; note = 2'-fluorouridine-3'-phosphate
  modified_base 19: mod_base = OTHER; note = 2'-O-methylcytidine-3'-phosphorothioate
  modified_base 20: mod_base = OTHER; note = 2'-O-methyluridine-3'-phosphorothioate
  modified_base 21: mod_base = OTHER; note = 2'-O-methyluridine
agacatgttatagccaatctt

SEQ ID NO: 1396 - RNA, 21 nt, synthetic construct
  source 1..21: mol_type = other RNA
  modified_base 1: mod_base = OTHER; note = 2'-O-methyladenosine-3'-phosphorothioate
  modified_base 2: mod_base = OTHER; note = 2'-fluoroadenosine-3'-phosphorothioate
  modified_base 3: mod_base = OTHER; note = 2'-O-methylguanosine-3'-phosphate
  modified_base 4: mod_base = OTHER; note = 2'-fluoroadenosine-3'-phosphate
  modified_base 5: mod_base = OTHER; note = 2'-O-methylguanosine-3'-phosphate
  modified_base 6: mod_base = OTHER; note = 2'-fluorocytidine-3'-phosphate
  modified_base 7: mod_base = OTHER; note = 2'-O-methyluridine-3'-phosphate
  modified_base 8: mod_base = OTHER; note = 2'-fluorocytidine-3'-phosphate
  modified_base 9: mod_base = OTHER; note = 2'-O-methyluridine-3'-phosphate
  modified_base 10: mod_base = OTHER; note = 2'-fluoroguanosine-3'-phosphate
  modified_base 11: mod_base = OTHER; note = 2'-O-methyladenosine-3'-phosphate
  modified_base 12: mod_base = OTHER; note = 2'-fluorouridine-3'-phosphate
  modified_base 13: mod_base = OTHER; note = 2'-O-methyladenosine-3'-phosphate
  modified_base 14: mod_base = OTHER; note = 2'-fluorouridine-3'-phosphate
  modified_base 15: mod_base = OTHER; note = 2'-O-methylcytidine-3'-phosphate
  modified_base 16: mod_base = OTHER; note = 2'-fluorouridine-3'-phosphate
  modified_base 17: mod_base = OTHER; note = 2'-O-methyluridine-3'-phosphate
  modified_base 18: mod_base = OTHER; note = 2'-fluorouridine-3'-phosphate
  modified_base 19: mod_base = OTHER; note = 2'-O-methyladenosine-3'-phosphorothioate
  modified_base 20: mod_base = OTHER; note = 2'-O-methyluridine-3'-phosphorothioate
  modified_base 21: mod_base = OTHER; note = 2'-O-methyluridine
aagagctctgatatctttatt

SEQ ID NO: 1397 - RNA, 21 nt, synthetic construct
  source 1..21: mol_type = other RNA
  modified_base 1: mod_base = OTHER; note = 2'-O-methyladenosine-3'-phosphorothioate
  modified_base 2: mod_base = OTHER; note = 2'-fluorouridine-3'-phosphorothioate
  modified_base 3: mod_base = OTHER; note = 2'-O-methyluridine-3'-phosphate
  modified_base 4: mod_base = OTHER; note = 2'-fluorouridine-3'-phosphate
  modified_base 5: mod_base = OTHER; note = 2'-O-methylcytidine-3'-phosphate
  modified_base 6: mod_base = OTHER; note = 2'-fluorouridine-3'-phosphate
  modified_base 7: mod_base = OTHER; note = 2'-O-methyladenosine-3'-phosphate
  modified_base 8: mod_base = OTHER; note = 2'-fluoroadenosine-3'-phosphate
  modified_base 9: mod_base = OTHER; note = 2'-O-methylguanosine-3'-phosphate
  modified_base 10: mod_base = OTHER; note = 2'-fluoroguanosine-3'-phosphate
  modified_base 11: mod_base = OTHER; note = 2'-O-methyluridine-3'-phosphate
  modified_base 12: mod_base = OTHER; note = 2'-fluorocytidine-3'-phosphate
  modified_base 13: mod_base = OTHER; note = 2'-O-methylcytidine-3'-phosphate
  modified_base 14: mod_base = OTHER; note = 2'-fluorocytidine-3'-phosphate
  modified_base 15: mod_base = OTHER; note = 2'-O-methyladenosine-3'-phosphate
  modified_base 16: mod_base = OTHER; note = 2'-fluoroguanosine-3'-phosphate
  modified_base 17: mod_base = OTHER; note = 2'-O-methyluridine-3'-phosphate
  modified_base 18: mod_base = OTHER; note = 2'-fluorocytidine-3'-phosphate
  modified_base 19: mod_base = OTHER; note = 2'-O-methyluridine-3'-phosphorothioate
  modified_base 20: mod_base = OTHER; note = 2'-O-methyluridine-3'-phosphorothioate
  modified_base 21: mod_base = OTHER; note = 2'-O-methyluridine
atttctaaggtcccagtcttt

SEQ ID NO: 1398 - RNA, 21 nt, synthetic construct
  source 1..21: mol_type = other RNA
  modified_base 1: mod_base = OTHER; note = 2'-O-methyluridine-3'-phosphorothioate
  modified_base 2: mod_base = OTHER; note = 2'-fluorouridine-3'-phosphorothioate
  modified_base 3: mod_base = OTHER; note = 2'-O-methyladenosine-3'-phosphate
  modified_base 4: mod_base = OTHER; note = 2'-fluorouridine-3'-phosphate
  modified_base 5: mod_base = OTHER; note = 2'-O-methyluridine-3'-phosphate
  modified_base 6: mod_base = OTHER; note = 2'-fluorouridine-3'-phosphate
  modified_base 7: mod_base = OTHER; note = 2'-O-methylcytidine-3'-phosphate
  modified_base 8: mod_base = OTHER; note = 2'-fluorouridine-3'-phosphate
  modified_base 9: mod_base = OTHER; note = 2'-O-methyluridine-3'-phosphate
  modified_base 10: mod_base = OTHER; note = 2'-fluoroguanosine-3'-phosphate
  modified_base 11: mod_base = OTHER; note = 2'-O-methyladenosine-3'-phosphate
  modified_base 12: mod_base = OTHER; note = 2'-fluoroadenosine-3'-phosphate
  modified_base 13: mod_base = OTHER; note = 2'-O-methylcytidine-3'-phosphate
  modified_base 14: mod_base = OTHER; note = 2'-fluoroadenosine-3'-phosphate
  modified_base 15: mod_base = OTHER; note = 2'-O-methylcytidine-3'-phosphate
  modified_base 16: mod_base = OTHER; note = 2'-fluorouridine-3'-phosphate
  modified_base 17: mod_base = OTHER; note = 2'-O-methyluridine-3'-phosphate
  modified_base 18: mod_base = OTHER; note = 2'-fluorocytidine-3'-phosphate
  modified_base 19: mod_base = OTHER; note = 2'-O-methylcytidine-3'-phosphorothioate
  modified_base 20: mod_base = OTHER; note = 2'-O-methyluridine-3'-phosphorothioate
  modified_base 21: mod_base = OTHER; note = 2'-O-methyluridine
ttatttcttgaacacttcctt

SEQ ID NO: 1399 - RNA, 21 nt, synthetic construct
  source 1..21: mol_type = other RNA
  modified_base 1: mod_base = OTHER; note = 2'-O-methyluridine-3'-phosphorothioate
  modified_base 2: mod_base = OTHER; note = 2'-fluoroadenosine-3'-phosphorothioate
  modified_base 3: mod_base = OTHER; note = 2'-O-methyladenosine-3'-phosphate
  modified_base 4: mod_base = OTHER; note = 2'-fluoroguanosine-3'-phosphate
  modified_base 5: mod_base = OTHER; note = 2'-O-methyladenosine-3'-phosphate
  modified_base 6: mod_base = OTHER; note = 2'-fluorouridine-3'-phosphate
  modified_base 7: mod_base = OTHER; note = 2'-O-methyluridine-3'-phosphate
  modified_base 8: mod_base = OTHER; note = 2'-fluorocytidine-3'-phosphate
  modified_base 9: mod_base = OTHER; note = 2'-O-methyladenosine-3'-phosphate
  modified_base 10: mod_base = OTHER; note = 2'-fluoroadenosine-3'-phosphate
  modified_base 11: mod_base = OTHER; note = 2'-O-methyluridine-3'-phosphate
  modified_base 12: mod_base = OTHER; note = 2'-fluoroadenosine-3'-phosphate
  modified_base 13: mod_base = OTHER; note = 2'-O-methyladenosine-3'-phosphate
  modified_base 14: mod_base = OTHER; note = 2'-fluorocytidine-3'-phosphate
  modified_base 15: mod_base = OTHER; note = 2'-O-methyluridine-3'-phosphate
  modified_base 16: mod_base = OTHER; note = 2'-fluorocytidine-3'-phosphate
  modified_base 17: mod_base = OTHER; note = 2'-O-methyluridine-3'-phosphate
  modified_base 18: mod_base = OTHER; note = 2'-fluoroguanosine-3'-phosphate
  modified_base 19: mod_base = OTHER; note = 2'-O-methylcytidine-3'-phosphorothioate
  modified_base 20: mod_base = OTHER; note = 2'-O-methyluridine-3'-phosphorothioate
  modified_base 21: mod_base = OTHER; note = 2'-O-methyluridine
taagattcaataactctgctt

SEQ ID NO: 1400 - RNA, 21 nt, synthetic construct
  source 1..21: mol_type = other RNA
  modified_base 1: mod_base = OTHER; note = 2'-O-methyluridine-3'-phosphorothioate
  modified_base 2: mod_base = OTHER; note = 2'-fluorouridine-3'-phosphorothioate
  modified_base 3: mod_base = OTHER; note = 2'-O-methyladenosine-3'-phosphate
  modified_base 4: mod_base = OTHER; note = 2'-fluoroadenosine-3'-phosphate
  modified_base 5: mod_base = OTHER; note = 2'-O-methylguanosine-3'-phosphate
  modified_base 6: mod_base = OTHER; note = 2'-fluoroadenosine-3'-phosphate
  modified_base 7: mod_base = OTHER; note = 2'-O-methyluridine-3'-phosphate
  modified_base 8: mod_base = OTHER; note = 2'-fluorouridine-3'-phosphate
  modified_base 9: mod_base = OTHER; note = 2'-O-methylcytidine-3'-phosphate
  modified_base 10: mod_base = OTHER; note = 2'-fluoroadenosine-3'-phosphate
  modified_base 11: mod_base = OTHER; note = 2'-O-methyladenosine-3'-phosphate
  modified_base 12: mod_base = OTHER; note = 2'-fluorouridine-3'-phosphate
  modified_base 13: mod_base = OTHER; note = 2'-O-methyladenosine-3'-phosphate
  modified_base 14: mod_base = OTHER; note = 2'-fluoroadenosine-3'-phosphate
  modified_base 15: mod_base = OTHER; note = 2'-O-methylcytidine-3'-phosphate
  modified_base 16: mod_base = OTHER; note = 2'-fluorouridine-3'-phosphate
  modified_base 17: mod_base = OTHER; note = 2'-O-methylcytidine-3'-phosphate
  modified_base 18: mod_base = OTHER; note = 2'-fluorouridine-3'-phosphate
  modified_base 19: mod_base = OTHER; note = 2'-O-methylguanosine-3'-phosphorothioate
  modified_base 20: mod_base = OTHER; note = 2'-O-methyluridine-3'-phosphorothioate
  modified_base 21: mod_base = OTHER; note = 2'-O-methyluridine
ttaagattcaataactctgtt

SEQ ID NO: 1401 - RNA, 21 nt, synthetic construct
  source 1..21: mol_type = other RNA
  modified_base 1: mod_base = OTHER; note = 2'-O-methyladenosine-3'-phosphorothioate
  modified_base 2: mod_base = OTHER; note = 2'-fluoroadenosine-3'-phosphorothioate
  modified_base 3: mod_base = OTHER; note = 2'-O-methyluridine-3'-phosphate
  modified_base 4: mod_base = OTHER; note = 2'-fluorouridine-3'-phosphate
  modified_base 5: mod_base = OTHER; note = 2'-O-methyladenosine-3'-phosphate
  modified_base 6: mod_base = OTHER; note = 2'-fluoroadenosine-3'-phosphate
  modified_base 7: mod_base = OTHER; note = 2'-O-methylguanosine-3'-phosphate
  modified_base 8: mod_base = OTHER; note = 2'-fluoroadenosine-3'-phosphate
  modified_base 9: mod_base = OTHER; note = 2'-O-methyluridine-3'-phosphate
  modified_base 10: mod_base = OTHER; note = 2'-fluorouridine-3'-phosphate
  modified_base 11: mod_base = OTHER; note = 2'-O-methylcytidine-3'-phosphate
  modified_base 12: mod_base = OTHER; note = 2'-fluoroadenosine-3'-phosphate
  modified_base 13: mod_base = OTHER; note = 2'-O-methyladenosine-3'-phosphate
  modified_base 14: mod_base = OTHER; note = 2'-fluorouridine-3'-phosphate
  modified_base 15: mod_base = OTHER; note = 2'-O-methyladenosine-3'-phosphate
  modified_base 16: mod_base = OTHER; note = 2'-fluoroadenosine-3'-phosphate
  modified_base 17: mod_base = OTHER; note = 2'-O-methylcytidine-3'-phosphate
  modified_base 18: mod_base = OTHER; note = 2'-fluorouridine-3'-phosphate
  modified_base 19: mod_base = OTHER; note = 2'-O-methylcytidine-3'-phosphorothioate
  modified_base 20: mod_base = OTHER; note = 2'-O-methyluridine-3'-phosphorothioate
  modified_base 21: mod_base = OTHER; note = 2'-O-methyluridine
aattaagattcaataactctt

SEQ ID NO: 1402 - RNA, 21 nt, synthetic construct
  source 1..21: mol_type = other RNA
  modified_base 1: mod_base = OTHER; note = 2'-O-methyladenosine-3'-phosphorothioate
  modified_base 2: mod_base = OTHER; note = 2'-fluoroadenosine-3'-phosphorothioate
  modified_base 3: mod_base = OTHER; note = 2'-O-methyladenosine-3'-phosphate
  modified_base 4: mod_base = OTHER; note = 2'-fluorouridine-3'-phosphate
  modified_base 5: mod_base = OTHER; note = 2'-O-methyluridine-3'-phosphate
  modified_base 6: mod_base = OTHER; note = 2'-fluoroadenosine-3'-phosphate
  modified_base 7: mod_base = OTHER; note = 2'-O-methyladenosine-3'-phosphate
  modified_base 8: mod_base = OTHER; note = 2'-fluoroguanosine-3'-phosphate
  modified_base 9: mod_base = OTHER; note = 2'-O-methyladenosine-3'-phosphate
  modified_base 10: mod_base = OTHER; note = 2'-fluorouridine-3'-phosphate
  modified_base 11: mod_base = OTHER; note = 2'-O-methyluridine-3'-phosphate
  modified_base 12: mod_base = OTHER; note = 2'-fluorocytidine-3'-phosphate
  modified_base 13: mod_base = OTHER; note = 2'-O-methyladenosine-3'-phosphate
  modified_base 14: mod_base = OTHER; note = 2'-fluoroadenosine-3'-phosphate
  modified_base 15: mod_base = OTHER; note = 2'-O-methyluridine-3'-phosphate
  modified_base 16: mod_base = OTHER; note = 2'-fluoroadenosine-3'-phosphate
  modified_base 17: mod_base = OTHER; note = 2'-O-methyladenosine-3'-phosphate
  modified_base 18: mod_base = OTHER; note = 2'-fluorocytidine-3'-phosphate
  modified_base 19: mod_base = OTHER; note = 2'-O-methyluridine-3'-phosphorothioate
  modified_base 20: mod_base = OTHER; note = 2'-O-methyluridine-3'-phosphorothioate
  modified_base 21: mod_base = OTHER; note = 2'-O-methyluridine
aaattaagattcaataacttt

SEQ ID NO: 1403 - RNA, 21 nt, synthetic construct
  source 1..21: mol_type = other RNA
  modified_base 1: mod_base = OTHER; note = 2'-O-methyladenosine-3'-phosphorothioate
  modified_base 2: mod_base = OTHER; note = 2'-fluorouridine-3'-phosphorothioate
  modified_base 3: mod_base = OTHER; note = 2'-O-methyladenosine-3'-phosphate
  modified_base 4: mod_base = OTHER; note = 2'-fluorocytidine-3'-phosphate
  modified_base 5: mod_base = OTHER; note = 2'-O-methyladenosine-3'-phosphate
  modified_base 6: mod_base = OTHER; note = 2'-fluoroadenosine-3'-phosphate
  modified_base 7: mod_base = OTHER; note = 2'-O-methyladenosine-3'-phosphate
  modified_base 8: mod_base = OTHER; note = 2'-fluoroadenosine-3'-phosphate
  modified_base 9: mod_base = OTHER; note = 2'-O-methyluridine-3'-phosphate
  modified_base 10: mod_base = OTHER; note = 2'-fluoroadenosine-3'-phosphate
  modified_base 11: mod_base = OTHER; note = 2'-O-methyladenosine-3'-phosphate
  modified_base 12: mod_base = OTHER; note = 2'-fluoroguanosine-3'-phosphate
  modified_base 13: mod_base = OTHER; note = 2'-O-methylguanosine-3'-phosphate
  modified_base 14: mod_base = OTHER; note = 2'-fluoroadenosine-3'-phosphate
  modified_base 15: mod_base = OTHER; note = 2'-O-methylguanosine-3'-phosphate
  modified_base 16: mod_base = OTHER; note = 2'-fluorouridine-3'-phosphate
  modified_base 17: mod_base = OTHER; note = 2'-O-methyluridine-3'-phosphate
  modified_base 18: mod_base = OTHER; note = 2'-fluorocytidine-3'-phosphate
  modified_base 19: mod_base = OTHER; note = 2'-O-methyluridine-3'-phosphorothioate
  modified_base 20: mod_base = OTHER; note = 2'-O-methyluridine-3'-phosphorothioate
  modified_base 21: mod_base = OTHER; note = 2'-O-methyluridine
atacaaaataaggagttcttt

SEQ ID NO: 1404 - RNA, 21 nt, synthetic construct
  source 1..21: mol_type = other RNA
gttgtcaagactttttcgaat

SEQ ID NO: 1405 - RNA, 21 nt, synthetic construct
  source 1..21: mol_type = other RNA
  modified_base 1: mod_base = OTHER; note = 2'-O-methylguanosine-3'-phosphorothioate
  modified_base 2: mod_base = OTHER; note = 2'-O-methyluridine-3'-phosphorothioate
  modified_base 3: mod_base = OTHER; note = 2'-O-methyluridine-3'-phosphate
  modified_base 4: mod_base = OTHER; note = 2'-O-methylguanosine-3'-phosphate
  modified_base 5: mod_base = OTHER; note = 2'-O-methyluridine-3'-phosphate
  modified_base 6: mod_base = OTHER; note = 2'-O-methylcytidine-3'-phosphate
  modified_base 7: mod_base = OTHER; note = 2'-fluoroadenosine-3'-phosphate
  modified_base 8: mod_base = OTHER; note = 2'-O-methyladenosine-3'-phosphate
  modified_base 9: mod_base = OTHER; note = 2'-fluoroguanosine-3'-phosphate
  modified_base 10: mod_base = OTHER; note = 2'-fluoroadenosine-3'-phosphate
  modified_base 11: mod_base = OTHER; note = 2'-fluorocytidine-3'-phosphate
  modified_base 12: mod_base = OTHER; note = 2'-O-methyluridine-3'-phosphate
  modified_base 13: mod_base = OTHER; note = 2'-O-methyluridine-3'-phosphate
  modified_base 14: mod_base = OTHER; note = 2'-O-methyluridine-3'-phosphate
  modified_base 15: mod_base = OTHER; note = 2'-O-methyluridine-3'-phosphate
  modified_base 16: mod_base = OTHER; note = 2'-O-methyluridine-3'-phosphate
  modified_base 17: mod_base = OTHER; note = 2'-O-methylcytidine-3'-phosphate
  modified_base 18: mod_base = OTHER; note = 2'-O-methylguanosine-3'-phosphate
  modified_base 19: mod_base = OTHER; note = 2'-O-methyladenosine-3'-phosphate
  modified_base 20: mod_base = OTHER; note = 2'-O-methyladenosine-3'-phosphate
  modified_base 21: mod_base = OTHER; note 2'-O-methyluridine-3'-phosphate-(N1-hydroxyethanol-N12[tris (GalNAc-triethyleneglycol)]-diamidodecane]
gttgtcaagactttttcgaat

SEQ ID NO: 1406 - RNA, 21 nt, synthetic construct
  source 1..21: mol_type = other RNA
gttgtcaagactttttcgaaa

SEQ ID NO: 1407 - RNA, 21 nt, synthetic construct
  source 1..21: mol_type = other RNA
  modified_base 1: mod_base = OTHER; note = 2'-O-methylguanosine-3'-phosphorothioate
  modified_base 2: mod_base = OTHER; note = 2'-O-methyluridine-3'-phosphorothioate
  modified_base 3: mod_base = OTHER; note = 2'-O-methyluridine-3'-phosphate
  modified_base 4: mod_base = OTHER; note = 2'-O-methylguanosine-3'-phosphate
  modified_base 5: mod_base = OTHER; note = 2'-O-methyluridine-3'-phosphate
  modified_base 6: mod_base = OTHER; note = 2'-O-methylcytidine-3'-phosphate
  modified_base 7: mod_base = OTHER; note = 2'-O-methyladenosine-3'-phosphate
  modified_base 8: mod_base = OTHER; note = 2'-O-methyladenosine-3'-phosphate
  modified_base 9: mod_base = OTHER; note = 2'-fluoroguanosine-3'-phosphate
  modified_base 10: mod_base = OTHER; note = 2'-O-methyladenosine-3'-phosphate
  modified_base 11: mod_base = OTHER; note = 2'-fluorocytidine-3'-phosphate
  modified_base 12: mod_base = OTHER; note = 2'-O-methyluridine-3'-phosphate
  modified_base 13: mod_base = OTHER; note = 2'-fluorouridine-3'-phosphate
  modified_base 14: mod_base = OTHER; note = 2'-O-methyluridine-3'-phosphate
  modified_base 15: mod_base = OTHER; note = 2'-O-methyluridine-3'-phosphate
  modified_base 16: mod_base = OTHER; note = 2'-O-methyluridine-3'-phosphate
  modified_base 17: mod_base = OTHER; note = 2'-O-methylcytidine-3'-phosphate
  modified_base 18: mod_base = OTHER; note = 2'-O-methylguanosine-3'-phosphate
  modified_base 19: mod_base = OTHER; note = 2'-O-methyladenosine-3'-phosphate
  modified_base 20: mod_base = OTHER; note = 2'-O-methyladenosine-3'-phosphorothioate
  modified_base 21: mod_base = OTHER; note 2'-O-methyladenosine-3'-phosphate-(N1-hydroxyethanol-N12[tr is(GalNAc-triethyleneglycol)]-diamidodecane]
gttgtcaagactttttcgaaa

SEQ ID NO: 1408 - RNA, 21 nt, synthetic construct
  source 1..21: mol_type = other RNA
tgtcaagactttttcgaatga

SEQ ID NO: 1409 - RNA, 21 nt, synthetic construct
  source 1..21: mol_type = other RNA
  modified_base 1: mod_base = OTHER; note = 2'-O-methyluridine-3'-phosphorothioate
  modified_base 2: mod_base = OTHER; note = 2'-O-methylguanosine-3'-phosphorothioate
  modified_base 3: mod_base = OTHER; note = 2'-O-methyluridine-3'-phosphate
  modified_base 4: mod_base = OTHER; note = 2'-O-methylcytidine-3'-phosphate
  modified_base 5: mod_base = OTHER; note = 2'-O-methyladenosine-3'-phosphate
  modified_base 6: mod_base = OTHER; note = 2'-O-methyladenosine-3'-phosphate
  modified_base 7: mod_base = OTHER; note = 2'-O-methylguanosine-3'-phosphate
  modified_base 8: mod_base = OTHER; note = 2'-O-methyladenosine-3'-phosphate
  modified_base 9: mod_base = OTHER; note = 2'-fluorocytidine-3'-phosphate
  modified_base 10: mod_base = OTHER; note = 2'-O-methyluridine-3'-phosphate
  modified_base 11: mod_base = OTHER; note = 2'-fluorouridine-3'-phosphate
  modified_base 12: mod_base = OTHER; note = 2'-O-methyluridine-3'-phosphate
  modified_base 13: mod_base = OTHER; note = 2'-fluorouridine-3'-phosphate
  modified_base 14: mod_base = OTHER; note = 2'-O-methyluridine-3'-phosphate
  modified_base 15: mod_base = OTHER; note = 2'-O-methylcytidine-3'-phosphate
  modified_base 16: mod_base = OTHER; note = 2'-O-methylguanosine-3'-phosphate
  modified_base 17: mod_base = OTHER; note = 2'-O-methyladenosine-3'-phosphate
  modified_base 18: mod_base = OTHER; note = 2'-O-methyladenosine-3'-phosphate
  modified_base 19: mod_base = OTHER; note = 2'-O-methyluridine-3'-phosphate
  modified_base 20: mod_base = OTHER; note = 2'-O-methylguanosine-3'-phosphorothioate
  modified_base 21: mod_base = OTHER; note 2'-O-methyladenosine-3'-phosphate-(N1-hydroxyethanol-N12[tr is(GalNAc-triethyleneglycol)]-diamidodecane]
tgtcaagactttttcgaatga

SEQ ID NO: 1410 - RNA, 21 nt, synthetic construct
  source 1..21: mol_type = other RNA
aatgttgtcaagactttttca

SEQ ID NO: 1411 - RNA, 21 nt, synthetic construct
  source 1..21: mol_type = other RNA
  modified_base 1: mod_base = OTHER; note = 2'-O-methyladenosine-3'-phosphorothioate
  modified_base 2: mod_base = OTHER; note = 2'-O-methyladenosine-3'-phosphorothioate
  modified_base 3: mod_base = OTHER; note = 2'-O-methyluridine-3'-phosphate
  modified_base 4: mod_base = OTHER; note = 2'-O-methylguanosine-3'-phosphate
  modified_base 5: mod_base = OTHER; note = 2'-O-methyluridine-3'-phosphate
  modified_base 6: mod_base = OTHER; note = 2'-O-methyluridine-3'-phosphate
  modified_base 7: mod_base = OTHER; note = 2'-O-methylguanosine-3'-phosphate
  modified_base 8: mod_base = OTHER; note = 2'-O-methyluridine-3'-phosphate
  modified_base 9: mod_base = OTHER; note = 2'-fluorocytidine-3'-phosphate
  modified_base 10: mod_base = OTHER; note = 2'-O-methyladenosine-3'-phosphate
  modified_base 11: mod_base = OTHER; note = 2'-fluoroadenosine-3'-phosphate
  modified_base 12: mod_base = OTHER; note = 2'-O-methylguanosine-3'-phosphate
  modified_base 13: mod_base = OTHER; note = 2'-fluoroadenosine-3'-phosphate
  modified_base 14: mod_base = OTHER; note = 2'-O-methylcytidine-3'-phosphate
  modified_base 15: mod_base = OTHER; note = 2'-O-methyluridine-3'-phosphate
  modified_base 16: mod_base = OTHER; note = 2'-O-methyluridine-3'-phosphate
  modified_base 17: mod_base = OTHER; note = 2'-O-methyluridine-3'-phosphate
  modified_base 18: mod_base = OTHER; note = 2'-O-methyluridine-3'-phosphate
  modified_base 19: mod_base = OTHER; note = 2'-O-methyluridine-3'-phosphorothioate
  modified_base 20: mod_base = OTHER; note = 2'-O-methylcytidine-3'-phosphorothioate
  modified_base 21: mod_base = OTHER; note 2'-O-methyladenosine-3'-phosphate-(N1-hydroxyethanol-N12[tr is(GalNAc-triethyleneglycol)]-diamidodecane]
aatgttgtcaagactttttca

SEQ ID NO: 1412 - RNA, 21 nt, synthetic construct
  source 1..21: mol_type = other RNA
atgttgtcaagactttttcga

SEQ ID NO: 1413 - RNA, 21 nt, synthetic construct
  source 1..21: mol_type = other RNA
  modified_base 1: mod_base = OTHER; note = 2'-O-methyladenosine-3'-phosphorothioate
  modified_base 2: mod_base = OTHER; note = 2'-O-methyluridine-3'-phosphorothioate
  modified_base 3: mod_base = OTHER; note = 2'-O-methylguanosine-3'-phosphate
  modified_base 4: mod_base = OTHER; note = 2'-O-methyluridine-3'-phosphate
  modified_base 5: mod_base = OTHER; note = 2'-O-methyluridine-3'-phosphate
  modified_base 6: mod_base = OTHER; note = 2'-O-methylguanosine-3'-phosphate
  modified_base 7: mod_base = OTHER; note = 2'-O-methyluridine-3'-phosphate
  modified_base 8: mod_base = OTHER; note = 2'-O-methylcytidine-3'-phosphate
  modified_base 9: mod_base = OTHER; note = 2'-fluoroadenosine-3'-phosphate
  modified_base 10: mod_base = OTHER; note = 2'-O-methyladenosine-3'-phosphate
  modified_base 11: mod_base = OTHER; note = 2'-fluoroguanosine-3'-phosphate
  modified_base 12: mod_base = OTHER; note = 2'-O-methyladenosine-3'-phosphate
  modified_base 13: mod_base = OTHER; note = 2'-fluorocytidine-3'-phosphate
  modified_base 14: mod_base = OTHER; note = 2'-O-methyluridine-3'-phosphate
  modified_base 15: mod_base = OTHER; note = 2'-O-methyluridine-3'-phosphate
  modified_base 16: mod_base = OTHER; note = 2'-O-methyluridine-3'-phosphate
  modified_base 17: mod_base = OTHER; note = 2'-O-methyluridine-3'-phosphate
  modified_base 18: mod_base = OTHER; note = 2'-O-methyluridine-3'-phosphate
  modified_base 19: mod_base = OTHER; note = 2'-O-methylcytidine-3'-phosphorothioate
  modified_base 20: mod_base = OTHER; note = 2'-O-methylguanosine-3'-phosphorothioate
  modified_base 21: mod_base = OTHER; note 2'-O-methyladenosine-3'-phosphate-(N1-hydroxyethanol-N12[tr is(GalNAc-triethyleneglycol)]-diamidodecane]
atgttgtcaagactttttcga

SEQ ID NO: 1414 - RNA, 21 nt, synthetic construct
  source 1..21: mol_type = other RNA
tgttgtcaagactttttcgaa

SEQ ID NO: 1415 - RNA, 21 nt, synthetic construct
  source 1..21: mol_type = other RNA
  modified_base 1: mod_base = OTHER; note = 2'-O-methyluridine-3'-phosphorothioate
  modified_base 2: mod_base = OTHER; note = 2'-O-methylguanosine-3'-phosphorothioate
  modified_base 3: mod_base = OTHER; note = 2'-O-methyluridine-3'-phosphate
  modified_base 4: mod_base = OTHER; note = 2'-O-methyluridine-3'-phosphate
  modified_base 5: mod_base = OTHER; note = 2'-O-methylguanosine-3'-phosphate
  modified_base 6: mod_base = OTHER; note = 2'-O-methyluridine-3'-phosphate
  modified_base 7: mod_base = OTHER; note = 2'-O-methylcytidine-3'-phosphate
  modified_base 8: mod_base = OTHER; note = 2'-O-methyladenosine-3'-phosphate
  modified_base 9: mod_base = OTHER; note = 2'-fluoroadenosine-3'-phosphate
  modified_base 10: mod_base = OTHER; note = 2'-O-methylguanosine-3'-phosphate
  modified_base 11: mod_base = OTHER; note = 2'-fluoroadenosine-3'-phosphate
  modified_base 12: mod_base = OTHER; note = 2'-O-methylcytidine-3'-phosphate
  modified_base 13: mod_base = OTHER; note = 2'-fluorouridine-3'-phosphate
  modified_base 14: mod_base = OTHER; note = 2'-O-methyluridine-3'-phosphate
  modified_base 15: mod_base = OTHER; note = 2'-O-methyluridine-3'-phosphate
  modified_base 16: mod_base = OTHER; note = 2'-O-methyluridine-3'-phosphate
  modified_base 17: mod_base = OTHER; note = 2'-O-methyluridine-3'-phosphate
  modified_base 18: mod_base = OTHER; note = 2'-O-methylcytidine-3'-phosphate
  modified_base 19: mod_base = OTHER; note = 2'-O-methylguanosine-3'-phosphorothioate
  modified_base 20: mod_base = OTHER; note = 2'-O-methyladenosine-3'-phosphorothioate
  modified_base 21: mod_base = OTHER; note 2'-O-methyladenosine-3'-phosphate-(N1-hydroxyethanol-N12[tr is(GalNAc-triethyleneglycol)]-diamidodecane]
tgttgtcaagactttttcgaa

SEQ ID NO: 1416 - RNA, 21 nt, synthetic construct
  source 1..21: mol_type = other RNA
gaatgttgtcaagacttttta

SEQ ID NO: 1417 - RNA, 21 nt, synthetic construct
  source 1..21: mol_type = other RNA
  modified_base 1: mod_base = OTHER; note = 2'-O-methylguanosine-3'-phosphorothioate
  modified_base 2: mod_base = OTHER; note = 2'-O-methyladenosine-3'-phosphorothioate
  modified_base 3: mod_base = OTHER; note = 2'-O-methyladenosine-3'-phosphate
  modified_base 4: mod_base = OTHER; note = 2'-O-methyluridine-3'-phosphate
  modified_base 5: mod_base = OTHER; note = 2'-O-methylguanosine-3'-phosphate
  modified_base 6: mod_base = OTHER; note = 2'-O-methyluridine-3'-phosphate
  modified_base 7: mod_base = OTHER; note = 2'-O-methyluridine-3'-phosphate
  modified_base 8: mod_base = OTHER; note = 2'-O-methylguanosine-3'-phosphate
  modified_base 9: mod_base = OTHER; note = 2'-fluorouridine-3'-phosphate
  modified_base 10: mod_base = OTHER; note = 2'-O-methylcytidine-3'-phosphate
  modified_base 11: mod_base = OTHER; note = 2'-fluoroadenosine-3'-phosphate
  modified_base 12: mod_base = OTHER; note = 2'-O-methyladenosine-3'-phosphate
  modified_base 13: mod_base = OTHER; note = 2'-fluoroguanosine-3'-phosphate
  modified_base 14: mod_base = OTHER; note = 2'-O-methyladenosine-3'-phosphate
  modified_base 15: mod_base = OTHER; note = 2'-O-methylcytidine-3'-phosphate
  modified_base 16: mod_base = OTHER; note = 2'-O-methyluridine-3'-phosphate
  modified_base 17: mod_base = OTHER; note = 2'-O-methyluridine-3'-phosphate
  modified_base 18: mod_base = OTHER; note = 2'-O-methyluridine-3'-phosphate
  modified_base 19: mod_base = OTHER; note = 2'-O-methyluridine-3'-phosphorothioate
  modified_base 20: mod_base = OTHER; note = 2'-O-methyluridine-3'-phosphorothioate
  modified_base 21: mod_base = OTHER; note 2'-O-methyladenosine-3'-phosphate-(N1-hydroxyethanol-N12[tr is(GalNAc-triethyleneglycol)]-diamidodecane]
gaatgttgtcaagacttttta

SEQ ID NO: 1418 - RNA, 21 nt, synthetic construct
  source 1..21: mol_type = other RNA
  modified_base 1: mod_base = OTHER; note = 2'-O-methoxyethyl(MOE)-thymidine(or 5-methyluridine)-3'- phosphorothioate
  modified_base 2: mod_base = OTHER; note = 2'-O-methoxyethyl(MOE) guanosine-3'-phosphorothioate
  modified_base 3: mod_base = OTHER; note = 2'-O-methyluridine-3'-phosphate
  modified_base 4: mod_base = OTHER; note = 2'-O-methyluridine-3'-phosphate
  modified_base 5: mod_base = OTHER; note = 2'-O-methylguanosine-3'-phosphate
  modified_base 6: mod_base = OTHER; note = 2'-O-methyluridine-3'-phosphate
  modified_base 7: mod_base = OTHER; note = 2'-fluorocytidine-3'-phosphate
  modified_base 8: mod_base = OTHER; note = 2'-O-methyladenosine-3'-phosphate
  modified_base 9: mod_base = OTHER; note = 2'-fluoroadenosine-3'-phosphate
  modified_base 10: mod_base = OTHER; note = 2'-fluoroguanosine-3'-phosphate
  modified_base 11: mod_base = OTHER; note = 2'-fluoroadenosine-3'-phosphate
  modified_base 12: mod_base = OTHER; note = 2'-O-methylcytidine-3'-phosphate
  modified_base 13: mod_base = OTHER; note = 2'-O-methyluridine-3'-phosphate
  modified_base 14: mod_base = OTHER; note = 2'-O-methyluridine-3'-phosphate
  modified_base 15: mod_base = OTHER; note = 2'-O-methyluridine-3'-phosphate
  modified_base 16: mod_base = OTHER; note = 2'-O-methyluridine-3'-phosphate
  modified_base 17: mod_base = OTHER; note = 2'-O-methyluridine-3'-phosphate
  modified_base 18: mod_base = OTHER; note = 2'-O-methylcytidine-3'-phosphate
  modified_base 19: mod_base = OTHER; note = 2'-O-methylguanosine-3'-phosphate
  modified_base 20: mod_base = OTHER; note = 2'-O-methoxyethyl(MOE) adenosine-3'-phosphate
  modified_base 21: mod_base = OTHER; note = 2'-O-methoxyethyl(MOE) adenosine-3'-phosphate-(N1-hydroxyethanol-N12[tris(GalNAc-t riethyleneglycol)]-diamidodecane]
tgttgtcaagactttttcgaa

SEQ ID NO: 1419 - RNA, 23 nt, synthetic construct
  source 1..23: mol_type = other RNA
attcgaaaaagtcttgacaacat

SEQ ID NO: 1420 - RNA, 23 nt, synthetic construct
  source 1..23: mol_type = other RNA
  modified_base 1: mod_base = OTHER; note = 2'-O-methyladenosine-3'-phosphorothioate
  modified_base 2: mod_base = OTHER; note = 2'-fluorouridine-3'-phosphorothioate
  modified_base 3: mod_base = OTHER; note = 2'-O-methyluridine-3'-phosphate
  modified_base 4: mod_base = OTHER; note = 2'-O-methylcytidine-3'-phosphate
  modified_base 5: mod_base = OTHER; note = 2'-O-methylguanosine-3'-phosphate
  modified_base 6: mod_base = OTHER; note = 2'-fluoroadenosine-3'-phosphate
  modified_base 7: mod_base = OTHER; note = 2'-O-methyladenosine-3'-phosphate
  modified_base 8: mod_base = OTHER; note = 2'-fluoroadenosine-3'-phosphate
  modified_base 9: mod_base = OTHER; note = 2'-fluoroadenosine-3'-phosphate
  modified_base 10: mod_base = OTHER; note = 2'-O-methyladenosine-3'-phosphate
  modified_base 11: mod_base = OTHER; note = 2'-O-methylguanosine-3'-phosphate
  modified_base 12: mod_base = OTHER; note = 2'-O-methyluridine-3'-phosphate
  modified_base 13: mod_base = OTHER; note = 2'-O-methylcytidine-3'-phosphate
  modified_base 14: mod_base = OTHER; note = 2'-fluorouridine-3'-phosphate
  modified_base 15: mod_base = OTHER; note = 2'-O-methyluridine-3'-phosphate
  modified_base 16: mod_base = OTHER; note = 2'-fluoroguanosine-3'-phosphate
  modified_base 17: mod_base = OTHER; note = 2'-O-methyladenosine-3'-phosphate
  modified_base 18: mod_base = OTHER; note = 2'-O-methylcytidine-3'-phosphate
  modified_base 19: mod_base = OTHER; note = 2'-O-methyladenosine-3'-phosphate
  modified_base 20: mod_base = OTHER; note = 2'-O-methyladenosine-3'-phosphate
  modified_base 21: mod_base = OTHER; note = 2'-O-methylcytidine-3'-phosphorothioate
  modified_base 22: mod_base = OTHER; note = 2'-O-methyladenosine-3'-phosphorothioate
  modified_base 23: mod_base = OTHER; note = 2'-O-methyluridine
attcgaaaaagtcttgacaacat

SEQ ID NO: 1421 - RNA, 21 nt, synthetic construct
  source 1..21: mol_type = other RNA
tttcgaaaaagtcttgacaac

SEQ ID NO: 1422 - RNA, 21 nt, synthetic construct
  source 1..21: mol_type = other RNA
  modified_base 1: mod_base = OTHER; note = 2'-O-methyluridine-3'-phosphorothioate
  modified_base 2: mod_base = OTHER; note = 2'-fluorouridine-3'-phosphorothioate
  modified_base 3: mod_base = OTHER; note = 2'-O-methyluridine-3'-phosphate
  modified_base 4: mod_base = OTHER; note = 2'-O-methylcytidine-3'-phosphate
  modified_base 5: mod_base = OTHER; note = 2'-O-methylguanosine-3'-phosphate
  modified_base 6: mod_base = OTHER; note = 2'-O-methyladenosine-3'-phosphate
  modified_base 7: mod_base = OTHER; note = 2'-fluoroadenosine-3'-phosphate
  modified_base 8: mod_base = OTHER; note = 2'-O-methyladenosine-3'-phosphate
  modified_base 9: mod_base = OTHER; note = 2'-O-methyladenosine-3'-phosphate
  modified_base 10: mod_base = OTHER; note = 2'-O-methyladenosine-3'-phosphate
  modified_base 11: mod_base = OTHER; note = 2'-O-methylguanosine-3'-phosphate
  modified_base 12: mod_base = OTHER; note = 2'-fluorouridine-3'-phosphate
  modified_base 13: mod_base = OTHER; note = 2'-O-methylcytidine-3'-phosphate
  modified_base 14: mod_base = OTHER; note = 2'-fluorouridine-3'-phosphate
  modified_base 15: mod_base = OTHER; note = 2'-O-methyluridine-3'-phosphate
  modified_base 16: mod_base = OTHER; note = 2'-fluoroguanosine-3'-phosphate
  modified_base 17: mod_base = OTHER; note = 2'-O-methyladenosine-3'-phosphate
  modified_base 18: mod_base = OTHER; note = 2'-O-methylcytidine-3'-phosphate
  modified_base 19: mod_base = OTHER; note = 2'-O-methyladenosine-3'-phosphorothioate
  modified_base 20: mod_base = OTHER; note = 2'-O-methyladenosine-3'-phosphorothioate
  modified_base 21: mod_base = OTHER; note = 2'-O-methylcytidine
tttcgaaaaagtcttgacaac

SEQ ID NO: 1423 - RNA, 21 nt, synthetic construct
  source 1..21: mol_type = other RNA
tcattcgaaaaagtcttgaca

SEQ ID NO: 1424 - RNA, 21 nt, synthetic construct
  source 1..21: mol_type = other RNA
  modified_base 1: mod_base = OTHER; note = 2'-O-methyluridine-3'-phosphorothioate
  modified_base 2: mod_base = OTHER; note = 2'-fluorocytidine-3'-phosphorothioate
  modified_base 3: mod_base = OTHER; note = 2'-O-methyladenosine-3'-phosphate
  modified_base 4: mod_base = OTHER; note = 2'-O-methyluridine-3'-phosphate
  modified_base 5: mod_base = OTHER; note = 2'-O-methyluridine-3'-phosphate
  modified_base 6: mod_base = OTHER; note = 2'-O-methylcytidine-3'-phosphate
  modified_base 7: mod_base = OTHER; note = 2'-fluoroguanosine-3'-phosphate
  modified_base 8: mod_base = OTHER; note = 2'-O-methyladenosine-3'-phosphate
  modified_base 9: mod_base = OTHER; note = 2'-O-methyladenosine-3'-phosphate
  modified_base 10: mod_base = OTHER; note = 2'-O-methyladenosine-3'-phosphate
  modified_base 11: mod_base = OTHER; note = 2'-O-methyladenosine-3'-phosphate
  modified_base 12: mod_base = OTHER; note = 2'-fluoroadenosine-3'-phosphate
  modified_base 13: mod_base = OTHER; note = 2'-O-methylguanosine-3'-phosphate
  modified_base 14: mod_base = OTHER; note = 2'-fluorouridine-3'-phosphate
  modified_base 15: mod_base = OTHER; note = 2'-O-methylcytidine-3'-phosphate
  modified_base 16: mod_base = OTHER; note = 2'-fluorouridine-3'-phosphate
  modified_base 17: mod_base = OTHER; note = 2'-O-methyluridine-3'-phosphate
  modified_base 18: mod_base = OTHER; note = 2'-O-methylguanosine-3'-phosphate
  modified_base 19: mod_base = OTHER; note = 2'-O-methyladenosine-3'-phosphorothioate
  modified_base 20: mod_base = OTHER; note = 2'-O-methylcytidine-3'-phosphorothioate
  modified_base 21: mod_base = OTHER; note = 2'-O-methyladenosine
tcattcgaaaaagtcttgaca

SEQ ID NO: 1425 - RNA, 21 nt, synthetic construct
  source 1..21: mol_type = other RNA
tgaaaaagtcttgacaacatt

SEQ ID NO: 1426 - RNA, 21 nt, synthetic construct
  source 1..21: mol_type = other RNA
  modified_base 1: mod_base = OTHER; note = 2'-O-methyluridine-3'-phosphorothioate
  modified_base 2: mod_base = OTHER; note = 2'-fluoroguanosine-3'-phosphorothioate
  modified_base 3: mod_base = OTHER; note = 2'-O-methyladenosine-3'-phosphate
  modified_base 4: mod_base = OTHER; note = 2'-O-methyladenosine-3'-phosphate
  modified_base 5: mod_base = OTHER; note = 2'-O-methyladenosine-3'-phosphate
  modified_base 6: mod_base = OTHER; note = 2'-O-methyladenosine-3'-phosphate
  modified_base 7: mod_base = OTHER; note = 2'-fluoroadenosine-3'-phosphate
  modified_base 8: mod_base = OTHER; note = 2'-O-methylguanosine-3'-phosphate
  modified_base 9: mod_base = OTHER; note = 2'-O-methyluridine-3'-phosphate
  modified_base 10: mod_base = OTHER; note = 2'-O-methylcytidine-3'-phosphate
  modified_base 11: mod_base = OTHER; note = 2'-O-methyluridine-3'-phosphate
  modified_base 12: mod_base = OTHER; note = 2'-fluorouridine-3'-phosphate
  modified_base 13: mod_base = OTHER; note = 2'-O-methylguanosine-3'-phosphate
  modified_base 14: mod_base = OTHER; note = 2'-fluoroadenosine-3'-phosphate
  modified_base 15: mod_base = OTHER; note = 2'-O-methylcytidine-3'-phosphate
  modified_base 16: mod_base = OTHER; note = 2'-fluoroadenosine-3'-phosphate
  modified_base 17: mod_base = OTHER; note = 2'-O-methyladenosine-3'-phosphate
  modified_base 18: mod_base = OTHER; note = 2'-O-methylcytidine-3'-phosphate
  modified_base 19: mod_base = OTHER; note = 2'-O-methyladenosine-3'-phosphorothioate
  modified_base 20: mod_base = OTHER; note = 2'-O-methyluridine-3'-phosphorothioate
  modified_base 21: mod_base = OTHER; note = 2'-O-methyluridine
tgaaaaagtcttgacaacatt

SEQ ID NO: 1427 - RNA, 21 nt, synthetic construct
  source 1..21: mol_type = other RNA
tcgaaaaagtcttgacaacat

SEQ ID NO: 1428 - RNA, 21 nt, synthetic construct
  source 1..21: mol_type = other RNA
  modified_base 1: mod_base = OTHER; note = 2'-O-methyluridine-3'-phosphorothioate
  modified_base 2: mod_base = OTHER; note = 2'-fluorocytidine-3'-phosphorothioate
  modified_base 3: mod_base = OTHER; note = 2'-O-methylguanosine-3'-phosphate
  modified_base 4: mod_base = OTHER; note = 2'-O-methyladenosine-3'-phosphate
  modified_base 5: mod_base = OTHER; note = 2'-O-methyladenosine-3'-phosphate
  modified_base 6: mod_base = OTHER; note = 2'-O-methyladenosine-3'-phosphate
  modified_base 7: mod_base = OTHER; note = 2'-fluoroadenosine-3'-phosphate
  modified_base 8: mod_base = OTHER; note = 2'-O-methyladenosine-3'-phosphate
  modified_base 9: mod_base = OTHER; note = 2'-O-methylguanosine-3'-phosphate
  modified_base 10: mod_base = OTHER; note = 2'-O-methyluridine-3'-phosphate
  modified_base 11: mod_base = OTHER; note = 2'-O-methylcytidine-3'-phosphate
  modified_base 12: mod_base = OTHER; note = 2'-fluorouridine-3'-phosphate
  modified_base 13: mod_base = OTHER; note = 2'-O-methyluridine-3'-phosphate
  modified_base 14: mod_base = OTHER; note = 2'-fluoroguanosine-3'-phosphate
  modified_base 15: mod_base = OTHER; note = 2'-O-methyladenosine-3'-phosphate
  modified_base 16: mod_base = OTHER; note = 2'-fluorocytidine-3'-phosphate
  modified_base 17: mod_base = OTHER; note = 2'-O-methyladenosine-3'-phosphate
  modified_base 18: mod_base = OTHER; note = 2'-O-methyladenosine-3'-phosphate
  modified_base 19: mod_base = OTHER; note = 2'-O-methylcytidine-3'-phosphorothioate
  modified_base 20: mod_base = OTHER; note = 2'-O-methyladenosine-3'-phosphorothioate
  modified_base 21: mod_base = OTHER; note = 2'-O-methyluridine
tcgaaaaagtcttgacaacat

SEQ ID NO: 1429 - RNA, 21 nt, synthetic construct
  source 1..21: mol_type = other RNA
ttcgaaaaagtcttgacaaca

SEQ ID NO: 1430 - RNA, 21 nt, synthetic construct
  source 1..21: mol_type = other RNA
  modified_base 1: mod_base = OTHER; note = 2'-O-methyluridine-3'-phosphorothioate
  modified_base 2: mod_base = OTHER; note = 2'-fluorouridine-3'-phosphorothioate
  modified_base 3: mod_base = OTHER; note = 2'-O-methylcytidine-3'-phosphate
  modified_base 4: mod_base = OTHER; note = 2'-O-methylguanosine-3'-phosphate
  modified_base 5: mod_base = OTHER; note = 2'-O-methyladenosine-3'-phosphate
  modified_base 6: mod_base = OTHER; note = 2'-O-methyladenosine-3'-phosphate
  modified_base 7: mod_base = OTHER; note = 2'-fluoroadenosine-3'-phosphate
  modified_base 8: mod_base = OTHER; note = 2'-O-methyladenosine-3'-phosphate
  modified_base 9: mod_base = OTHER; note = 2'-O-methyladenosine-3'-phosphate
  modified_base 10: mod_base = OTHER; note = 2'-O-methylguanosine-3'-phosphate
  modified_base 11: mod_base = OTHER; note = 2'-O-methyluridine-3'-phosphate
  modified_base 12: mod_base = OTHER; note = 2'-fluorocytidine-3'-phosphate
  modified_base 13: mod_base = OTHER; note = 2'-O-methyluridine-3'-phosphate
  modified_base 14: mod_base = OTHER; note = 2'-fluorouridine-3'-phosphate
  modified_base 15: mod_base = OTHER; note = 2'-O-methylguanosine-3'-phosphate
  modified_base 16: mod_base = OTHER; note = 2'-fluoroadenosine-3'-phosphate
  modified_base 17: mod_base = OTHER; note = 2'-O-methylcytidine-3'-phosphate
  modified_base 18: mod_base = OTHER; note = 2'-O-methyladenosine-3'-phosphate
  modified_base 19: mod_base = OTHER; note = 2'-O-methyladenosine-3'-phosphorothioate
  modified_base 20: mod_base = OTHER; note = 2'-O-methylcytidine-3'-phosphorothioate
  modified_base 21: mod_base = OTHER; note = 2'-O-methyladenosine
ttcgaaaaagtcttgacaaca

SEQ ID NO: 1431 - RNA, 21 nt, synthetic construct
  source 1..21: mol_type = other RNA
taaaaagtcttgacaacattc

SEQ ID NO: 1432 - RNA, 21 nt, synthetic construct
  source 1..21: mol_type = other RNA
  modified_base 1: mod_base = OTHER; note = 2'-O-methyluridine-3'-phosphorothioate
  modified_base 2: mod_base = OTHER; note = 2'-fluoroadenosine-3'-phosphorothioate
  modified_base 3: mod_base = OTHER; note = 2'-O-methyladenosine-3'-phosphate
  modified_base 4: mod_base = OTHER; note = 2'-O-methyladenosine-3'-phosphate
  modified_base 5: mod_base = OTHER; note = 2'-O-methyladenosine-3'-phosphate
  modified_base 6: mod_base = OTHER; note = 2'-O-methyladenosine-3'-phosphate
  modified_base 7: mod_base = OTHER; note = 2'-fluoroguanosine-3'-phosphate
  modified_base 8: mod_base = OTHER; note = 2'-O-methyluridine-3'-phosphate
  modified_base 9: mod_base = OTHER; note = 2'-O-methylcytidine-3'-phosphate
  modified_base 10: mod_base = OTHER; note = 2'-O-methyluridine-3'-phosphate
  modified_base 11: mod_base = OTHER; note = 2'-O-methyluridine-3'-phosphate
  modified_base 12: mod_base = OTHER; note = 2'-fluoroguanosine-3'-phosphate
  modified_base 13: mod_base = OTHER; note = 2'-O-methyladenosine-3'-phosphate
  modified_base 14: mod_base = OTHER; note = 2'-fluorocytidine-3'-phosphate
  modified_base 15: mod_base = OTHER; note = 2'-O-methyladenosine-3'-phosphate
  modified_base 16: mod_base = OTHER; note = 2'-fluoroadenosine-3'-phosphate
  modified_base 17: mod_base = OTHER; note = 2'-O-methylcytidine-3'-phosphate
  modified_base 18: mod_base = OTHER; note = 2'-O-methyladenosine-3'-phosphate
  modified_base 19: mod_base = OTHER; note = 2'-O-methyluridine-3'-phosphorothioate
  modified_base 20: mod_base = OTHER; note = 2'-O-methyluridine-3'-phosphorothioate
  modified_base 21: mod_base = OTHER; note = 2'-O-methylcytidine
taaaaagtcttgacaacattc

SEQ ID NO: 1433 - RNA, 23 nt, synthetic construct
  source 1..23: mol_type = other RNA
  modified_base 1: mod_base = OTHER; note 5'-(E)-vinylphosphonate-2'-O-methyluridine-3'-phosphorothio ate
  modified_base 2: mod_base = OTHER; note = 2'-fluorouridine-3'-phosphorothioate
  modified_base 3: mod_base = OTHER; note = 2'-O-methylcytidine-3'-phosphate
  modified_base 4: mod_base = OTHER; note = 2'-O-methylguanosine-3'-phosphate
  modified_base 5: mod_base = OTHER; note = 2'-O-methyladenosine-3'-phosphate
  modified_base 6: mod_base = OTHER; note = 2'-fluoroadenosine-3'-phosphate
  modified_base 7: mod_base = OTHER; note = 2'-O-methyladenosine-3'-phosphate
  modified_base 8: mod_base = OTHER; note = 2'-O-methyladenosine-3'-phosphate
  modified_base 9: mod_base = OTHER; note = 2'-O-methyladenosine-3'-phosphate
  modified_base 10: mod_base = OTHER; note = 2'-O-methylguanosine-3'-phosphate
  modified_base 11: mod_base = OTHER; note = 2'-O-methyluridine-3'-phosphate
  modified_base 12: mod_base = OTHER; note = 2'-O-methylcytidine-3'-phosphate
  modified_base 13: mod_base = OTHER; note = 2'-O-methyluridine-3'-phosphate
  modified_base 14: mod_base = OTHER; note = 2'-fluorouridine-3'-phosphate
  modified_base 15: mod_base = OTHER; note = 2'-O-methylguanosine-3'-phosphate
  modified_base 16: mod_base = OTHER; note = 2'-fluoroadenosine-3'-phosphate
  modified_base 17: mod_base = OTHER; note = 2'-O-methylcytidine-3'-phosphate
  modified_base 18: mod_base = OTHER; note = 2'-O-methyladenosine-3'-phosphate
  modified_base 19: mod_base = OTHER; note = 2'-O-methyladenosine-3'-phosphate
  modified_base 20: mod_base = OTHER; note = 2'-O-methylcytidine-3'-phosphate
  modified_base 21: mod_base = OTHER; note = 2'-O-methyladenosine-3'-phosphorothioate
  modified_base 22: mod_base = OTHER; note = 2'-O-methyluridine-3'-phosphorothioate
  modified_base 23: mod_base = OTHER; note = 2'-O-methyluridine
ttcgaaaaagtcttgacaacatt

SEQ ID NO: 1434 - RNA, 21 nt, synthetic construct
  source 1..21: mol_type = other RNA
gattctgtagctacaatgtta

SEQ ID NO: 1435 - RNA, 21 nt, synthetic construct
  source 1..21: mol_type = other RNA
attctgtagctacaatgttgt

SEQ ID NO: 1436 - RNA, 21 nt, synthetic construct
  source 1..21: mol_type = other RNA
tgtagctacaatgttgtcaaa

SEQ ID NO: 1437 - RNA, 21 nt, synthetic construct
  source 1..21: mol_type = other RNA
acataaaatctgtgaattaaa

SEQ ID NO: 1438 - RNA, 21 nt, synthetic construct
  source 1..21: mol_type = other RNA
aaggactaacataaaatctgt

SEQ ID NO: 1439 - RNA, 21 nt, synthetic construct
  source 1..21: mol_type = other RNA
taagttcatgtttgtaaatta

SEQ ID NO: 1440 - RNA, 21 nt, synthetic construct
  source 1..21: mol_type = other RNA
ttaaacatgctaaatagttct

SEQ ID NO: 1441 - RNA, 23 nt, synthetic construct
  source 1..23: mol_type = other RNA
taacattgtagctacagaatcct

SEQ ID NO: 1442 - RNA, 23 nt, synthetic construct
  source 1..23: mol_type = other RNA
acaacattgtagctacagaatcc

SEQ ID NO: 1443 - RNA, 23 nt, synthetic construct
  source 1..23: mol_type = other RNA
tttgacaacattgtagctacaga

SEQ ID NO: 1444 - RNA, 23 nt, synthetic construct
  source 1..23: mol_type = other RNA
tttaattcacagattttatgtta

SEQ ID NO: 1445 - RNA, 23 nt, synthetic construct
  source 1..23: mol_type = other RNA
acagattttatgttagtccttta

SEQ ID NO: 1446 - RNA, 23 nt, synthetic construct
  source 1..23: mol_type = other RNA
taatttacaaacatgaacttaga

SEQ ID NO: 1447 - RNA, 23 nt, synthetic construct
  source 1..23: mol_type = other RNA
agaactatttagcatgtttaaca

SEQ ID NO: 1448 - RNA, 21 nt, synthetic construct
  source 1..21: mol_type = other RNA
  modified_base 1: mod_base = OTHER; note = 2'-O-methoxyethyl(MOE) guanosine-3'-phosphorothioate
  modified_base 2: mod_base = OTHER; note = 2'-O-methoxyethyl(MOE) adenosine-3'-phosphorothioate
  modified_base 3: mod_base = OTHER; note = 2'-O-methyluridine-3'-phosphate
  modified_base 4: mod_base = OTHER; note = 2'-O-methyluridine-3'-phosphate
  modified_base 5: mod_base = OTHER; note = 2'-O-methylcytidine-3'-phosphate
  modified_base 6: mod_base = OTHER; note = 2'-O-methyluridine-3'-phosphate
  modified_base 7: mod_base = OTHER; note = 2'-fluoroguanosine-3'-phosphate
  modified_base 8: mod_base = OTHER; note = 2'-O-methyluridine-3'-phosphate
  modified_base 9: mod_base = OTHER; note = 2'-fluoroadenosine-3'-phosphate
  modified_base 10: mod_base = OTHER; note = 2'-fluoroguanosine-3'-phosphate
  modified_base 11: mod_base = OTHER; note = 2'-fluorocytidine-3'-phosphate
  modified_base 12: mod_base = OTHER; note = 2'-O-methyluridine-3'-phosphate
  modified_base 13: mod_base = OTHER; note = 2'-O-methyladenosine-3'-phosphate
  modified_base 14: mod_base = OTHER; note = 2'-O-methylcytidine-3'-phosphate
  modified_base 15: mod_base = OTHER; note = 2'-O-methyladenosine-3'-phosphate
  modified_base 16: mod_base = OTHER; note = 2'-O-methyladenosine-3'-phosphate
  modified_base 17: mod_base = OTHER; note = 2'-O-methyluridine-3'-phosphate
  modified_base 18: mod_base = OTHER; note = 2'-O-methylguanosine-3'-phosphate
  modified_base 19: mod_base = OTHER; note = 2'-O-methyluridine-3'-phosphate
  modified_base 20: mod_base = OTHER; note = 2'-O-methoxyethyl(MOE)-thymidine(or 5-methyluridine)-3'-phosphate
  modified_base 21: mod_base = OTHER; note = 2'-O-methoxyethyl(MOE) adenosine
gattctgtagctacaatgtta

SEQ ID NO: 1449 - RNA, 21 nt, synthetic construct
  source 1..21: mol_type = other RNA
  modified_base 1: mod_base = OTHER; note = 2'-O-methoxyethyl(MOE) adenosine-3'-phosphorothioate
  modified_base 2: mod_base = OTHER; note = 2'-O-methoxyethyl(MOE)-thymidine(or 5-methyluridine)-3'- phosphorothioate
  modified_base 3: mod_base = OTHER; note = 2'-O-methyluridine-3'-phosphate
  modified_base 4: mod_base = OTHER; note = 2'-O-methylcytidine-3'-phosphate
  modified_base 5: mod_base = OTHER; note = 2'-O-methyluridine-3'-phosphate
  modified_base 6: mod_base = OTHER; note = 2'-O-methylguanosine-3'-phosphate
  modified_base 7: mod_base = OTHER; note = 2'-fluorouridine-3'-phosphate
  modified_base 8: mod_base = OTHER; note = 2'-O-methyladenosine-3'-phosphate
  modified_base 9: mod_base = OTHER; note = 2'-fluoroguanosine-3'-phosphate
  modified_base 10: mod_base = OTHER; note = 2'-fluorocytidine-3'-phosphate
  modified_base 11: mod_base = OTHER; note = 2'-fluorouridine-3'-phosphate
  modified_base 12: mod_base = OTHER; note = 2'-O-methyladenosine-3'-phosphate
  modified_base 13: mod_base = OTHER; note = 2'-O-methylcytidine-3'-phosphate
  modified_base 14: mod_base = OTHER; note = 2'-O-methyladenosine-3'-phosphate
  modified_base 15: mod_base = OTHER; note = 2'-O-methyladenosine-3'-phosphate
  modified_base 16: mod_base = OTHER; note = 2'-O-methyluridine-3'-phosphate
  modified_base 17: mod_base = OTHER; note = 2'-O-methylguanosine-3'-phosphate
  modified_base 18: mod_base = OTHER; note = 2'-O-methyluridine-3'-phosphate
  modified_base 19: mod_base = OTHER; note = 2'-O-methyluridine-3'-phosphate
  modified_base 20: mod_base = OTHER; note = 2'-O-methoxyethyl(MOE) guanosine-3'-phosphate
  modified_base 21: mod_base = OTHER; note = 2'-O-methoxyethyl(MOE)-thymidine(or 5-methyluridine)
attctgtagctacaatgttgt

SEQ ID NO: 1450 - RNA, 21 nt, synthetic construct
  source 1..21: mol_type = other RNA
  modified_base 1: mod_base = OTHER; note = 2'-O-methoxyethyl(MOE)-thymidine(or 5-methyluridine)-3'- phosphorothioate
  modified_base 2: mod_base = OTHER; note = 2'-O-methoxyethyl(MOE) guanosine-3'-phosphorothioate
  modified_base 3: mod_base = OTHER; note = 2'-O-methyluridine-3'-phosphate
  modified_base 4: mod_base = OTHER; note = 2'-O-methyladenosine-3'-phosphate
  modified_base 5: mod_base = OTHER; note = 2'-O-methylguanosine-3'-phosphate
  modified_base 6: mod_base = OTHER; note = 2'-O-methylcytidine-3'-phosphate
  modified_base 7: mod_base = OTHER; note = 2'-fluorouridine-3'-phosphate
  modified_base 8: mod_base = OTHER; note = 2'-O-methyladenosine-3'-phosphate
  modified_base 9: mod_base = OTHER; note = 2'-fluorocytidine-3'-phosphate
  modified_base 10: mod_base = OTHER; note = 2'-fluoroadenosine-3'-phosphate
  modified_base 11: mod_base = OTHER; note = 2'-fluoroadenosine-3'-phosphate
  modified_base 12: mod_base = OTHER; note = 2'-O-methyluridine-3'-phosphate
  modified_base 13: mod_base = OTHER; note = 2'-O-methylguanosine-3'-phosphate
  modified_base 14: mod_base = OTHER; note = 2'-O-methyluridine-3'-phosphate
  modified_base 15: mod_base = OTHER; note = 2'-O-methyluridine-3'-phosphate
  modified_base 16: mod_base = OTHER; note = 2'-O-methylguanosine-3'-phosphate
  modified_base 17: mod_base = OTHER; note = 2'-O-methyluridine-3'-phosphate
  modified_base 18: mod_base = OTHER; note = 2'-O-methylcytidine-3'-phosphate
  modified_base 19: mod_base = OTHER; note = 2'-O-methyladenosine-3'-phosphate
  modified_base 20: mod_base = OTHER; note = 2'-O-methoxyethyl(MOE) adenosine-3'-phosphate
  modified_base 21: mod_base = OTHER; note = 2'-O-methoxyethyl(MOE) adenosine
tgtagctacaatgttgtcaaa

SEQ ID NO: 1451 - RNA, 21 nt, synthetic construct
  source 1..21: mol_type = other RNA
  modified_base 1: mod_base = OTHER; note = 2'-O-methoxyethyl(MOE)-thymidine(or 5-methyluridine)-3'- phosphorothioate
  modified_base 2: mod_base = OTHER; note = 2'-O-methoxyethyl(MOE) guanosine-3'-phosphorothioate
  modified_base 3: mod_base = OTHER; note = 2'-O-methyluridine-3'-phosphate
  modified_base 4: mod_base = OTHER; note = 2'-O-methyladenosine-3'-phosphate
  modified_base 5: mod_base = OTHER; note = 2'-O-methylguanosine-3'-phosphate
  modified_base 6: mod_base = OTHER; note = 2'-O-methylcytidine-3'-phosphate
  modified_base 7: mod_base = OTHER; note = 2'-fluorouridine-3'-phosphate
  modified_base 8: mod_base = OTHER; note = 2'-O-methyladenosine-3'-phosphate
  modified_base 9: mod_base = OTHER; note = 2'-fluorocytidine-3'-phosphate
  modified_base 10: mod_base = OTHER; note = 2'-fluoroadenosine-3'-phosphate
  modified_base 11: mod_base = OTHER; note = 2'-fluoroadenosine-3'-phosphate
  modified_base 12: mod_base = OTHER; note = 2'-O-methyluridine-3'-phosphate
  modified_base 13: mod_base = OTHER; note = 2'-O-methylguanosine-3'-phosphate
  modified_base 14: mod_base = OTHER; note = 2'-O-methyluridine-3'-phosphate
  modified_base 15: mod_base = OTHER; note = 2'-O-methyluridine-3'-phosphate
  modified_base 16: mod_base = OTHER; note = 2'-O-methylguanosine-3'-phosphate
  modified_base 17: mod_base = OTHER; note = 2'-O-methyluridine-3'-phosphate
  modified_base 18: mod_base = OTHER; note = 2'-O-methylcytidine-3'-phosphate
  modified_base 19: mod_base = OTHER; note = 2'-O-methyladenosine-3'-phosphorothioate
  modified_base 20: mod_base = OTHER; note = 2'-O-methoxyethyl(MOE) adenosine-3'-phosphorothioate
  modified_base 21: mod_base = OTHER; note = 2'-O-methoxyethyl(MOE) adenosine
tgtagctacaatgttgtcaaa

SEQ ID NO: 1452 - RNA, 21 nt, synthetic construct
  source 1..21: mol_type = other RNA
  modified_base 1: mod_base = OTHER; note = 2'-O-methoxyethyl(MOE)-thymidine(or 5-methyluridine)-3'- phosphorothioate
  modified_base 2: mod_base = OTHER; note = 2'-O-methoxyethyl(MOE) guanosine-3'-phosphorothioate
  modified_base 3: mod_base = OTHER; note = 2'-O-methyluridine-3'-phosphate
  modified_base 4: mod_base = OTHER; note = 2'-O-methyluridine-3'-phosphate
  modified_base 5: mod_base = OTHER; note = 2'-O-methylguanosine-3'-phosphate
  modified_base 6: mod_base = OTHER; note = 2'-O-methyluridine-3'-phosphate
  modified_base 7: mod_base = OTHER; note = 2'-fluorocytidine-3'-phosphate
  modified_base 8: mod_base = OTHER; note = 2'-O-methyladenosine-3'-phosphate
  modified_base 9: mod_base = OTHER; note = 2'-fluoroadenosine-3'-phosphate
  modified_base 10: mod_base = OTHER; note = 2'-fluoroguanosine-3'-phosphate
  modified_base 11: mod_base = OTHER; note = 2'-fluoroadenosine-3'-phosphate
  modified_base 12: mod_base = OTHER; note = 2'-O-methylcytidine-3'-phosphate
  modified_base 13: mod_base = OTHER; note = 2'-O-methyluridine-3'-phosphate
  modified_base 14: mod_base = OTHER; note = 2'-O-methyluridine-3'-phosphate
  modified_base 15: mod_base = OTHER; note = 2'-O-methyluridine-3'-phosphate
  modified_base 16: mod_base = OTHER; note = 2'-O-methyluridine-3'-phosphate
  modified_base 17: mod_base = OTHER; note = 2'-O-methyluridine-3'-phosphate
  modified_base 18: mod_base = OTHER; note = 2'-O-methylcytidine-3'-phosphate
  modified_base 19: mod_base = OTHER; note = 2'-O-methylguanosine-3'-phosphorothioate
  modified_base 20: mod_base = OTHER; note = 2'-O-methoxyethyl(MOE) adenosine-3'-phosphorothioate
  modified_base 21: mod_base = OTHER; note = 2'-O-methoxyethyl(MOE) adenosine
tgttgtcaagactttttcgaa

SEQ ID NO: 1453 - RNA, 21 nt, synthetic construct
  source 1..21: mol_type = other RNA
  modified_base 1: mod_base = OTHER; note = 2'-O-methoxyethyl(MOE) adenosine-3'-phosphorothioate
  modified_base 2: mod_base = OTHER; note 2'-O-methoxyethyl(MOE)-5-methylcytidine-3'-phosphorothioate
  modified_base 3: mod_base = OTHER; note = 2'-O-methyladenosine-3'-phosphate
  modified_base 4: mod_base = OTHER; note = 2'-O-methyluridine-3'-phosphate
  modified_base 5: mod_base = OTHER; note = 2'-O-methyladenosine-3'-phosphate
  modified_base 6: mod_base = OTHER; note = 2'-O-methyladenosine-3'-phosphate
  modified_base 7: mod_base = OTHER; note = 2'-fluoroadenosine-3'-phosphate
  modified_base 8: mod_base = OTHER; note = 2'-O-methyladenosine-3'-phosphate
  modified_base 9: mod_base = OTHER; note = 2'-fluorouridine-3'-phosphate
  modified_base 10: mod_base = OTHER; note = 2'-fluorocytidine-3'-phosphate
  modified_base 11: mod_base = OTHER; note = 2'-fluorouridine-3'-phosphate
  modified_base 12: mod_base = OTHER; note = 2'-O-methylguanosine-3'-phosphate
  modified_base 13: mod_base = OTHER; note = 2'-O-methyluridine-3'-phosphate
  modified_base 14: mod_base = OTHER; note = 2'-O-methylguanosine-3'-phosphate
  modified_base 15: mod_base = OTHER; note = 2'-O-methyladenosine-3'-phosphate
  modified_base 16: mod_base = OTHER; note = 2'-O-methyladenosine-3'-phosphate
  modified_base 17: mod_base = OTHER; note = 2'-O-methyluridine-3'-phosphate
  modified_base 18: mod_base = OTHER; note = 2'-O-methyluridine-3'-phosphate
  modified_base 19: mod_base = OTHER; note = 2'-O-methyladenosine-3'-phosphate
  modified_base 20: mod_base = OTHER; note = 2'-O-methoxyethyl(MOE) adenosine-3'-phosphate
  modified_base 21: mod_base = OTHER; note = 2'-O-methoxyethyl(MOE) adenosine
acataaaatctgtgaattaaa

SEQ ID NO: 1454 - RNA, 21 nt, synthetic construct
  source 1..21: mol_type = other RNA
  modified_base 1: mod_base = OTHER; note = 2'-O-methoxyethyl(MOE) adenosine-3'-phosphorothioate
  modified_base 2: mod_base = OTHER; note 2'-O-methoxyethyl(MOE)-5-methylcytidine-3'-phosphorothioate
  modified_base 3: mod_base = OTHER; note = 2'-O-methyladenosine-3'-phosphate
  modified_base 4: mod_base = OTHER; note = 2'-O-methyluridine-3'-phosphate
  modified_base 5: mod_base = OTHER; note = 2'-O-methyladenosine-3'-phosphate
  modified_base 6: mod_base = OTHER; note = 2'-O-methyladenosine-3'-phosphate
  modified_base 7: mod_base = OTHER; note = 2'-fluoroadenosine-3'-phosphate
  modified_base 8: mod_base = OTHER; note = 2'-O-methyladenosine-3'-phosphate
  modified_base 9: mod_base = OTHER; note = 2'-fluorouridine-3'-phosphate
  modified_base 10: mod_base = OTHER; note = 2'-fluorocytidine-3'-phosphate
  modified_base 11: mod_base = OTHER; note = 2'-fluorouridine-3'-phosphate
  modified_base 12: mod_base = OTHER; note = 2'-O-methylguanosine-3'-phosphate
  modified_base 13: mod_base = OTHER; note = 2'-O-methyluridine-3'-phosphate
  modified_base 14: mod_base = OTHER; note = 2'-O-methylguanosine-3'-phosphate
  modified_base 15: mod_base = OTHER; note = 2'-O-methyladenosine-3'-phosphate
  modified_base 16: mod_base = OTHER; note = 2'-O-methyladenosine-3'-phosphate
  modified_base 17: mod_base = OTHER; note = 2'-O-methyluridine-3'-phosphate
  modified_base 18: mod_base = OTHER; note = 2'-O-methyluridine-3'-phosphate
  modified_base 19: mod_base = OTHER; note = 2'-O-methyladenosine-3'-phosphorothioate
  modified_base 20: mod_base = OTHER; note = 2'-O-methoxyethyl(MOE) adenosine-3'-phosphorothioate
  modified_base 21: mod_base = OTHER; note = 2'-O-methoxyethyl(MOE) adenosine
acataaaatctgtgaattaaa

SEQ ID NO: 1455 - RNA, 21 nt, synthetic construct
  source 1..21: mol_type = other RNA
  modified_base 1: mod_base = OTHER; note = 2'-O-methoxyethyl(MOE) adenosine-3'-phosphorothioate
  modified_base 2: mod_base = OTHER; note = 2'-O-methoxyethyl(MOE) adenosine-3'-phosphorothioate
  modified_base 3: mod_base = OTHER; note = 2'-O-methylguanosine-3'-phosphate
  modified_base 4: mod_base = OTHER; note = 2'-O-methylguanosine-3'-phosphate
  modified_base 5: mod_base = OTHER; note = 2'-O-methyladenosine-3'-phosphate
  modified_base 6: mod_base = OTHER; note = 2'-O-methylcytidine-3'-phosphate
  modified_base 7: mod_base = OTHER; note = 2'-fluorouridine-3'-phosphate
  modified_base 8: mod_base = OTHER; note = 2'-O-methyladenosine-3'-phosphate
  modified_base 9: mod_base = OTHER; note = 2'-fluoroadenosine-3'-phosphate
  modified_base 10: mod_base = OTHER; note = 2'-fluorocytidine-3'-phosphate
  modified_base 11: mod_base = OTHER; note = 2'-fluoroadenosine-3'-phosphate
  modified_base 12: mod_base = OTHER; note = 2'-O-methyluridine-3'-phosphate
  modified_base 13: mod_base = OTHER; note = 2'-O-methyladenosine-3'-phosphate
  modified_base 14: mod_base = OTHER; note = 2'-O-methyladenosine-3'-phosphate
  modified_base 15: mod_base = OTHER; note = 2'-O-methyladenosine-3'-phosphate
  modified_base 16: mod_base = OTHER; note = 2'-O-methyladenosine-3'-phosphate
  modified_base 17: mod_base = OTHER; note = 2'-O-methyluridine-3'-phosphate
  modified_base 18: mod_base = OTHER; note = 2'-O-methylcytidine-3'-phosphate
  modified_base 19: mod_base = OTHER; note = 2'-O-methyluridine-3'-phosphate
  modified_base 20: mod_base = OTHER; note = 2'-O-methoxyethyl(MOE) guanosine-3'-phosphate
  modified_base 21: mod_base = OTHER; note = 2'-O-methoxyethyl(MOE)-thymidine(or 5-methyluridine)
aaggactaacataaaatctgt

SEQ ID NO: 1456 - RNA, 21 nt, synthetic construct
  source 1..21: mol_type = other RNA
  modified_base 1: mod_base = OTHER; note = 2'-O-methoxyethyl(MOE) adenosine-3'-phosphorothioate
  modified_base 2: mod_base = OTHER; note = 2'-O-methoxyethyl(MOE) adenosine-3'-phosphorothioate
  modified_base 3: mod_base = OTHER; note = 2'-O-methylguanosine-3'-phosphate
  modified_base 4: mod_base = OTHER; note = 2'-O-methylguanosine-3'-phosphate
  modified_base 5: mod_base = OTHER; note = 2'-O-methyladenosine-3'-phosphate
  modified_base 6: mod_base = OTHER; note = 2'-O-methylcytidine-3'-phosphate
  modified_base 7: mod_base = OTHER; note = 2'-fluorouridine-3'-phosphate
  modified_base 8: mod_base = OTHER; note = 2'-O-methyladenosine-3'-phosphate
  modified_base 9: mod_base = OTHER; note = 2'-fluoroadenosine-3'-phosphate
  modified_base 10: mod_base = OTHER; note = 2'-fluorocytidine-3'-phosphate
  modified_base 11: mod_base = OTHER; note = 2'-fluoroadenosine-3'-phosphate
  modified_base 12: mod_base = OTHER; note = 2'-O-methyluridine-3'-phosphate
  modified_base 13: mod_base = OTHER; note = 2'-O-methyladenosine-3'-phosphate
  modified_base 14: mod_base = OTHER; note = 2'-O-methyladenosine-3'-phosphate
  modified_base 15: mod_base = OTHER; note = 2'-O-methyladenosine-3'-phosphate
  modified_base 16: mod_base = OTHER; note = 2'-O-methyladenosine-3'-phosphate
  modified_base 17: mod_base = OTHER; note = 2'-O-methyluridine-3'-phosphate
  modified_base 18: mod_base = OTHER; note = 2'-O-methylcytidine-3'-phosphate
  modified_base 19: mod_base = OTHER; note = 2'-O-methyluridine-3'-phosphorothioate
  modified_base 20: mod_base = OTHER; note = 2'-O-methoxyethyl(MOE) guanosine-3'-phosphorothioate
  modified_base 21: mod_base = OTHER; note = 2'-O-methoxyethyl(MOE)-thymidine(or 5-methyluridine)
aaggactaacataaaatctgt

SEQ ID NO: 1457 - RNA, 21 nt, synthetic construct
  source 1..21: mol_type = other RNA
  modified_base 1: mod_base = OTHER; note = 2'-O-methoxyethyl(MOE)-thymidine(or 5-methyluridine)-3'- phosphorothioate
  modified_base 2: mod_base = OTHER; note = 2'-O-methoxyethyl(MOE) adenosine-3'-phosphorothioate
  modified_base 3: mod_base = OTHER; note = 2'-O-methyladenosine-3'-phosphate
  modified_base 4: mod_base = OTHER; note = 2'-O-methylguanosine-3'-phosphate
  modified_base 5: mod_base = OTHER; note = 2'-O-methyluridine-3'-phosphate
  modified_base 6: mod_base = OTHER; note = 2'-O-methyluridine-3'-phosphate
  modified_base 7: mod_base = OTHER; note = 2'-fluorocytidine-3'-phosphate
  modified_base 8: mod_base = OTHER; note = 2'-O-methyladenosine-3'-phosphate
  modified_base 9: mod_base = OTHER; note = 2'-fluorouridine-3'-phosphate
  modified_base 10: mod_base = OTHER; note = 2'-fluoroguanosine-3'-phosphate
  modified_base 11: mod_base = OTHER; note = 2'-fluorouridine-3'-phosphate
  modified_base 12: mod_base = OTHER; note = 2'-O-methyluridine-3'-phosphate
  modified_base 13: mod_base = OTHER; note = 2'-O-methyluridine-3'-phosphate
  modified_base 14: mod_base = OTHER; note = 2'-O-methylguanosine-3'-phosphate
  modified_base 15: mod_base = OTHER; note = 2'-O-methyluridine-3'-phosphate
  modified_base 16: mod_base = OTHER; note = 2'-O-methyladenosine-3'-phosphate
  modified_base 17: mod_base = OTHER; note = 2'-O-methyladenosine-3'-phosphate
  modified_base 18: mod_base = OTHER; note = 2'-O-methyladenosine-3'-phosphate
  modified_base 19: mod_base = OTHER; note = 2'-O-methyluridine-3'-phosphate
  modified_base 20: mod_base = OTHER; note = 2'-O-methoxyethyl(MOE)-thymidine(or 5-methyluridine)-3'-phosphate
  modified_base 21: mod_base = OTHER; note = 2'-O-methoxyethyl(MOE) adenosine
taagttcatgtttgtaaatta

SEQ ID NO: 1458 - RNA, 21 nt, synthetic construct
  source 1..21: mol_type = other RNA
  modified_base 1: mod_base = OTHER; note = 2'-O-methoxyethyl(MOE)-thymidine(or 5-methyluridine)-3'- phosphorothioate
  modified_base 2: mod_base = OTHER; note = 2'-O-methoxyethyl(MOE) adenosine-3'-phosphorothioate
  modified_base 3: mod_base = OTHER; note = 2'-O-methyladenosine-3'-phosphate
  modified_base 4: mod_base = OTHER; note = 2'-O-methylguanosine-3'-phosphate
  modified_base 5: mod_base = OTHER; note = 2'-O-methyluridine-3'-phosphate
  modified_base 6: mod_base = OTHER; note = 2'-O-methyluridine-3'-phosphate
  modified_base 7: mod_base = OTHER; note = 2'-fluorocytidine-3'-phosphate
  modified_base 8: mod_base = OTHER; note = 2'-O-methyladenosine-3'-phosphate
  modified_base 9: mod_base = OTHER; note = 2'-fluorouridine-3'-phosphate
  modified_base 10: mod_base = OTHER; note = 2'-fluoroguanosine-3'-phosphate
  modified_base 11: mod_base = OTHER; note = 2'-fluorouridine-3'-phosphate
  modified_base 12: mod_base = OTHER; note = 2'-O-methyluridine-3'-phosphate
  modified_base 13: mod_base = OTHER; note = 2'-O-methyluridine-3'-phosphate
  modified_base 14: mod_base = OTHER; note = 2'-O-methylguanosine-3'-phosphate
  modified_base 15: mod_base = OTHER; note = 2'-O-methyluridine-3'-phosphate
  modified_base 16: mod_base = OTHER; note = 2'-O-methyladenosine-3'-phosphate
  modified_base 17: mod_base = OTHER; note = 2'-O-methyladenosine-3'-phosphate
  modified_base 18: mod_base = OTHER; note = 2'-O-methyladenosine-3'-phosphate
  modified_base 19: mod_base = OTHER; note = 2'-O-methyluridine-3'-phosphorothioate
  modified_base 20: mod_base = OTHER; note = 2'-O-methoxyethyl(MOE)-thymidine(or 5-methyluridine)-3'- phosphorothioate
  modified_base 21: mod_base = OTHER; note = 2'-O-methoxyethyl(MOE) adenosine
taagttcatgtttgtaaatta

SEQ ID NO: 1459 - RNA, 21 nt, synthetic construct
  source 1..21: mol_type = other RNA
  modified_base 1: mod_base = OTHER; note = 2'-O-methoxyethyl(MOE)-thymidine(or 5-methyluridine)-3'- phosphorothioate
  modified_base 2: mod_base = OTHER; note = 2'-O-methoxyethyl(MOE)-thymidine(or 5-methyluridine)-3'- phosphorothioate
  modified_base 3: mod_base = OTHER; note = 2'-O-methyladenosine-3'-phosphate
  modified_base 4: mod_base = OTHER; note = 2'-O-methyladenosine-3'-phosphate
  modified_base 5: mod_base = OTHER; note = 2'-O-methyladenosine-3'-phosphate
  modified_base 6: mod_base = OTHER; note = 2'-O-methylcytidine-3'-phosphate
  modified_base 7: mod_base = OTHER; note = 2'-fluoroadenosine-3'-phosphate
  modified_base 8: mod_base = OTHER; note = 2'-O-methyluridine-3'-phosphate
  modified_base 9: mod_base = OTHER; note = 2'-fluoroguanosine-3'-phosphate
  modified_base 10: mod_base = OTHER; note = 2'-fluorocytidine-3'-phosphate
  modified_base 11: mod_base = OTHER; note = 2'-fluorouridine-3'-phosphate
  modified_base 12: mod_base = OTHER; note = 2'-O-methyladenosine-3'-phosphate
  modified_base 13: mod_base = OTHER; note = 2'-O-methyladenosine-3'-phosphate
  modified_base 14: mod_base = OTHER; note = 2'-O-methyladenosine-3'-phosphate
  modified_base 15: mod_base = OTHER; note = 2'-O-methyluridine-3'-phosphate
  modified_base 16: mod_base = OTHER; note = 2'-O-methyladenosine-3'-phosphate
  modified_base 17: mod_base = OTHER; note = 2'-O-methylguanosine-3'-phosphate
  modified_base 18: mod_base = OTHER; note = 2'-O-methyluridine-3'-phosphate
  modified_base 19: mod_base = OTHER; note = 2'-O-methyluridine-3'-phosphate
  modified_base 20: mod_base = OTHER; note = 2'-O-methoxyethyl(MOE)-5-methylcytidine-3'-phosphate
  modified_base 21: mod_base = OTHER; note = 2'-O-methoxyethyl(MOE)-thymidine(or 5-methyluridine)
ttaaacatgctaaatagttct

SEQ ID NO: 1460 - RNA, 21 nt, synthetic construct
  source 1..21: mol_type = other RNA
  modified_base 1: mod_base = OTHER; note = 2'-O-methoxyethyl(MOE)-thymidine(or 5-methyluridine)-3'- phosphorothioate
  modified_base 2: mod_base = OTHER; note = 2'-O-methoxyethyl(MOE)-thymidine(or 5-methyluridine)-3'- phosphorothioate
  modified_base 3: mod_base = OTHER; note = 2'-O-methyladenosine-3'-phosphate
  modified_base 4: mod_base = OTHER; note = 2'-O-methyladenosine-3'-phosphate
  modified_base 5: mod_base = OTHER; note = 2'-O-methyladenosine-3'-phosphate
  modified_base 6: mod_base = OTHER; note = 2'-O-methylcytidine-3'-phosphate
  modified_base 7: mod_base = OTHER; note = 2'-fluoroadenosine-3'-phosphate
  modified_base 8: mod_base = OTHER; note = 2'-O-methyluridine-3'-phosphate
  modified_base 9: mod_base = OTHER; note = 2'-fluoroguanosine-3'-phosphate
  modified_base 10: mod_base = OTHER; note = 2'-fluorocytidine-3'-phosphate
  modified_base 11: mod_base = OTHER; note = 2'-fluorouridine-3'-phosphate
  modified_base 12: mod_base = OTHER; note = 2'-O-methyladenosine-3'-phosphate
  modified_base 13: mod_base = OTHER; note = 2'-O-methyladenosine-3'-phosphate
  modified_base 14: mod_base = OTHER; note = 2'-O-methyladenosine-3'-phosphate
  modified_base 15: mod_base = OTHER; note = 2'-O-methyluridine-3'-phosphate
  modified_base 16: mod_base = OTHER; note = 2'-O-methyladenosine-3'-phosphate
  modified_base 17: mod_base = OTHER; note = 2'-O-methylguanosine-3'-phosphate
  modified_base 18: mod_base = OTHER; note = 2'-O-methyluridine-3'-phosphate
  modified_base 19: mod_base = OTHER; note = 2'-O-methyluridine-3'-phosphorothioate
  modified_base 20: mod_base = OTHER; note 2'-O-methoxyethyl(MOE)-5-methylcytidine-3'-phosphorothioate
  modified_base 21: mod_base = OTHER; note = 2'-O-methoxyethyl(MOE)-thymidine(or 5-methyluridine)
ttaaacatgctaaatagttct

SEQ ID NO: 1461 - RNA, 21 nt, synthetic construct
  source 1..21: mol_type = other RNA
  modified_base 1: mod_base = OTHER; note = 2'-O-methoxyethyl(MOE)-thymidine(or 5-methyluridine)-3'- phosphorothioate
  modified_base 2: mod_base = OTHER; note = 2'-O-methoxyethyl(MOE)-thymidine(or 5-methyluridine)-3'- phosphorothioate
  modified_base 3: mod_base = OTHER; note = 2'-O-methylguanosine-3'-phosphate
  modified_base 4: mod_base = OTHER; note = 2'-O-methylcytidine-3'-phosphate
  modified_base 5: mod_base = OTHER; note = 2'-O-methyladenosine-3'-phosphate
  modified_base 6: mod_base = OTHER; note = 2'-O-methylguanosine-3'-phosphate
  modified_base 7: mod_base = OTHER; note = 2'-fluoroadenosine-3'-phosphate
  modified_base 8: mod_base = OTHER; note = 2'-O-methyluridine-3'-phosphate
  modified_base 9: mod_base = OTHER; note = 2'-fluoroguanosine-3'-phosphate
  modified_base 10: mod_base = OTHER; note = 2'-fluorocytidine-3'-phosphate
  modified_base 11: mod_base = OTHER; note = 2'-fluorouridine-3'-phosphate
  modified_base 12: mod_base = OTHER; note = 2'-O-methyladenosine-3'-phosphate
  modified_base 13: mod_base = OTHER; note = 2'-O-methylguanosine-3'-phosphate
  modified_base 14: mod_base = OTHER; note = 2'-O-methylguanosine-3'-phosphate
  modified_base 15: mod_base = OTHER; note = 2'-O-methyluridine-3'-phosphate
  modified_base 16: mod_base = OTHER; note = 2'-O-methylguanosine-3'-phosphate
  modified_base 17: mod_base = OTHER; note = 2'-O-methyluridine-3'-phosphate
  modified_base 18: mod_base = OTHER; note = 2'-O-methyluridine-3'-phosphate
  modified_base 19: mod_base = OTHER; note = 2'-O-methylcytidine-3'-phosphate
  modified_base 20: mod_base = OTHER; note = 2'-O-methoxyethyl(MOE) adenosine-3'-phosphate
  modified_base 21: mod_base = OTHER; note = 2'-O-methoxyethyl(MOE) adenosine
ttgcagatgctaggtgttcaa

SEQ ID NO: 1462 - RNA, 21 nt, synthetic construct
  source 1..21: mol_type = other RNA
  modified_base 1: mod_base = OTHER; note = 2'-O-methoxyethyl(MOE)-thymidine(or 5-methyluridine)-3'- phosphorothioate
  modified_base 2: mod_base = OTHER; note = 2'-O-methoxyethyl(MOE)-thymidine(or 5-methyluridine)-3'- phosphorothioate
  modified_base 3: mod_base = OTHER; note = 2'-O-methylguanosine-3'-phosphate
  modified_base 4: mod_base = OTHER; note = 2'-O-methylcytidine-3'-phosphate
  modified_base 5: mod_base = OTHER; note = 2'-O-methyladenosine-3'-phosphate
  modified_base 6: mod_base = OTHER; note = 2'-O-methylguanosine-3'-phosphate
  modified_base 7: mod_base = OTHER; note = 2'-fluoroadenosine-3'-phosphate
  modified_base 8: mod_base = OTHER; note = 2'-O-methyluridine-3'-phosphate
  modified_base 9: mod_base = OTHER; note = 2'-fluoroguanosine-3'-phosphate
  modified_base 10: mod_base = OTHER; note = 2'-fluorocytidine-3'-phosphate
  modified_base 11: mod_base = OTHER; note = 2'-fluorouridine-3'-phosphate
  modified_base 12: mod_base = OTHER; note = 2'-O-methyladenosine-3'-phosphate
  modified_base 13: mod_base = OTHER; note = 2'-O-methylguanosine-3'-phosphate
  modified_base 14: mod_base = OTHER; note = 2'-O-methylguanosine-3'-phosphate
  modified_base 15: mod_base = OTHER; note = 2'-O-methyluridine-3'-phosphate
  modified_base 16: mod_base = OTHER; note = 2'-O-methylguanosine-3'-phosphate
  modified_base 17: mod_base = OTHER; note = 2'-O-methyluridine-3'-phosphate
  modified_base 18: mod_base = OTHER; note = 2'-O-methyluridine-3'-phosphate
  modified_base 19: mod_base = OTHER; note = 2'-O-methylcytidine-3'-phosphorothioate
  modified_base 20: mod_base = OTHER; note = 2'-O-methoxyethyl(MOE) adenosine-3'-phosphorothioate
  modified_base 21: mod_base = OTHER; note = 2'-O-methoxyethyl(MOE) adenosine
ttgcagatgctaggtgttcaa

SEQ ID NO: 1463 - RNA, 23 nt, synthetic construct
  source 1..23: mol_type = other RNA
  modified_base 1: mod_base = OTHER; note 5'-(E)-vinylphosphonate-2'-O-methyluridine-3'-phosphorothio ate
  modified_base 2: mod_base = OTHER; note = 2'-fluoroadenosine-3'-phosphorothioate
  modified_base 3: mod_base = OTHER; note = 2'-O-methyladenosine-3'-phosphate
  modified_base 4: mod_base = OTHER; note = 2'-O-methylcytidine-3'-phosphate
  modified_base 5: mod_base = OTHER; note = 2'-O-methyladenosine-3'-phosphate
  modified_base 6: mod_base = OTHER; note = 2'-fluorouridine-3'-phosphate
  modified_base 7: mod_base = OTHER; note = 2'-O-methyluridine-3'-phosphate
  modified_base 8: mod_base = OTHER; note = 2'-O-methylguanosine-3'-phosphate
  modified_base 9: mod_base = OTHER; note = 2'-O-methyluridine-3'-phosphate
  modified_base 10: mod_base = OTHER; note = 2'-O-methyladenosine-3'-phosphate
  modified_base 11: mod_base = OTHER; note = 2'-O-methylguanosine-3'-phosphate
  modified_base 12: mod_base = OTHER; note = 2'-O-methylcytidine-3'-phosphate
  modified_base 13: mod_base = OTHER; note = 2'-O-methyluridine-3'-phosphate
  modified_base 14: mod_base = OTHER; note = 2'-fluoroadenosine-3'-phosphate
  modified_base 15: mod_base = OTHER; note = 2'-O-methylcytidine-3'-phosphate
  modified_base 16: mod_base = OTHER; note = 2'-fluoroadenosine-3'-phosphate
  modified_base 17: mod_base = OTHER; note = 2'-O-methylguanosine-3'-phosphate
  modified_base 18: mod_base = OTHER; note = 2'-O-methyladenosine-3'-phosphate
  modified_base 19: mod_base = OTHER; note = 2'-O-methyladenosine-3'-phosphate
  modified_base 20: mod_base = OTHER; note = 2'-O-methyluridine-3'-phosphate
  modified_base 21: mod_base = OTHER; note = 2'-O-methylcytidine-3'-phosphorothioate
  modified_base 22: mod_base = OTHER; note = 2'-O-methylcytidine-3'-phosphorothioate
  modified_base 23: mod_base = OTHER; note = 2'-O-methyluridine
taacattgtagctacagaatcct

SEQ ID NO: 1464 - RNA, 23 nt, synthetic construct
  source 1..23: mol_type = other RNA
  modified_base 1: mod_base = OTHER; note 5'-(E)-vinylphosphonate-2'-O-methyladenosine-3'-phosphoroth ioate
  modified_base 2: mod_base = OTHER; note = 2'-fluorocytidine-3'-phosphorothioate
  modified_base 3: mod_base = OTHER; note = 2'-O-methyladenosine-3'-phosphate
  modified_base 4: mod_base = OTHER; note = 2'-O-methyladenosine-3'-phosphate
  modified_base 5: mod_base = OTHER; note = 2'-O-methylcytidine-3'-phosphate
  modified_base 6: mod_base = OTHER; note = 2'-fluoroadenosine-3'-phosphate
  modified_base 7: mod_base = OTHER; note = 2'-O-methyluridine-3'-phosphate
  modified_base 8: mod_base = OTHER; note = 2'-O-methyluridine-3'-phosphate
  modified_base 9: mod_base = OTHER; note = 2'-O-methylguanosine-3'-phosphate
  modified_base 10: mod_base = OTHER; note = 2'-O-methyluridine-3'-phosphate
  modified_base 11: mod_base = OTHER; note = 2'-O-methyladenosine-3'-phosphate
  modified_base 12: mod_base = OTHER; note = 2'-O-methylguanosine-3'-phosphate
  modified_base 13: mod_base = OTHER; note = 2'-O-methylcytidine-3'-phosphate
  modified_base 14: mod_base = OTHER; note = 2'-fluorouridine-3'-phosphate
  modified_base 15: mod_base = OTHER; note = 2'-O-methyladenosine-3'-phosphate
  modified_base 16: mod_base = OTHER; note = 2'-fluorocytidine-3'-phosphate
  modified_base 17: mod_base = OTHER; note = 2'-O-methyladenosine-3'-phosphate
  modified_base 18: mod_base = OTHER; note = 2'-O-methylguanosine-3'-phosphate
  modified_base 19: mod_base = OTHER; note = 2'-O-methyladenosine-3'-phosphate
  modified_base 20: mod_base = OTHER; note = 2'-O-methyladenosine-3'-phosphate
  modified_base 21: mod_base = OTHER; note = 2'-O-methyluridine-3'-phosphorothioate
  modified_base 22: mod_base = OTHER; note = 2'-O-methylcytidine-3'-phosphorothioate
  modified_base 23: mod_base = OTHER; note = 2'-O-methylcytidine
acaacattgtagctacagaatcc

SEQ ID NO: 1465 - RNA, 23 nt, synthetic construct
  source 1..23: mol_type = other RNA
  modified_base 1: mod_base = OTHER; note 5'-(E)-vinylphosphonate-2'-O-methyluridine-3'-phosphorothio ate
  modified_base 2: mod_base = OTHER; note = 2'-fluorouridine-3'-phosphorothioate
  modified_base 3: mod_base = OTHER; note = 2'-O-methyluridine-3'-phosphate
  modified_base 4: mod_base = OTHER; note = 2'-O-methylguanosine-3'-phosphate
  modified_base 5: mod_base = OTHER; note = 2'-O-methyladenosine-3'-phosphate
  modified_base 6: mod_base = OTHER; note = 2'-fluorocytidine-3'-phosphate
  modified_base 7: mod_base = OTHER; note = 2'-O-methyladenosine-3'-phosphate
  modified_base 8: mod_base = OTHER; note = 2'-O-methyladenosine-3'-phosphate
  modified_base 9: mod_base = OTHER; note = 2'-O-methylcytidine-3'-phosphate
  modified_base 10: mod_base = OTHER; note = 2'-O-methyladenosine-3'-phosphate
  modified_base 11: mod_base = OTHER; note = 2'-O-methyluridine-3'-phosphate
  modified_base 12: mod_base = OTHER; note = 2'-O-methyluridine-3'-phosphate
  modified_base 13: mod_base = OTHER; note = 2'-O-methylguanosine-3'-phosphate
  modified_base 14: mod_base = OTHER; note = 2'-fluorouridine-3'-phosphate
  modified_base 15: mod_base = OTHER; note = 2'-O-methyladenosine-3'-phosphate
  modified_base 16: mod_base = OTHER; note = 2'-fluoroguanosine-3'-phosphate
  modified_base 17: mod_base = OTHER; note = 2'-O-methylcytidine-3'-phosphate
  modified_base 18: mod_base = OTHER; note = 2'-O-methyluridine-3'-phosphate
  modified_base 19: mod_base = OTHER; note = 2'-O-methyladenosine-3'-phosphate
  modified_base 20: mod_base = OTHER; note = 2'-O-methylcytidine-3'-phosphate
  modified_base 21: mod_base = OTHER; note = 2'-O-methyladenosine-3'-phosphorothioate
  modified_base 22: mod_base = OTHER; note = 2'-O-methylguanosine-3'-phosphorothioate
  modified_base 23: mod_base = OTHER; note = 2'-O-methyladenosine
tttgacaacattgtagctacaga

SEQ ID NO: 1466 - RNA, 23 nt, synthetic construct
  source 1..23: mol_type = other RNA
  modified_base 1: mod_base = OTHER; note 5'-(E)-vinylphosphonate-2'-O-methyluridine-3'-phosphorothio ate
  modified_base 2: mod_base = OTHER; note = 2'-fluorouridine-3'-phosphorothioate
  modified_base 3: mod_base = OTHER; note = 2'-O-methyluridine-3'-phosphate
  modified_base 4: mod_base = OTHER; note = 2'-O-methylguanosine-3'-phosphate
  modified_base 5: mod_base = OTHER; note = 2'-O-methyladenosine-3'-phosphate
  modified_base 6: mod_base = OTHER; note = 2'-fluorocytidine-3'-phosphate
  modified_base 7: mod_base = OTHER; note = 2'-O-methyladenosine-3'-phosphate
  modified_base 8: mod_base = OTHER; note = 2'-O-methyladenosine-3'-phosphate
  modified_base 9: mod_base = OTHER; note = 2'-O-methylcytidine-3'-phosphate
  modified_base 10: mod_base = OTHER; note = 2'-O-methyladenosine-3'-phosphate
  modified_base 11: mod_base = OTHER; note = 2'-O-methyluridine-3'-phosphate
  modified_base 12: mod_base = OTHER; note = 2'-O-methyluridine-3'-phosphate
  modified_base 13: mod_base = OTHER; note = 2'-O-methylguanosine-3'-phosphate
  modified_base 14: mod_base = OTHER; note = 2'-fluorouridine-3'-phosphate
  modified_base 15: mod_base = OTHER; note = 2'-O-methyladenosine-3'-phosphate
  modified_base 16: mod_base = OTHER; note = 2'-fluoroguanosine-3'-phosphate
  modified_base 17: mod_base = OTHER; note = 2'-O-methylcytidine-3'-phosphate
  modified_base 18: mod_base = OTHER; note = 2'-O-methyluridine-3'-phosphate
  modified_base 19: mod_base = OTHER; note = 2'-O-methyladenosine-3'-phosphate
  modified_base 20: mod_base = OTHER; note = 2'-O-methylcytidine-3'-phosphate
  modified_base 21: mod_base = OTHER; note = 2'-O-methyladenosine-3'-phosphorothioate
  modified_base 22: mod_base = OTHER; note = 2'-O-methylguanosine-3'-phosphorothioate
  modified_base 23: mod_base = OTHER; note = 2'-O-methyladenosine
tttgacaacattgtagctacaga

SEQ ID NO: 1467 - RNA, 23 nt, synthetic construct
  source 1..23: mol_type = other RNA
  modified_base 1: mod_base = OTHER; note 5'-(E)-vinylphosphonate-2'-O-methyluridine-3'-phosphorothio ate
  modified_base 2: mod_base = OTHER; note = 2'-fluorouridine-3'-phosphorothioate
  modified_base 3: mod_base = OTHER; note = 2'-O-methylcytidine-3'-phosphate
  modified_base 4: mod_base = OTHER; note = 2'-O-methylguanosine-3'-phosphate
  modified_base 5: mod_base = OTHER; note = 2'-O-methyladenosine-3'-phosphate
  modified_base 6: mod_base = OTHER; note = 2'-fluoroadenosine-3'-phosphate
  modified_base 7: mod_base = OTHER; note = 2'-O-methyladenosine-3'-phosphate
  modified_base 8: mod_base = OTHER; note = 2'-O-methyladenosine-3'-phosphate
  modified_base 9: mod_base = OTHER; note = 2'-O-methyladenosine-3'-phosphate
  modified_base 10: mod_base = OTHER; note = 2'-O-methylguanosine-3'-phosphate
  modified_base 11: mod_base = OTHER; note = 2'-O-methyluridine-3'-phosphate
  modified_base 12: mod_base = OTHER; note = 2'-O-methylcytidine-3'-phosphate
  modified_base 13: mod_base = OTHER; note = 2'-O-methyluridine-3'-phosphate
  modified_base 14: mod_base = OTHER; note = 2'-fluorouridine-3'-phosphate
  modified_base 15: mod_base = OTHER; note = 2'-O-methylguanosine-3'-phosphate
  modified_base 16: mod_base = OTHER; note = 2'-fluoroadenosine-3'-phosphate
  modified_base 17: mod_base = OTHER; note = 2'-O-methylcytidine-3'-phosphate
  modified_base 18: mod_base = OTHER; note = 2'-O-methyladenosine-3'-phosphate
  modified_base 19: mod_base = OTHER; note = 2'-O-methyladenosine-3'-phosphate
  modified_base 20: mod_base = OTHER; note = 2'-O-methylcytidine-3'-phosphate
  modified_base 21: mod_base = OTHER; note = 2'-O-methyladenosine-3'-phosphorothioate
  modified_base 22: mod_base = OTHER; note = 2'-O-methyluridine-3'-phosphorothioate
  modified_base 23: mod_base = OTHER; note = 2'-O-methyluridine
ttcgaaaaagtcttgacaacatt

SEQ ID NO: 1468 - RNA, 23 nt, synthetic construct
  source 1..23: mol_type = other RNA
  modified_base 1: mod_base = OTHER; note 5'-(E)-vinylphosphonate-2'-O-methyluridine-3'-phosphorothio ate
  modified_base 2: mod_base = OTHER; note = 2'-fluorouridine-3'-phosphorothioate
  modified_base 3: mod_base = OTHER; note = 2'-O-methyluridine-3'-phosphate
  modified_base 4: mod_base = OTHER; note = 2'-O-methyladenosine-3'-phosphate
  modified_base 5: mod_base = OTHER; note = 2'-O-methyladenosine-3'-phosphate
  modified_base 6: mod_base = OTHER; note = 2'-fluorouridine-3'-phosphate
  modified_base 7: mod_base = OTHER; note = 2'-O-methyluridine-3'-phosphate
  modified_base 8: mod_base = OTHER; note = 2'-O-methylcytidine-3'-phosphate
  modified_base 9: mod_base = OTHER; note = 2'-O-methyladenosine-3'-phosphate
  modified_base 10: mod_base = OTHER; note = 2'-O-methylcytidine-3'-phosphate
  modified_base 11: mod_base = OTHER; note = 2'-O-methyladenosine-3'-phosphate
  modified_base 12: mod_base = OTHER; note = 2'-O-methylguanosine-3'-phosphate
  modified_base 13: mod_base = OTHER; note = 2'-O-methyladenosine-3'-phosphate
  modified_base 14: mod_base = OTHER; note = 2'-fluorouridine-3'-phosphate
  modified_base 15: mod_base = OTHER; note = 2'-O-methyluridine-3'-phosphate
  modified_base 16: mod_base = OTHER; note = 2'-fluorouridine-3'-phosphate
  modified_base 17: mod_base = OTHER; note = 2'-O-methyluridine-3'-phosphate
  modified_base 18: mod_base = OTHER; note = 2'-O-methyladenosine-3'-phosphate
  modified_base 19: mod_base = OTHER; note = 2'-O-methyluridine-3'-phosphate
  modified_base 20: mod_base = OTHER; note = 2'-O-methylguanosine-3'-phosphate
  modified_base 21: mod_base = OTHER; note = 2'-O-methyluridine-3'-phosphorothioate
  modified_base 22: mod_base = OTHER; note = 2'-O-methyluridine-3'-phosphorothioate
  modified_base 23: mod_base = OTHER; note = 2'-O-methyladenosine
tttaattcacagattttatgtta

SEQ ID NO: 1469 - RNA, 23 nt, synthetic construct
  source 1..23: mol_type = other RNA
  modified_base 1: mod_base = OTHER; note 5'-(E)-vinylphosphonate-2'-O-methyluridine-3'-phosphorothio ate
  modified_base 2: mod_base = OTHER; note = 2'-fluorouridine-3'-phosphorothioate
  modified_base 3: mod_base = OTHER; note = 2'-O-methyluridine-3'-phosphate
  modified_base 4: mod_base = OTHER; note = 2'-O-methyladenosine-3'-phosphate
  modified_base 5: mod_base = OTHER; note = 2'-O-methyladenosine-3'-phosphate
  modified_base 6: mod_base = OTHER; note = 2'-fluorouridine-3'-phosphate
  modified_base 7: mod_base = OTHER; note = 2'-O-methyluridine-3'-phosphate
  modified_base 8: mod_base = OTHER; note = 2'-O-methylcytidine-3'-phosphate
  modified_base 9: mod_base = OTHER; note = 2'-O-methyladenosine-3'-phosphate
  modified_base 10: mod_base = OTHER; note = 2'-O-methylcytidine-3'-phosphate
  modified_base 11: mod_base = OTHER; note = 2'-O-methyladenosine-3'-phosphate
  modified_base 12: mod_base = OTHER; note = 2'-O-methylguanosine-3'-phosphate
  modified_base 13: mod_base = OTHER; note = 2'-O-methyladenosine-3'-phosphate
  modified_base 14: mod_base = OTHER; note = 2'-fluorouridine-3'-phosphate
  modified_base 15: mod_base = OTHER; note = 2'-O-methyluridine-3'-phosphate
  modified_base 16: mod_base = OTHER; note = 2'-fluorouridine-3'-phosphate
  modified_base 17: mod_base = OTHER; note = 2'-O-methyluridine-3'-phosphate
  modified_base 18: mod_base = OTHER; note = 2'-O-methyladenosine-3'-phosphate
  modified_base 19: mod_base = OTHER; note = 2'-O-methyluridine-3'-phosphate
  modified_base 20: mod_base = OTHER; note = 2'-O-methylguanosine-3'-phosphate
  modified_base 21: mod_base = OTHER; note = 2'-O-methyluridine-3'-phosphorothioate
  modified_base 22: mod_base = OTHER; note = 2'-O-methyluridine-3'-phosphorothioate
  modified_base 23: mod_base = OTHER; note = 2'-O-methyladenosine
tttaattcacagattttatgtta

SEQ ID NO: 1470 - RNA, 23 nt, synthetic construct
  source 1..23: mol_type = other RNA
  modified_base 1: mod_base = OTHER; note 5'-(E)-vinylphosphonate-2'-O-methyladenosine-3'-phosphoroth ioate
  modified_base 2: mod_base = OTHER; note = 2'-fluorocytidine-3'-phosphorothioate
  modified_base 3: mod_base = OTHER; note = 2'-O-methyladenosine-3'-phosphate
  modified_base 4: mod_base = OTHER; note = 2'-O-methylguanosine-3'-phosphate
  modified_base 5: mod_base = OTHER; note = 2'-O-methyladenosine-3'-phosphate
  modified_base 6: mod_base = OTHER; note = 2'-fluorouridine-3'-phosphate
  modified_base 7: mod_base = OTHER; note = 2'-O-methyluridine-3'-phosphate
  modified_base 8: mod_base = OTHER; note = 2'-O-methyluridine-3'-phosphate
  modified_base 9: mod_base = OTHER; note = 2'-O-methyluridine-3'-phosphate
  modified_base 10: mod_base = OTHER; note = 2'-O-methyladenosine-3'-phosphate
  modified_base 11: mod_base = OTHER; note = 2'-O-methyluridine-3'-phosphate
  modified_base 12: mod_base = OTHER; note = 2'-O-methylguanosine-3'-phosphate
  modified_base 13: mod_base = OTHER; note = 2'-O-methyluridine-3'-phosphate
  modified_base 14: mod_base = OTHER; note = 2'-fluorouridine-3'-phosphate
  modified_base 15: mod_base = OTHER; note = 2'-O-methyladenosine-3'-phosphate
  modified_base 16: mod_base = OTHER; note = 2'-fluoroguanosine-3'-phosphate
  modified_base 17: mod_base = OTHER; note = 2'-O-methyluridine-3'-phosphate
  modified_base 18: mod_base = OTHER; note = 2'-O-methylcytidine-3'-phosphate
  modified_base 19: mod_base = OTHER; note = 2'-O-methylcytidine-3'-phosphate
  modified_base 20: mod_base = OTHER; note = 2'-O-methyluridine-3'-phosphate
  modified_base 21: mod_base = OTHER; note = 2'-O-methyluridine-3'-phosphorothioate
  modified_base 22: mod_base = OTHER; note = 2'-O-methyluridine-3'-phosphorothioate
  modified_base 23: mod_base = OTHER; note = 2'-O-methyladenosine
acagattttatgttagtccttta

SEQ ID NO: 1471 - RNA, 23 nt, synthetic construct
  source 1..23: mol_type = other RNA
  modified_base 1: mod_base = OTHER; note 5'-(E)-vinylphosphonate-2'-O-methyladenosine-3'-phosphoroth ioate
  modified_base 2: mod_base = OTHER; note = 2'-fluorocytidine-3'-phosphorothioate
  modified_base 3: mod_base = OTHER; note = 2'-O-methyladenosine-3'-phosphate
  modified_base 4: mod_base = OTHER; note = 2'-O-methylguanosine-3'-phosphate
  modified_base 5: mod_base = OTHER; note = 2'-O-methyladenosine-3'-phosphate
  modified_base 6: mod_base = OTHER; note = 2'-fluorouridine-3'-phosphate
  modified_base 7: mod_base = OTHER; note = 2'-O-methyluridine-3'-phosphate
  modified_base 8: mod_base = OTHER; note = 2'-O-methyluridine-3'-phosphate
  modified_base 9: mod_base = OTHER; note = 2'-O-methyluridine-3'-phosphate
  modified_base 10: mod_base = OTHER; note = 2'-O-methyladenosine-3'-phosphate
  modified_base 11: mod_base = OTHER; note = 2'-O-methyluridine-3'-phosphate
  modified_base 12: mod_base = OTHER; note = 2'-O-methylguanosine-3'-phosphate
  modified_base 13: mod_base = OTHER; note = 2'-O-methyluridine-3'-phosphate
  modified_base 14: mod_base = OTHER; note = 2'-fluorouridine-3'-phosphate
  modified_base 15: mod_base = OTHER; note = 2'-O-methyladenosine-3'-phosphate
  modified_base 16: mod_base = OTHER; note = 2'-fluoroguanosine-3'-phosphate
  modified_base 17: mod_base = OTHER; note = 2'-O-methyluridine-3'-phosphate
  modified_base 18: mod_base = OTHER; note = 2'-O-methylcytidine-3'-phosphate
  modified_base 19: mod_base = OTHER; note = 2'-O-methylcytidine-3'-phosphate
  modified_base 20: mod_base = OTHER; note = 2'-O-methyluridine-3'-phosphate
  modified_base 21: mod_base = OTHER; note = 2'-O-methyluridine-3'-phosphorothioate
  modified_base 22: mod_base = OTHER; note = 2'-O-methyluridine-3'-phosphorothioate
  modified_base 23: mod_base = OTHER; note = 2'-O-methyladenosine
acagattttatgttagtccttta

SEQ ID NO: 1472 - RNA, 23 nt, synthetic construct
  source 1..23: mol_type = other RNA
  modified_base 1: mod_base = OTHER; note 5'-(E)-vinylphosphonate-2'-O-methyluridine-3'-phosphorothio ate
  modified_base 2: mod_base = OTHER; note = 2'-fluoroadenosine-3'-phosphorothioate
  modified_base 3: mod_base = OTHER; note = 2'-O-methyladenosine-3'-phosphate
  modified_base 4: mod_base = OTHER; note = 2'-O-methyluridine-3'-phosphate
  modified_base 5: mod_base = OTHER; note = 2'-O-methyluridine-3'-phosphate
  modified_base 6: mod_base = OTHER; note = 2'-fluorouridine-3'-phosphate
  modified_base 7: mod_base = OTHER; note = 2'-O-methyladenosine-3'-phosphate
  modified_base 8: mod_base = OTHER; note = 2'-O-methylcytidine-3'-phosphate
  modified_base 9: mod_base = OTHER; note = 2'-O-methyladenosine-3'-phosphate
  modified_base 10: mod_base = OTHER; note = 2'-O-methyladenosine-3'-phosphate
  modified_base 11: mod_base = OTHER; note = 2'-O-methyladenosine-3'-phosphate
  modified_base 12: mod_base = OTHER; note = 2'-O-methylcytidine-3'-phosphate
  modified_base 13: mod_base = OTHER; note = 2'-O-methyladenosine-3'-phosphate
  modified_base 14: mod_base = OTHER; note = 2'-fluorouridine-3'-phosphate
  modified_base 15: mod_base = OTHER; note = 2'-O-methylguanosine-3'-phosphate
  modified_base 16: mod_base = OTHER; note = 2'-fluoroadenosine-3'-phosphate
  modified_base 17: mod_base = OTHER; note = 2'-O-methyladenosine-3'-phosphate
  modified_base 18: mod_base = OTHER; note = 2'-O-methylcytidine-3'-phosphate
  modified_base 19: mod_base = OTHER; note = 2'-O-methyluridine-3'-phosphate
  modified_base 20: mod_base = OTHER; note = 2'-O-methyluridine-3'-phosphate
  modified_base 21: mod_base = OTHER; note = 2'-O-methyladenosine-3'-phosphorothioate
  modified_base 22: mod_base = OTHER; note = 2'-O-methylguanosine-3'-phosphorothioate
  modified_base 23: mod_base = OTHER; note = 2'-O-methyladenosine
taatttacaaacatgaacttaga

SEQ ID NO: 1473 - RNA, 23 nt, synthetic construct
  source 1..23: mol_type = other RNA
  modified_base 1: mod_base = OTHER; note 5'-(E)-vinylphosphonate-2'-O-methyluridine-3'-phosphorothio ate
  modified_base 2: mod_base = OTHER; note = 2'-fluoroadenosine-3'-phosphorothioate
  modified_base 3: mod_base = OTHER; note = 2'-O-methyladenosine-3'-phosphate
  modified_base 4: mod_base = OTHER; note = 2'-O-methyluridine-3'-phosphate
  modified_base 5: mod_base = OTHER; note = 2'-O-methyluridine-3'-phosphate
  modified_base 6: mod_base = OTHER; note = 2'-fluorouridine-3'-phosphate
  modified_base 7: mod_base = OTHER; note = 2'-O-methyladenosine-3'-phosphate
  modified_base 8: mod_base = OTHER; note = 2'-O-methylcytidine-3'-phosphate
  modified_base 9: mod_base = OTHER; note = 2'-O-methyladenosine-3'-phosphate
  modified_base 10: mod_base = OTHER; note = 2'-O-methyladenosine-3'-phosphate
  modified_base 11: mod_base = OTHER; note = 2'-O-methyladenosine-3'-phosphate
  modified_base 12: mod_base = OTHER; note = 2'-O-methylcytidine-3'-phosphate
  modified_base 13: mod_base = OTHER; note = 2'-O-methyladenosine-3'-phosphate
  modified_base 14: mod_base = OTHER; note = 2'-fluorouridine-3'-phosphate
  modified_base 15: mod_base = OTHER; note = 2'-O-methylguanosine-3'-phosphate
  modified_base 16: mod_base = OTHER; note = 2'-fluoroadenosine-3'-phosphate
  modified_base 17: mod_base = OTHER; note = 2'-O-methyladenosine-3'-phosphate
  modified_base 18: mod_base = OTHER; note = 2'-O-methylcytidine-3'-phosphate
  modified_base 19: mod_base = OTHER; note = 2'-O-methyluridine-3'-phosphate
  modified_base 20: mod_base = OTHER; note = 2'-O-methyluridine-3'-phosphate
  modified_base 21: mod_base = OTHER; note = 2'-O-methyladenosine-3'-phosphorothioate
  modified_base 22: mod_base = OTHER; note = 2'-O-methylguanosine-3'-phosphorothioate
  modified_base 23: mod_base = OTHER; note = 2'-O-methyladenosine
taatttacaaacatgaacttaga

SEQ ID NO: 1474 - RNA, 23 nt, synthetic construct
  source 1..23: mol_type = other RNA
  modified_base 1: mod_base = OTHER; note 5'-(E)-vinylphosphonate-2'-O-methyladenosine-3'-phosphoroth ioate
  modified_base 2: mod_base = OTHER; note = 2'-fluoroguanosine-3'-phosphorothioate
  modified_base 3: mod_base = OTHER; note = 2'-O-methyladenosine-3'-phosphate
  modified_base 4: mod_base = OTHER; note = 2'-O-methyladenosine-3'-phosphate
  modified_base 5: mod_base = OTHER; note = 2'-O-methylcytidine-3'-phosphate
  modified_base 6: mod_base = OTHER; note = 2'-fluorouridine-3'-phosphate
  modified_base 7: mod_base = OTHER; note = 2'-O-methyladenosine-3'-phosphate
  modified_base 8: mod_base = OTHER; note = 2'-O-methyluridine-3'-phosphate
  modified_base 9: mod_base = OTHER; note = 2'-O-methyluridine-3'-phosphate
  modified_base 10: mod_base = OTHER; note = 2'-O-methyluridine-3'-phosphate
  modified_base 11: mod_base = OTHER; note = 2'-O-methyladenosine-3'-phosphate
  modified_base 12: mod_base = OTHER; note = 2'-O-methylguanosine-3'-phosphate
  modified_base 13: mod_base = OTHER; note = 2'-O-methylcytidine-3'-phosphate
  modified_base 14: mod_base = OTHER; note = 2'-fluoroadenosine-3'-phosphate
  modified_base 15: mod_base = OTHER; note = 2'-O-methyluridine-3'-phosphate
  modified_base 16: mod_base = OTHER; note = 2'-fluoroguanosine-3'-phosphate
  modified_base 17: mod_base = OTHER; note = 2'-O-methyluridine-3'-phosphate
  modified_base 18: mod_base = OTHER; note = 2'-O-methyluridine-3'-phosphate
  modified_base 19: mod_base = OTHER; note = 2'-O-methyluridine-3'-phosphate
  modified_base 20: mod_base = OTHER; note = 2'-O-methyladenosine-3'-phosphate
  modified_base 21: mod_base = OTHER; note = 2'-O-methyladenosine-3'-phosphorothioate
  modified_base 22: mod_base = OTHER; note = 2'-O-methylcytidine-3'-phosphorothioate
  modified_base 23: mod_base = OTHER; note = 2'-O-methyladenosine
agaactatttagcatgtttaaca

SEQ ID NO: 1475 - RNA, 23 nt, synthetic construct
  source 1..23: mol_type = other RNA
  modified_base 1: mod_base = OTHER; note 5'-(E)-vinylphosphonate-2'-O-methyladenosine-3'-phosphoroth ioate
  modified_base 2: mod_base = OTHER; note = 2'-fluoroguanosine-3'-phosphorothioate
  modified_base 3: mod_base = OTHER; note = 2'-O-methyladenosine-3'-phosphate
  modified_base 4: mod_base = OTHER; note = 2'-O-methyladenosine-3'-phosphate
  modified_base 5: mod_base = OTHER; note = 2'-O-methylcytidine-3'-phosphate
  modified_base 6: mod_base = OTHER; note = 2'-fluorouridine-3'-phosphate
  modified_base 7: mod_base = OTHER; note = 2'-O-methyladenosine-3'-phosphate
  modified_base 8: mod_base = OTHER; note = 2'-O-methyluridine-3'-phosphate
  modified_base 9: mod_base = OTHER; note = 2'-O-methyluridine-3'-phosphate
  modified_base 10: mod_base = OTHER; note = 2'-O-methyluridine-3'-phosphate
  modified_base 11: mod_base = OTHER; note = 2'-O-methyladenosine-3'-phosphate
  modified_base 12: mod_base = OTHER; note = 2'-O-methylguanosine-3'-phosphate
  modified_base 13: mod_base = OTHER; note = 2'-O-methylcytidine-3'-phosphate
  modified_base 14: mod_base = OTHER; note = 2'-fluoroadenosine-3'-phosphate
  modified_base 15: mod_base = OTHER; note = 2'-O-methyluridine-3'-phosphate
  modified_base 16: mod_base = OTHER; note = 2'-fluoroguanosine-3'-phosphate
  modified_base 17: mod_base = OTHER; note = 2'-O-methyluridine-3'-phosphate
  modified_base 18: mod_base = OTHER; note = 2'-O-methyluridine-3'-phosphate
  modified_base 19: mod_base = OTHER; note = 2'-O-methyluridine-3'-phosphate
  modified_base 20: mod_base = OTHER; note = 2'-O-methyladenosine-3'-phosphate
  modified_base 21: mod_base = OTHER; note = 2'-O-methyladenosine-3'-phosphorothioate
  modified_base 22: mod_base = OTHER; note = 2'-O-methylcytidine-3'-phosphorothioate
  modified_base 23: mod_base = OTHER; note = 2'-O-methyladenosine
agaactatttagcatgtttaaca

SEQ ID NO: 1476 - RNA, 23 nt, synthetic construct
  source 1..23: mol_type = other RNA
  modified_base 1: mod_base = OTHER; note 5'-(E)-vinylphosphonate-2'-O-methyluridine-3'-phosphorothio ate
  modified_base 2: mod_base = OTHER; note = 2'-fluorouridine-3'-phosphorothioate
  modified_base 3: mod_base = OTHER; note = 2'-O-methylguanosine-3'-phosphate
  modified_base 4: mod_base = OTHER; note = 2'-O-methyladenosine-3'-phosphate
  modified_base 5: mod_base = OTHER; note = 2'-O-methyladenosine-3'-phosphate
  modified_base 6: mod_base = OTHER; note = 2'-fluorocytidine-3'-phosphate
  modified_base 7: mod_base = OTHER; note = 2'-O-methyladenosine-3'-phosphate
  modified_base 8: mod_base = OTHER; note = 2'-O-methylcytidine-3'-phosphate
  modified_base 9: mod_base = OTHER; note = 2'-O-methylcytidine-3'-phosphate
  modified_base 10: mod_base = OTHER; note = 2'-O-methyluridine-3'-phosphate
  modified_base 11: mod_base = OTHER; note = 2'-O-methyladenosine-3'-phosphate
  modified_base 12: mod_base = OTHER; note = 2'-O-methylguanosine-3'-phosphate
  modified_base 13: mod_base = OTHER; note = 2'-O-methylcytidine-3'-phosphate
  modified_base 14: mod_base = OTHER; note = 2'-fluoroadenosine-3'-phosphate
  modified_base 15: mod_base = OTHER; note = 2'-O-methyluridine-3'-phosphate
  modified_base 16: mod_base = OTHER; note = 2'-fluorocytidine-3'-phosphate
  modified_base 17: mod_base = OTHER; note = 2'-O-methyluridine-3'-phosphate
  modified_base 18: mod_base = OTHER; note = 2'-O-methylguanosine-3'-phosphate
  modified_base 19: mod_base = OTHER; note = 2'-O-methylcytidine-3'-phosphate
  modified_base 20: mod_base = OTHER; note = 2'-O-methyladenosine-3'-phosphate
  modified_base 21: mod_base = OTHER; note = 2'-O-methyladenosine-3'-phosphorothioate
  modified_base 22: mod_base = OTHER; note = 2'-O-methyladenosine-3'-phosphorothioate
  modified_base 23: mod_base = OTHER; note = 2'-O-methylcytidine
ttgaacacctagcatctgcaaac

SEQ ID NO: 1477 - RNA, 23 nt, synthetic construct
  source 1..23: mol_type = other RNA
  modified_base 1: mod_base = OTHER; note 5'-(E)-vinylphosphonate-2'-O-methyluridine-3'-phosphorothio ate
  modified_base 2: mod_base = OTHER; note = 2'-fluorouridine-3'-phosphorothioate
  modified_base 3: mod_base = OTHER; note = 2'-O-methylguanosine-3'-phosphate
  modified_base 4: mod_base = OTHER; note = 2'-O-methyladenosine-3'-phosphate
  modified_base 5: mod_base = OTHER; note = 2'-O-methyladenosine-3'-phosphate
  modified_base 6: mod_base = OTHER; note = 2'-fluorocytidine-3'-phosphate
  modified_base 7: mod_base = OTHER; note = 2'-O-methyladenosine-3'-phosphate
  modified_base 8: mod_base = OTHER; note = 2'-O-methylcytidine-3'-phosphate
  modified_base 9: mod_base = OTHER; note = 2'-O-methylcytidine-3'-phosphate
  modified_base 10: mod_base = OTHER; note = 2'-O-methyluridine-3'-phosphate
  modified_base 11: mod_base = OTHER; note = 2'-O-methyladenosine-3'-phosphate
  modified_base 12: mod_base = OTHER; note = 2'-O-methylguanosine-3'-phosphate
  modified_base 13: mod_base = OTHER; note = 2'-O-methylcytidine-3'-phosphate
  modified_base 14: mod_base = OTHER; note = 2'-fluoroadenosine-3'-phosphate
  modified_base 15: mod_base = OTHER; note = 2'-O-methyluridine-3'-phosphate
  modified_base 16: mod_base = OTHER; note = 2'-fluorocytidine-3'-phosphate
  modified_base 17: mod_base = OTHER; note = 2'-O-methyluridine-3'-phosphate
  modified_base 18: mod_base = OTHER; note = 2'-O-methylguanosine-3'-phosphate
  modified_base 19: mod_base = OTHER; note = 2'-O-methylcytidine-3'-phosphate
  modified_base 20: mod_base = OTHER; note = 2'-O-methyladenosine-3'-phosphate
  modified_base 21: mod_base = OTHER; note = 2'-O-methyladenosine-3'-phosphorothioate
  modified_base 22: mod_base = OTHER; note = 2'-O-methyladenosine-3'-phosphorothioate
  modified_base 23: mod_base = OTHER; note = 2'-O-methylcytidine
ttgaacacctagcatctgcaaac

SEQ ID NO: 1478 - DNA, 21 bp, synthetic construct
  source 1..21: mol_type = other DNA
  modified_base 1: mod_base = OTHER; note = 2'-O-methylcytidine-3'-phosphorothioate
  modified_base 2: mod_base = OTHER; note = 2'-O-methyluridine-3'-phosphorothioate
  modified_base 3: mod_base = OTHER; note = 2'-O-methyladenosine-3'-phosphate
  modified_base 4: mod_base = OTHER; note = 2'-O-methylguanosine-3'-phosphate
  modified_base 5: mod_base = OTHER; note = 2'-O-methyladenosine-3'-phosphate
  modified_base 6: mod_base = OTHER; note = 2'-O-methylcytidine-3'-phosphate
  modified_base 7: mod_base = OTHER; note = 2'-fluorocytidine-3'-phosphate
  modified_base 8: mod_base = OTHER; note = 2'-O-methyluridine-3'-phosphate
  modified_base 9: mod_base = OTHER; note = 2'-fluoroguanosine-3'-phosphate
  modified_base 10: mod_base = OTHER; note = 2'-O-methyluridine-3'-phosphate
  modified_base 12: mod_base = OTHER; note = 2'-O-methyluridine-3'-phosphate
  modified_base 13: mod_base = OTHER; note = 2'-O-methyluridine-3'-phosphate
  modified_base 14: mod_base = OTHER; note = 2'-O-methylguanosine-3'-phosphate
  modified_base 15: mod_base = OTHER; note = 2'-O-methylcytidine-3'-phosphate
  modified_base 16: mod_base = OTHER; note = 2'-O-methyluridine-3'-phosphate
  modified_base 17: mod_base = OTHER; note = 2'-O-methyluridine-3'-phosphate
  modified_base 18: mod_base = OTHER; note = 2'-O-methyluridine-3'-phosphate
  modified_base 19: mod_base = OTHER; note = 2'-O-methyluridine-3'-phosphate
  modified_base 20: mod_base = OTHER; note = 2'-O-methylguanosine-3'-phosphate
  modified_base 21: mod_base = OTHER; note = 2'-O-methyluridine
  misc_feature 1..10: note = RNA
  misc_feature 11: note = DNA
  misc_feature 12..21: note = RNA
ctagacctgttttgcttttgt

SEQ ID NO: 1479 - RNA, 23 nt, synthetic construct
  source 1..23: mol_type = other RNA
  modified_base 1: mod_base = OTHER; note = 2'-O-methyladenosine-3'-phosphorothioate
  modified_base 2: mod_base = OTHER; note = 2'-fluorocytidine-3'-phosphorothioate
  modified_base 3: mod_base = OTHER; note = 2'-O-methyladenosine-3'-phosphate
  modified_base 4: mod_base = OTHER; note = 2'-fluoroadenosine-3'-phosphate
  modified_base 5: mod_base = OTHER; note = 2'-fluoroadenosine-3'-phosphate
  modified_base 6: mod_base = OTHER; note = 2'-fluoroadenosine-3'-phosphate
  modified_base 7: mod_base = OTHER; note = 2'-O-methylguanosine-3'-phosphate
  modified_base 8: mod_base = OTHER; note = 2'-fluorocytidine-3'-phosphate
  modified_base 9: mod_base = OTHER; note = 2'-O-methyladenosine-3'-phosphate
  modified_base 10: mod_base = OTHER; note = 2'-fluoroadenosine-3'-phosphate
  modified_base 11: mod_base = OTHER; note = 2'-O-methyladenosine-3'-phosphate
  modified_base 12: mod_base = OTHER; note = 2'-fluoroadenosine-3'-phosphate
  modified_base 13: mod_base = OTHER; note = 2'-O-methylcytidine-3'-phosphate
  modified_base 14: mod_base = OTHER; note = 2'-fluoroadenosine-3'-phosphate
  modified_base 15: mod_base = OTHER; note = 2'-O-methylguanosine-3'-phosphate
  modified_base 16: mod_base = OTHER; note = 2'-fluoroguanosine-3'-phosphate
  modified_base 17: mod_base = OTHER; note = 2'-O-methyluridine-3'-phosphate
  modified_base 18: mod_base = OTHER; note = 2'-fluorocytidine-3'-phosphate
  modified_base 19: mod_base = OTHER; note = 2'-O-methyluridine-3'-phosphate
  modified_base 20: mod_base = OTHER; note = 2'-O-methyladenosine-3'-phosphate
  modified_base 21: mod_base = OTHER; note = 2'-O-methylguanosine-3'-phosphorothioate
  modified_base 22: mod_base = OTHER; note = 2'-O-methyladenosine-3'-phosphorothioate
  modified_base 23: mod_base = OTHER; note = 2'-O-methyladenosine
acaaaagcaaaacaggtctagaa

SEQ ID NO: 1480 - DNA, 21 bp, synthetic construct
  source 1..21: mol_type = other DNA
  modified_base 1: mod_base = OTHER; note = 2'-O-methylcytidine-3'-phosphorothioate
  modified_base 2: mod_base = OTHER; note = 2'-O-methyluridine-3'-phosphorothioate
  modified_base 3: mod_base = OTHER; note = 2'-O-methyladenosine-3'-phosphate
  modified_base 4: mod_base = OTHER; note = 2'-O-methylguanosine-3'-phosphate
  modified_base 5: mod_base = OTHER; note = 2'-O-methyladenosine-3'-phosphate
  modified_base 6: mod_base = OTHER; note = 2'-O-methylcytidine-3'-phosphate
  modified_base 7: mod_base = OTHER; note = 2'-fluorocytidine-3'-phosphate
  modified_base 8: mod_base = OTHER; note = 2'-O-methyluridine-3'-phosphate
  modified_base 9: mod_base = OTHER; note = 2'-fluoroguanosine-3'-phosphate
  modified_base 10: mod_base = OTHER; note = 2'-O-methyluridine-3'-phosphate
  modified_base 12: mod_base = OTHER; note = 2'-O-methyluridine-3'-phosphate
  modified_base 13: mod_base = OTHER; note = 2'-O-methyluridine-3'-phosphate
  modified_base 14: mod_base = OTHER; note = 2'-O-methylguanosine-3'-phosphate
  modified_base 15: mod_base = OTHER; note = 2'-O-methylcytidine-3'-phosphate
  modified_base 16: mod_base = OTHER; note = 2'-O-methyluridine-3'-phosphate
  modified_base 17: mod_base = OTHER; note = 2'-O-methyluridine-3'-phosphate
  modified_base 18: mod_base = OTHER; note = 2'-O-methyluridine-3'-phosphate
  modified_base 19: mod_base = OTHER; note = 2'-O-methyluridine-3'-phosphate
  modified_base 20: mod_base = OTHER; note = 2'-O-methylguanosine-3'-phosphate
  modified_base 21: mod_base = OTHER; note 2'-O-methyluridine-3'-phosphate-N-[tris(GalNAc-alkyl)-amido decanoyl)]-4-hydroxyprolinol (Hyp-(GalNAc-alkyl)3)
  misc_feature 1..10: note = RNA
  misc_feature 11: note = DNA
  misc_feature 12..21: note = RNA
ctagacctgttttgcttttgt

SEQ ID NO: 1481 - RNA, 21 nt, synthetic construct
  source 1..21: mol_type = other RNA
  modified_base 1: mod_base = OTHER; note = Uracil threose nucleic acid-2'-phosphorothioate
  modified_base 2: mod_base = OTHER; note = Uracil threose nucleic acid-2'-phosphorothioate
  modified_base 3: mod_base = OTHER; note = 2'-O-methylguanosine-3'-phosphate
  modified_base 4: mod_base = OTHER; note = 2'-O-methylcytidine-3'-phosphate
  modified_base 5: mod_base = OTHER; note = 2'-O-methyladenosine-3'-phosphate
  modified_base 6: mod_base = OTHER; note = 2'-O-methylguanosine-3'-phosphate
  modified_base 7: mod_base = OTHER; note = 2'-fluoroadenosine-3'-phosphate
  modified_base 8: mod_base = OTHER; note = 2'-O-methyluridine-3'-phosphate
  modified_base 9: mod_base = OTHER; note = 2'-fluoroguanosine-3'-phosphate
  modified_base 10: mod_base = OTHER; note = 2'-fluorocytidine-3'-phosphate
  modified_base 11: mod_base = OTHER; note = 2'-fluorouridine-3'-phosphate
  modified_base 12: mod_base = OTHER; note = 2'-O-methyladenosine-3'-phosphate
  modified_base 13: mod_base = OTHER; note = 2'-O-methylguanosine-3'-phosphate
  modified_base 14: mod_base = OTHER; note = 2'-O-methylguanosine-3'-phosphate
  modified_base 15: mod_base = OTHER; note = 2'-O-methyluridine-3'-phosphate
  modified_base 16: mod_base = OTHER; note = 2'-O-methylguanosine-3'-phosphate
  modified_base 17: mod_base = OTHER; note = 2'-O-methyluridine-3'-phosphate
  modified_base 18: mod_base = OTHER; note = 2'-O-methyluridine-3'-phosphate
  modified_base 19: mod_base = OTHER; note = 2'-O-methylcytidine-3'-phosphate
  modified_base 20: mod_base = OTHER; note = Adenine threose nucleic acid-2'-phosphate
  modified_base 21: mod_base = OTHER; note = Adenine threose nucleic acid
ttgcagatgctaggtgttcaa

SEQ ID NO: 1482 - RNA, 21 nt, synthetic construct
  source 1..21: mol_type = other RNA
  modified_base 1: mod_base = OTHER; note = Uracil threose nucleic acid-2'-phosphorothioate
  modified_base 2: mod_base = OTHER; note = Uracil threose nucleic acid-2'-phosphorothioate
  modified_base 3: mod_base = OTHER; note = 2'-O-methylguanosine-3'-phosphate
  modified_base 4: mod_base = OTHER; note = 2'-O-methylcytidine-3'-phosphate
  modified_base 5: mod_base = OTHER; note = 2'-O-methyladenosine-3'-phosphate
  modified_base 6: mod_base = OTHER; note = 2'-O-methylguanosine-3'-phosphate
  modified_base 7: mod_base = OTHER; note = 2'-fluoroadenosine-3'-phosphate
  modified_base 8: mod_base = OTHER; note = 2'-O-methyluridine-3'-phosphate
  modified_base 9: mod_base = OTHER; note = 2'-fluoroguanosine-3'-phosphate
  modified_base 10: mod_base = OTHER; note = 2'-fluorocytidine-3'-phosphate
  modified_base 11: mod_base = OTHER; note = 2'-fluorouridine-3'-phosphate
  modified_base 12: mod_base = OTHER; note = 2'-O-methyladenosine-3'-phosphate
  modified_base 13: mod_base = OTHER; note = 2'-O-methylguanosine-3'-phosphate
  modified_base 14: mod_base = OTHER; note = 2'-O-methylguanosine-3'-phosphate
  modified_base 15: mod_base = OTHER; note = 2'-O-methyluridine-3'-phosphate
  modified_base 16: mod_base = OTHER; note = 2'-O-methylguanosine-3'-phosphate
  modified_base 17: mod_base = OTHER; note = 2'-O-methyluridine-3'-phosphate
  modified_base 18: mod_base = OTHER; note = 2'-O-methyluridine-3'-phosphate
  modified_base 19: mod_base = OTHER; note = 2'-O-methylcytidine-3'-phosphate
  modified_base 20: mod_base = OTHER; note = Adenine threose nucleic acid-2'-phosphorothioate
  modified_base 21: mod_base = OTHER; note = Adenine threose nucleic acid
ttgcagatgctaggtgttcaa

SEQ ID NO: 1483 - RNA, 21 nt, synthetic construct
  source 1..21: mol_type = other RNA
  modified_base 1: mod_base = OTHER; note = 2'-O-methoxyethyl(MOE)-thymidine(or 5-methyluridine)-3'- phosphorothioate
  modified_base 2: mod_base = OTHER; note = 2'-O-methoxyethyl(MOE)-thymidine(or 5-methyluridine)-3'- phosphorothioate
  modified_base 3: mod_base = OTHER; note = 2'-O-methylguanosine-3'-phosphate
  modified_base 4: mod_base = OTHER; note = 2'-O-methylcytidine-3'-phosphate
  modified_base 5: mod_base = OTHER; note = 2'-O-methyladenosine-3'-phosphate
  modified_base 6: mod_base = OTHER; note = 2'-O-methylguanosine-3'-phosphate
  modified_base 7: mod_base = OTHER; note = 2'-fluoroadenosine-3'-phosphate
  modified_base 8: mod_base = OTHER; note = 2'-O-methyluridine-3'-phosphate
  modified_base 9: mod_base = OTHER; note = 2'-fluoroguanosine-3'-phosphate
  modified_base 10: mod_base = OTHER; note = 2'-fluorocytidine-3'-phosphate
  modified_base 11: mod_base = OTHER; note = 2'-fluorouridine-3'-phosphate
  modified_base 12: mod_base = OTHER; note = 2'-O-methyladenosine-3'-phosphate
  modified_base 13: mod_base = OTHER; note = 2'-O-methylguanosine-3'-phosphate
  modified_base 14: mod_base = OTHER; note = 2'-O-methylguanosine-3'-phosphate
  modified_base 15: mod_base = OTHER; note = 2'-O-methyluridine-3'-phosphate
  modified_base 16: mod_base = OTHER; note = 2'-O-methylguanosine-3'-phosphate
  modified_base 17: mod_base = OTHER; note = 2'-O-methyluridine-3'-phosphate
  modified_base 18: mod_base = OTHER; note = 2'-O-methyluridine-3'-phosphate
  modified_base 19: mod_base = OTHER; note = 2'-O-methylcytidine-3'-phosphate
  modified_base 20: mod_base = OTHER; note = 2'-O-methoxyethyl(MOE) adenosine-3'-phosphate
  modified_base 21: mod_base = OTHER; note = 2'-O-methoxyethyl(MOE) adenosine-3'-phosphate-(N1-hydroxyethanol-N12[tris(GalNAc-t riethyleneglycol)]-diamidodecane]
ttgcagatgctaggtgttcaa

SEQ ID NO: 1484 - RNA, 21 nt, synthetic construct
  source 1..21: mol_type = other RNA
  modified_base 1: mod_base = OTHER; note = 2'-O-methoxyethyl(MOE)-thymidine(or 5-methyluridine)-3'- phosphorothioate
  modified_base 2: mod_base = OTHER; note = 2'-O-methoxyethyl(MOE)-thymidine(or 5-methyluridine)-3'- phosphorothioate
  modified_base 3: mod_base = OTHER; note = 2'-O-methylguanosine-3'-phosphate
  modified_base 4: mod_base = OTHER; note = 2'-O-methylcytidine-3'-phosphate
  modified_base 5: mod_base = OTHER; note = 2'-O-methyladenosine-3'-phosphate
  modified_base 6: mod_base = OTHER; note = 2'-O-methylguanosine-3'-phosphate
  modified_base 7: mod_base = OTHER; note = 2'-fluoroadenosine-3'-phosphate
  modified_base 8: mod_base = OTHER; note = 2'-O-methyluridine-3'-phosphate
  modified_base 9: mod_base = OTHER; note = 2'-fluoroguanosine-3'-phosphate
  modified_base 10: mod_base = OTHER; note = 2'-fluorocytidine-3'-phosphate
  modified_base 11: mod_base = OTHER; note = 2'-fluorouridine-3'-phosphate
  modified_base 12: mod_base = OTHER; note = 2'-O-methyladenosine-3'-phosphate
  modified_base 13: mod_base = OTHER; note = 2'-O-methylguanosine-3'-phosphate
  modified_base 14: mod_base = OTHER; note = 2'-O-methylguanosine-3'-phosphate
  modified_base 15: mod_base = OTHER; note = 2'-O-methyluridine-3'-phosphate
  modified_base 16: mod_base = OTHER; note = 2'-O-methylguanosine-3'-phosphate
  modified_base 17: mod_base = OTHER; note = 2'-O-methyluridine-3'-phosphate
  modified_base 18: mod_base = OTHER; note = 2'-O-methyluridine-3'-phosphate
  modified_base 19: mod_base = OTHER; note = 2'-O-methylcytidine-3'-phosphorothioate
  modified_base 20: mod_base = OTHER; note = 2'-O-methoxyethyl(MOE) adenosine-3'-phosphorothioate
  modified_base 21: mod_base = OTHER; note = 2'-O-methoxyethyl(MOE) adenosine-3'-phosphate-(N1-hydroxyethanol-N12[tris(GalNAc-t riethyleneglycol)]-diamidodecane]
ttgcagatgctaggtgttcaa

SEQ ID NO: 1485 - RNA, 21 nt, synthetic construct
  source 1..21: mol_type = other RNA
  modified_base 1: mod_base = OTHER; note = Uracil threose nucleic acid-2'-phosphorothioate
  modified_base 2: mod_base = OTHER; note = Uracil threose nucleic acid-2'-phosphorothioate
  modified_base 3: mod_base = OTHER; note = 2'-O-methylguanosine-3'-phosphate
  modified_base 4: mod_base = OTHER; note = 2'-O-methylcytidine-3'-phosphate
  modified_base 5: mod_base = OTHER; note = 2'-O-methyladenosine-3'-phosphate
  modified_base 6: mod_base = OTHER; note = 2'-O-methylguanosine-3'-phosphate
  modified_base 7: mod_base = OTHER; note = 2'-fluoroadenosine-3'-phosphate
  modified_base 8: mod_base = OTHER; note = 2'-O-methyluridine-3'-phosphate
  modified_base 9: mod_base = OTHER; note = 2'-fluoroguanosine-3'-phosphate
  modified_base 10: mod_base = OTHER; note = 2'-fluorocytidine-3'-phosphate
  modified_base 11: mod_base = OTHER; note = 2'-fluorouridine-3'-phosphate
  modified_base 12: mod_base = OTHER; note = 2'-O-methyladenosine-3'-phosphate
  modified_base 13: mod_base = OTHER; note = 2'-O-methylguanosine-3'-phosphate
  modified_base 14: mod_base = OTHER; note = 2'-O-methylguanosine-3'-phosphate
  modified_base 15: mod_base = OTHER; note = 2'-O-methyluridine-3'-phosphate
  modified_base 16: mod_base = OTHER; note = 2'-O-methylguanosine-3'-phosphate
  modified_base 17: mod_base = OTHER; note = 2'-O-methyluridine-3'-phosphate
  modified_base 18: mod_base = OTHER; note = 2'-O-methyluridine-3'-phosphate
  modified_base 19: mod_base = OTHER; note = 2'-O-methylcytidine-3'-phosphate
  modified_base 20: mod_base = OTHER; note = Adenine threose nucleic acid-2'-phosphate
  modified_base 21: mod_base = OTHER; note = Adenine threose nucleic acid-2'-phosphate-(N1-hydroxyethanol-N12[tris(GalNAc-trieth yleneglycol)]-diamidodecane]
ttgcagatgctaggtgttcaa

SEQ ID NO: 1486 - RNA, 21 nt, synthetic construct
  source 1..21: mol_type = other RNA
  modified_base 1: mod_base = OTHER; note = Uracil threose nucleic acid-2'-phosphorothioate
  modified_base 2: mod_base = OTHER; note = Uracil threose nucleic acid-2'-phosphorothioate
  modified_base 3: mod_base = OTHER; note = 2'-O-methylguanosine-3'-phosphate
  modified_base 4: mod_base = OTHER; note = 2'-O-methylcytidine-3'-phosphate
  modified_base 5: mod_base = OTHER; note = 2'-O-methyladenosine-3'-phosphate
  modified_base 6: mod_base = OTHER; note = 2'-O-methylguanosine-3'-phosphate
  modified_base 7: mod_base = OTHER; note = 2'-fluoroadenosine-3'-phosphate
  modified_base 8: mod_base = OTHER; note = 2'-O-methyluridine-3'-phosphate
  modified_base 9: mod_base = OTHER; note = 2'-fluoroguanosine-3'-phosphate
  modified_base 10: mod_base = OTHER; note = 2'-fluorocytidine-3'-phosphate
  modified_base 11: mod_base = OTHER; note = 2'-fluorouridine-3'-phosphate
  modified_base 12: mod_base = OTHER; note = 2'-O-methyladenosine-3'-phosphate
  modified_base 13: mod_base = OTHER; note = 2'-O-methylguanosine-3'-phosphate
  modified_base 14: mod_base = OTHER; note = 2'-O-methylguanosine-3'-phosphate
  modified_base 15: mod_base = OTHER; note = 2'-O-methyluridine-3'-phosphate
  modified_base 16: mod_base = OTHER; note = 2'-O-methylguanosine-3'-phosphate
  modified_base 17: mod_base = OTHER; note = 2'-O-methyluridine-3'-phosphate
  modified_base 18: mod_base = OTHER; note = 2'-O-methyluridine-3'-phosphate
  modified_base 19: mod_base = OTHER; note = 2'-O-methylcytidine-3'-phosphate
  modified_base 20: mod_base = OTHER; note = Adenine threose nucleic acid-2'-phosphorothioate
  modified_base 21: mod_base = OTHER; note = Adenine threose nucleic acid-2'-phosphorothioate-(N1-hydroxyethanol-N12[tris(GalNAc -triethyleneglycol)]-diamidodecane]
ttgcagatgctaggtgttcaa

SEQ ID NO: 1487 - RNA, 21 nt, synthetic construct
  source 1..21: mol_type = other RNA
  modified_base 1: mod_base = OTHER; note = 2'-O-methyluridine-3'-phosphorothioate
  modified_base 2: mod_base = OTHER; note = 2'-O-methyluridine-3'-phosphorothioate
  modified_base 3: mod_base = OTHER; note = 2'-O-methylguanosine-3'-phosphate
  modified_base 4: mod_base = OTHER; note = 2'-O-methylcytidine-3'-phosphate
  modified_base 5: mod_base = OTHER; note = 2'-O-methyladenosine-3'-phosphate
  modified_base 6: mod_base = OTHER; note = 2'-O-methylguanosine-3'-phosphate
  modified_base 7: mod_base = OTHER; note = 2'-fluoroadenosine-3'-phosphate
  modified_base 8: mod_base = OTHER; note = 2'-O-methyluridine-3'-phosphate
  modified_base 9: mod_base = OTHER; note = 2'-fluoroguanosine-3'-phosphate
  modified_base 10: mod_base = OTHER; note = 2'-fluorocytidine-3'-phosphate
  modified_base 11: mod_base = OTHER; note = 2'-fluorouridine-3'-phosphate
  modified_base 12: mod_base = OTHER; note = 2'-O-methyladenosine-3'-phosphate
  modified_base 13: mod_base = OTHER; note = 2'-O-methylguanosine-3'-phosphate
  modified_base 14: mod_base = OTHER; note = 2'-O-methylguanosine-3'-phosphate
  modified_base 15: mod_base = OTHER; note = 2'-O-methyluridine-3'-phosphate
  modified_base 16: mod_base = OTHER; note = 2'-O-methylguanosine-3'-phosphate
  modified_base 17: mod_base = OTHER; note = 2'-O-methyluridine-3'-phosphate
  modified_base 18: mod_base = OTHER; note = 2'-O-methyluridine-3'-phosphate
  modified_base 19: mod_base = OTHER; note = 2'-O-methylcytidine-3'-phosphate
  modified_base 20: mod_base = OTHER; note = 2'-O-methyladenosine-3'-phosphate
  modified_base 21: mod_base = OTHER; note 2'-O-methyladenosine-3'-phosphate-(N1-hydroxyethanol-N12[tr is(GalNAc-triethyleneglycol)]-diamidodecane]
ttgcagatgctaggtgttcaa

SEQ ID NO: 1488 - DNA, 21 bp, synthetic construct
  source 1..21: mol_type = other DNA
  modified_base 1: mod_base = OTHER; note = 2'-O-methylcytidine-3'-phosphorothioate
  modified_base 2: mod_base = OTHER; note = 2'-O-methyluridine-3'-phosphorothioate
  modified_base 3: mod_base = OTHER; note = 2'-O-methyladenosine-3'-phosphate
  modified_base 4: mod_base = OTHER; note = 2'-O-methylguanosine-3'-phosphate
  modified_base 5: mod_base = OTHER; note = 2'-O-methyladenosine-3'-phosphate
  modified_base 6: mod_base = OTHER; note = 2'-O-methylcytidine-3'-phosphate
  modified_base 7: mod_base = OTHER; note = 2'-fluorocytidine-3'-phosphate
  modified_base 8: mod_base = OTHER; note = 2'-O-methyluridine-3'-phosphate
  modified_base 9: mod_base = OTHER; note = 2'-fluoroguanosine-3'-phosphate
  modified_base 10: mod_base = OTHER; note = 2'-O-methyluridine-3'-phosphate
  modified_base 12: mod_base = OTHER; note = 2'-O-methyluridine-3'-phosphate
  modified_base 13: mod_base = OTHER; note = 2'-O-methyluridine-3'-phosphate
  modified_base 14: mod_base = OTHER; note = 2'-O-methylguanosine-3'-phosphate
  modified_base 15: mod_base = OTHER; note = 2'-O-methylcytidine-3'-phosphate
  modified_base 16: mod_base = OTHER; note = 2'-O-methyluridine-3'-phosphate
  modified_base 17: mod_base = OTHER; note = 2'-O-methyluridine-3'-phosphate
  modified_base 18: mod_base = OTHER; note = 2'-O-methyluridine-3'-phosphate
  modified_base 19: mod_base = OTHER; note = 2'-O-methyluridine-3'-phosphate
  modified_base 20: mod_base = OTHER; note = 2'-O-methylguanosine-3'-phosphate
  modified_base 21: mod_base = OTHER; note = 2'-O-methyluridine
  misc_feature 1..10: note = RNA
  misc_feature 11: note = DNA
  misc_feature 12..21: note = RNA
ctagacctgttttgcttttgt

SEQ ID NO: 1489 - RNA, 23 nt, synthetic construct
  source 1..23: mol_type = other RNA
  modified_base 1: mod_base = OTHER; note = 2'-O-methyladenosine-3'-phosphorothioate
  modified_base 2: mod_base = OTHER; note = 2'-fluorocytidine-3'-phosphorothioate
  modified_base 3: mod_base = OTHER; note = 2'-O-methyladenosine-3'-phosphate
  modified_base 4: mod_base = OTHER; note = 2'-fluoroadenosine-3'-phosphate
  modified_base 5: mod_base = OTHER; note = 2'-fluoroadenosine-3'-phosphate
  modified_base 6: mod_base = OTHER; note = 2'-fluoroadenosine-3'-phosphate
  modified_base 7: mod_base = OTHER; note = 2'-O-methylguanosine-3'-phosphate
  modified_base 8: mod_base = OTHER; note = 2'-fluorocytidine-3'-phosphate
  modified_base 9: mod_base = OTHER; note = 2'-O-methyladenosine-3'-phosphate
  modified_base 10: mod_base = OTHER; note = 2'-fluoroadenosine-3'-phosphate
  modified_base 11: mod_base = OTHER; note = 2'-O-methyladenosine-3'-phosphate
  modified_base 12: mod_base = OTHER; note = 2'-fluoroadenosine-3'-phosphate
  modified_base 13: mod_base = OTHER; note = 2'-O-methylcytidine-3'-phosphate
  modified_base 14: mod_base = OTHER; note = 2'-fluoroadenosine-3'-phosphate
  modified_base 15: mod_base = OTHER; note = 2'-O-methylguanosine-3'-phosphate
  modified_base 16: mod_base = OTHER; note = 2'-fluoroguanosine-3'-phosphate
  modified_base 17: mod_base = OTHER; note = 2'-O-methyluridine-3'-phosphate
  modified_base 18: mod_base = OTHER; note = 2'-fluorocytidine-3'-phosphate
  modified_base 19: mod_base = OTHER; note = 2'-O-methyluridine-3'-phosphate
  modified_base 20: mod_base = OTHER; note = 2'-O-methyladenosine-3'-phosphate
  modified_base 21: mod_base = OTHER; note = 2'-O-methylguanosine-3'-phosphorothioate
  modified_base 22: mod_base = OTHER; note = 2'-O-methyladenosine-3'-phosphorothioate
  modified_base 23: mod_base = OTHER; note = 2'-O-methyladenosine
acaaaagcaaaacaggtctagaa

SEQ ID NO: 1490 - DNA, 21 bp, synthetic construct
  source 1..21: mol_type = other DNA
  modified_base 1: mod_base = OTHER; note = 2'-O-methylcytidine-3'-phosphorothioate
  modified_base 2: mod_base = OTHER; note = 2'-O-methyluridine-3'-phosphate
  modified_base 3: mod_base = OTHER; note = 2'-O-methyladenosine-3'-phosphate
  modified_base 4: mod_base = OTHER; note = 2'-O-methylguanosine-3'-phosphate
  modified_base 5: mod_base = OTHER; note = 2'-O-methyladenosine-3'-phosphate
  modified_base 6: mod_base = OTHER; note = 2'-O-methylcytidine-3'-phosphate
  modified_base 7: mod_base = OTHER; note = 2'-fluorocytidine-3'-phosphate
  modified_base 8: mod_base = OTHER; note = 2'-O-methyluridine-3'-phosphate
  modified_base 9: mod_base = OTHER; note = 2'-fluoroguanosine-3'-phosphate
  modified_base 10: mod_base = OTHER; note = 2'-O-methyluridine-3'-phosphate
  modified_base 12: mod_base = OTHER; note = 2'-O-methyluridine-3'-phosphate
  modified_base 13: mod_base = OTHER; note = 2'-O-methyluridine-3'-phosphate
  modified_base 14: mod_base = OTHER; note = 2'-O-methylguanosine-3'-phosphate
  modified_base 15: mod_base = OTHER; note = 2'-O-methylcytidine-3'-phosphate
  modified_base 16: mod_base = OTHER; note = 2'-O-methyluridine-3'-phosphate
  modified_base 17: mod_base = OTHER; note = 2'-O-methyluridine-3'-phosphate
  modified_base 18: mod_base = OTHER; note = 2'-O-methyluridine-3'-phosphate
  modified_base 19: mod_base = OTHER; note = 2'-O-methyluridine-3'-phosphate
  modified_base 20: mod_base = OTHER; note = 2'-O-methylguanosine-3'-phosphate
  modified_base 21: mod_base = OTHER; note = 2'-O-methyluridine
  misc_feature 1..10: note = RNA
  misc_feature 11: note = DNA
  misc_feature 12..21: note = RNA
ctagacctgttttgcttttgt

SEQ ID NO: 1491 - RNA, 23 nt, synthetic construct
  source 1..23: mol_type = other RNA
  modified_base 1: mod_base = OTHER; note = 2'-O-methyladenosine-3'-phosphorothioate
  modified_base 2: mod_base = OTHER; note = 2'-fluorocytidine-3'-phosphorothioate
  modified_base 3: mod_base = OTHER; note = 2'-O-methyladenosine-3'-phosphate
  modified_base 4: mod_base = OTHER; note = 2'-fluoroadenosine-3'-phosphate
  modified_base 5: mod_base = OTHER; note = 2'-fluoroadenosine-3'-phosphate
  modified_base 6: mod_base = OTHER; note = 2'-fluoroadenosine-3'-phosphate
  modified_base 7: mod_base = OTHER; note = 2'-O-methylguanosine-3'-phosphate
  modified_base 8: mod_base = OTHER; note = 2'-fluorocytidine-3'-phosphate
  modified_base 9: mod_base = OTHER; note = 2'-O-methyladenosine-3'-phosphate
  modified_base 10: mod_base = OTHER; note = 2'-fluoroadenosine-3'-phosphate
  modified_base 11: mod_base = OTHER; note = 2'-O-methyladenosine-3'-phosphate
  modified_base 12: mod_base = OTHER; note = 2'-fluoroadenosine-3'-phosphate
  modified_base 13: mod_base = OTHER; note = 2'-O-methylcytidine-3'-phosphate
  modified_base 14: mod_base = OTHER; note = 2'-fluoroadenosine-3'-phosphate
  modified_base 15: mod_base = OTHER; note = 2'-O-methylguanosine-3'-phosphate
  modified_base 16: mod_base = OTHER; note = 2'-fluoroguanosine-3'-phosphate
  modified_base 17: mod_base = OTHER; note = 2'-O-methyluridine-3'-phosphate
  modified_base 18: mod_base = OTHER; note = 2'-fluorocytidine-3'-phosphate
  modified_base 19: mod_base = OTHER; note = 2'-O-methyluridine-3'-phosphate
  modified_base 20: mod_base = OTHER; note = 2'-O-methyladenosine-3'-phosphate
  modified_base 21: mod_base = OTHER; note = 2'-O-methylguanosine-3'-phosphorothioate
  modified_base 22: mod_base = OTHER; note = 2'-O-methyladenosine-3'-phosphorothioate
  modified_base 23: mod_base = OTHER; note = 2'-O-methyladenosine
acaaaagcaaaacaggtctagaa

SEQ ID NO: 1492 - DNA, 21 bp, synthetic construct
  source 1..21: mol_type = other DNA
  modified_base 1: mod_base = OTHER; note = 2'-O-methylcytidine-3'-phosphorothioate
  modified_base 2: mod_base = OTHER; note = 2'-O-methyluridine-3'-phosphorothioate
  modified_base 3: mod_base = OTHER; note = 2'-O-methyladenosine-3'-phosphate
  modified_base 4: mod_base = OTHER; note = 2'-O-methylguanosine-3'-phosphate
  modified_base 5: mod_base = OTHER; note = 2'-O-methyladenosine-3'-phosphate
  modified_base 6: mod_base = OTHER; note = 2'-O-methylcytidine-3'-phosphate
  modified_base 7: mod_base = OTHER; note = 2'-fluorocytidine-3'-phosphate
  modified_base 8: mod_base = OTHER; note = 2'-O-methyluridine-3'-phosphate
  modified_base 9: mod_base = OTHER; note = 2'-fluoroguanosine-3'-phosphate
  modified_base 10: mod_base = OTHER; note = 2'-O-methyluridine-3'-phosphate
  modified_base 12: mod_base = OTHER; note = 2'-O-methyluridine-3'-phosphate
  modified_base 13: mod_base = OTHER; note = 2'-O-methyluridine-3'-phosphate
  modified_base 14: mod_base = OTHER; note = 2'-O-methylguanosine-3'-phosphate
  modified_base 15: mod_base = OTHER; note = 2'-O-methylcytidine-3'-phosphate
  modified_base 16: mod_base = OTHER; note = 2'-O-methyluridine-3'-phosphate
  modified_base 17: mod_base = OTHER; note = 2'-O-methyluridine-3'-phosphate
  modified_base 18: mod_base = OTHER; note = 2'-O-methyluridine-3'-phosphate
  modified_base 19: mod_base = OTHER; note = 2'-O-methyluridine-3'-phosphate
  modified_base 20: mod_base = OTHER; note = 2'-O-methylguanosine-3'-phosphate
  modified_base 21: mod_base = OTHER; note = 2'-O-methyluridine
  misc_feature 1..10: note = RNA
  misc_feature 11: note = DNA
  misc_feature 12..21: note = RNA
ctagacctgttttgcttttgt

SEQ ID NO: 1493 - RNA, 23 nt, synthetic construct
  source 1..23: mol_type = other RNA
  modified_base 1: mod_base = OTHER; note = 2'-O-methyladenosine-3'-phosphorothioate
  modified_base 2: mod_base = OTHER; note = 2'-fluorocytidine-3'-phosphorothioate
  modified_base 3: mod_base = OTHER; note = 2'-O-methyladenosine-3'-phosphate
  modified_base 4: mod_base = OTHER; note = 2'-fluoroadenosine-3'-phosphate
  modified_base 5: mod_base = OTHER; note = 2'-fluoroadenosine-3'-phosphate
  modified_base 6: mod_base = OTHER; note = 2'-fluoroadenosine-3'-phosphate
  modified_base 7: mod_base = OTHER; note = 2'-O-methylguanosine-3'-phosphate
  modified_base 8: mod_base = OTHER; note = 2'-fluorocytidine-3'-phosphate
  modified_base 9: mod_base = OTHER; note = 2'-O-methyladenosine-3'-phosphate
  modified_base 10: mod_base = OTHER; note = 2'-fluoroadenosine-3'-phosphate
  modified_base 11: mod_base = OTHER; note = 2'-O-methyladenosine-3'-phosphate
  modified_base 12: mod_base = OTHER; note = 2'-fluoroadenosine-3'-phosphate
  modified_base 13: mod_base = OTHER; note = 2'-O-methylcytidine-3'-phosphate
  modified_base 14: mod_base = OTHER; note = 2'-fluoroadenosine-3'-phosphate
  modified_base 15: mod_base = OTHER; note = 2'-O-methylguanosine-3'-phosphate
  modified_base 16: mod_base = OTHER; note = 2'-fluoroguanosine-3'-phosphate
  modified_base 17: mod_base = OTHER; note = 2'-O-methyluridine-3'-phosphate
  modified_base 18: mod_base = OTHER; note = 2'-fluorocytidine-3'-phosphate
  modified_base 19: mod_base = OTHER; note = 2'-O-methyluridine-3'-phosphate
  modified_base 20: mod_base = OTHER; note = 2'-O-methyladenosine-3'-phosphate
  modified_base 21: mod_base = OTHER; note = 2'-O-methylguanosine-3'-phosphorothioate
  modified_base 22: mod_base = OTHER; note = 2'-O-methyladenosine-3'-phosphorothioate
  modified_base 23: mod_base = OTHER; note = 2'-O-methyladenosine
acaaaagcaaaacaggtctagaa

SEQ ID NO: 1494 - DNA, 21 bp, synthetic construct
  source 1..21: mol_type = other DNA
  modified_base 1: mod_base = OTHER; note = 2'-O-methylguanosine-3'-phosphorothioate
  modified_base 2: mod_base = OTHER; note = 2'-O-methylcytidine-3'-phosphate
  modified_base 3: mod_base = OTHER; note = 2'-O-methylcytidine-3'-phosphate
  modified_base 4: mod_base = OTHER; note = 2'-O-methyluridine-3'-phosphate
  modified_base 9: mod_base = OTHER; note = 2'-O-methyluridine-3'-phosphate
  modified_base 10: mod_base = OTHER; note = 2'-O-methyluridine-3'-phosphate
  modified_base 11: mod_base = OTHER; note = 2'-O-methyluridine-3'-phosphate
  modified_base 13: mod_base = OTHER; note = 2'-O-methyluridine-3'-phosphate
  modified_base 14: mod_base = OTHER; note = 2'-O-methyluridine-3'-phosphate
  modified_base 15: mod_base = OTHER; note = 2'-O-methylcytidine-3'-phosphate
  misc_feature 1..19: note = RNA
  misc_feature 20..21: note = DNA
gcctggagtttattcggaatt

SEQ ID NO: 1495 - DNA, 21 bp, synthetic construct
  source 1..21: mol_type = other DNA
  modified_base 1: mod_base = OTHER; note = 5'-phosphate uridine-3'-phosphate
  modified_base 20: mod_base = OTHER; note = 2'-deoxythymidine(or 5-methyluridine)-3'-phosphorothioate
  misc_feature 1..19: note = RNA
  misc_feature 20..21: note = DNA
ttccgaataaactccaggctt

SEQ ID NO: 1496 - DNA, 21 bp, synthetic construct
  source 1..21: mol_type = other DNA
  modified_base 2: mod_base = OTHER; note = 2'-O-methylcytidine-3'-phosphate
  modified_base 3: mod_base = OTHER; note = 2'-O-methylcytidine-3'-phosphate
  modified_base 4: mod_base = OTHER; note = 2'-O-methyluridine-3'-phosphate
  modified_base 9: mod_base = OTHER; note = 2'-O-methyluridine-3'-phosphate
  modified_base 10: mod_base = OTHER; note = 2'-O-methyluridine-3'-phosphate
  modified_base 11: mod_base = OTHER; note = 2'-O-methyluridine-3'-phosphate
  modified_base 13: mod_base = OTHER; note = 2'-O-methyluridine-3'-phosphate
  modified_base 14: mod_base = OTHER; note = 2'-O-methyluridine-3'-phosphate
  modified_base 15: mod_base = OTHER; note = 2'-O-methylcytidine-3'-phosphate
  misc_feature 1..19: note = RNA
  misc_feature 20..21: note = DNA
gcctggagtttattcggaatt

SEQ ID NO: 1497 - DNA, 21 bp, synthetic construct
  source 1..21: mol_type = other DNA
  modified_base 1: mod_base = OTHER; note = 5'-phosphate-2'-O-methyluridine-3'-phosphate
  modified_base 2: mod_base = OTHER; note = 2'-fluorouridine-3'-phosphate
  modified_base 3: mod_base = OTHER; note = 2'-O-methylcytidine-3'-phosphate
  modified_base 4: mod_base = OTHER; note = 2'-fluorocytidine-3'-phosphate
  modified_base 5: mod_base = OTHER; note = 2'-O-methylguanosine-3'-phosphate
  modified_base 6: mod_base = OTHER; note = 2'-fluoroadenosine-3'-phosphate
  modified_base 7: mod_base = OTHER; note = 2'-O-methyladenosine-3'-phosphate
  modified_base 8: mod_base = OTHER; note = 2'-fluorouridine-3'-phosphate
  modified_base 9: mod_base = OTHER; note = 2'-O-methyladenosine-3'-phosphate
  modified_base 10: mod_base = OTHER; note = 2'-fluoroadenosine-3'-phosphate
  modified_base 11: mod_base = OTHER; note = 2'-O-methyladenosine-3'-phosphate
  modified_base 12: mod_base = OTHER; note = 2'-fluorocytidine-3'-phosphate
  modified_base 13: mod_base = OTHER; note = 2'-O-methyluridine-3'-phosphate
  modified_base 14: mod_base = OTHER; note = 2'-fluorocytidine-3'-phosphate
  modified_base 15: mod_base = OTHER; note = 2'-O-methylcytidine-3'-phosphate
  modified_base 16: mod_base = OTHER; note = 2'-fluoroadenosine-3'-phosphate
  modified_base 17: mod_base = OTHER; note = 2'-O-methylguanosine-3'-phosphate
  modified_base 18: mod_base = OTHER; note = 2'-fluoroguanosine-3'-phosphate
  modified_base 19: mod_base = OTHER; note = 2'-O-methylcytidine-3'-phosphate
  misc_feature 1..19: note = RNA
  misc_feature 20..21: note = DNA
ttccgaataaactccaggctt

SEQ ID NO: 1498 - DNA, 20 bp, synthetic construct
  source 1..20: mol_type = other DNA
  modified_base 2: mod_base = OTHER; note = 2'-O-methylcytidine-3'-phosphate
  modified_base 3: mod_base = OTHER; note = 2'-O-methylcytidine-3'-phosphate
  modified_base 4: mod_base = OTHER; note = 2'-O-methyluridine-3'-phosphate
  modified_base 9: mod_base = OTHER; note = 2'-O-methyluridine-3'-phosphate
  modified_base 10: mod_base = OTHER; note = 2'-O-methyluridine-3'-phosphate
  modified_base 11: mod_base = OTHER; note = 2'-O-methyluridine-3'-phosphate
  modified_base 13: mod_base = OTHER; note = 2'-O-methyluridine-3'-phosphate
  modified_base 14: mod_base = OTHER; note = 2'-O-methyluridine-3'-phosphate
  modified_base 15: mod_base = OTHER; note = 2'-O-methylcytidine-3'-phosphate
  misc_feature 1..18: note = RNA
  misc_feature 19..20: note = DNA
gcctggagtttattcggatt

SEQ ID NO: 1499 - DNA, 21 bp, synthetic construct
  source 1..21: mol_type = other DNA
  modified_base 1: mod_base = OTHER; note = 5'-phosphate uridine-3'-phosphate
  modified_base 20: mod_base = OTHER; note = 2'-deoxythymidine(or 5-methyluridine)-3'-phosphorothioate
  misc_feature 1..19: note = RNA
  misc_feature 20..21: note = DNA
ttccgaataaactccaggctt

SEQ ID NO: 1500 - DNA, 21 bp, synthetic construct
  source 1..21: mol_type = other DNA
  modified_base 2: mod_base = OTHER; note = 2'-O-methylcytidine-3'-phosphate
  modified_base 3: mod_base = OTHER; note = 2'-O-methylcytidine-3'-phosphate
  modified_base 4: mod_base = OTHER; note = 2'-O-methyluridine-3'-phosphate
  modified_base 9: mod_base = OTHER; note = 2'-O-methyluridine-3'-phosphate
  modified_base 10: mod_base = OTHER; note = 2'-O-methyluridine-3'-phosphate
  modified_base 11: mod_base = OTHER; note = 2'-O-methyluridine-3'-phosphate
  modified_base 13: mod_base = OTHER; note = 2'-O-methyluridine-3'-phosphate
  modified_base 14: mod_base = OTHER; note = 2'-O-methyluridine-3'-phosphate
  modified_base 15: mod_base = OTHER; note = 2'-O-methylcytidine-3'-phosphate
  misc_feature 1..19: note = RNA
  misc_feature 20..21: note = DNA
gcctggagtttattcggaatt

SEQ ID NO: 1501 - DNA, 21 bp, synthetic construct
  source 1..21: mol_type = other DNA
  modified_base 1: mod_base = OTHER; note = 5'-phosphate uridine-3'-phosphate
  modified_base 20: mod_base = OTHER; note = 2'-deoxythymidine(or 5-methyluridine)-3'-phosphorothioate
  misc_feature 1..19: note = RNA
  misc_feature 20..21: note = DNA
ttccgaataaactccaggctt

SEQ ID NO: 1502 - DNA, 21 bp, synthetic construct
  source 1..21: mol_type = other DNA
  modified_base 2: mod_base = OTHER; note = 2'-O-methylcytidine-3'-phosphate
  modified_base 3: mod_base = OTHER; note = 2'-O-methylcytidine-3'-phosphate
  modified_base 4: mod_base = OTHER; note = 2'-O-methyluridine-3'-phosphate
  modified_base 9: mod_base = OTHER; note = 2'-O-methyluridine-3'-phosphate
  modified_base 10: mod_base = OTHER; note = 2'-O-methyluridine-3'-phosphate
  modified_base 11: mod_base = OTHER; note = 2'-O-methyluridine-3'-phosphate
  modified_base 13: mod_base = OTHER; note = 2'-O-methyluridine-3'-phosphate
  modified_base 14: mod_base = OTHER; note = 2'-O-methyluridine-3'-phosphate
  modified_base 15: mod_base = OTHER; note = 2'-O-methylcytidine-3'-phosphate
  misc_feature 1..19: note = RNA
  misc_feature 20..21: note = DNA
gcctggagtttattcggaatt

SEQ ID NO: 1503 - DNA, 21 bp, synthetic construct
  source 1..21: mol_type = other DNA
  modified_base 1: mod_base = OTHER; note = 5'-phosphate uridine-3'-phosphate
  modified_base 20: mod_base = OTHER; note = 2'-deoxythymidine(or 5-methyluridine)-3'-phosphorothioate
  misc_feature 1..19: note = RNA
  misc_feature 20..21: note = DNA
ttccgaataaactccaggctt

SEQ ID NO: 1504 - DNA, 21 bp, synthetic construct
  source 1..21: mol_type = other DNA
  modified_base 2: mod_base = OTHER; note = 2'-O-methylcytidine-3'-phosphate
  modified_base 3: mod_base = OTHER; note = 2'-O-methylcytidine-3'-phosphate
  modified_base 4: mod_base = OTHER; note = 2'-O-methyluridine-3'-phosphate
  modified_base 9: mod_base = OTHER; note = 2'-O-methyluridine-3'-phosphate
  modified_base 10: mod_base = OTHER; note = 2'-O-methyluridine-3'-phosphate
  modified_base 11: mod_base = OTHER; note = 2'-O-methyluridine-3'-phosphate
  modified_base 13: mod_base = OTHER; note = 2'-O-methyluridine-3'-phosphate
  modified_base 14: mod_base = OTHER; note = 2'-O-methyluridine-3'-phosphate
  modified_base 15: mod_base = OTHER; note = 2'-O-methylcytidine-3'-phosphate
  misc_feature 1..19: note = RNA
  misc_feature 20..21: note = DNA
gcctggagtttattcggaatt

SEQ ID NO: 1505 - DNA, 21 bp, synthetic construct
  source 1..21: mol_type = other DNA
  modified_base 1: mod_base = OTHER; note = 5'-phosphate-2'-O-methyluridine-3'-phosphate
  modified_base 2: mod_base = OTHER; note = 2'-fluorouridine-3'-phosphate
  modified_base 3: mod_base = OTHER; note = 2'-O-methylcytidine-3'-phosphate
  modified_base 4: mod_base = OTHER; note = 2'-fluorocytidine-3'-phosphate
  modified_base 5: mod_base = OTHER; note = 2'-O-methylguanosine-3'-phosphate
  modified_base 6: mod_base = OTHER; note = 2'-fluoroadenosine-3'-phosphate
  modified_base 7: mod_base = OTHER; note = 2'-O-methyladenosine-3'-phosphate
  modified_base 8: mod_base = OTHER; note = 2'-fluorouridine-3'-phosphate
  modified_base 9: mod_base = OTHER; note = 2'-O-methyladenosine-3'-phosphate
  modified_base 10: mod_base = OTHER; note = 2'-fluoroadenosine-3'-phosphate
  modified_base 11: mod_base = OTHER; note = 2'-O-methyladenosine-3'-phosphate
  modified_base 12: mod_base = OTHER; note = 2'-fluorocytidine-3'-phosphate
  modified_base 13: mod_base = OTHER; note = 2'-O-methyluridine-3'-phosphate
  modified_base 14: mod_base = OTHER; note = 2'-fluorocytidine-3'-phosphate
  modified_base 15: mod_base = OTHER; note = 2'-O-methylcytidine-3'-phosphate
  modified_base 16: mod_base = OTHER; note = 2'-fluoroadenosine-3'-phosphate
  modified_base 17: mod_base = OTHER; note = 2'-O-methylguanosine-3'-phosphate
  modified_base 18: mod_base = OTHER; note = 2'-fluoroguanosine-3'-phosphate
  modified_base 19: mod_base = OTHER; note = 2'-O-methylcytidine-3'-phosphate
  misc_feature 1..19: note = RNA
  misc_feature 20..21: note = DNA
ttccgaataaactccaggctt

SEQ ID NO: 1506 - DNA, 21 bp, synthetic construct
  source 1..21: mol_type = other DNA
  modified_base 2: mod_base = OTHER; note = 2'-O-methylcytidine-3'-phosphate
  modified_base 3: mod_base = OTHER; note = 2'-O-methylcytidine-3'-phosphate
  modified_base 4: mod_base = OTHER; note = 2'-O-methyluridine-3'-phosphate
  modified_base 9: mod_base = OTHER; note = 2'-O-methyluridine-3'-phosphate
  modified_base 10: mod_base = OTHER; note = 2'-O-methyluridine-3'-phosphate
  modified_base 11: mod_base = OTHER; note = 2'-O-methyluridine-3'-phosphate
  modified_base 13: mod_base = OTHER; note = 2'-O-methyluridine-3'-phosphate
  modified_base 14: mod_base = OTHER; note = 2'-O-methyluridine-3'-phosphate
  modified_base 15: mod_base = OTHER; note = 2'-O-methylcytidine-3'-phosphate
  modified_base 20: mod_base = OTHER; note = 2'-deoxythymidine(or 5-methyluridine)-3'-phosphorothioate
  misc_feature 1..19: note = RNA
  misc_feature 20..21: note = DNA
gcctggagtttattcggaatt

SEQ ID NO: 1507 - DNA, 21 bp, synthetic construct
  source 1..21: mol_type = other DNA
  modified_base 1: mod_base = OTHER; note = 5'-phosphate uridine-3'-phosphate
  modified_base 20: mod_base = OTHER; note = 2'-deoxythymidine(or 5-methyluridine)-3'-phosphorothioate
  misc_feature 1..19: note = RNA
  misc_feature 20..21: note = DNA
ttccgaataaactccaggctt

SEQ ID NO: 1508 - DNA, 21 bp, synthetic construct
  source 1..21: mol_type = other DNA
  modified_base 2: mod_base = OTHER; note = 2'-O-methylcytidine-3'-phosphate
  modified_base 3: mod_base = OTHER; note = 2'-O-methylcytidine-3'-phosphate
  modified_base 4: mod_base = OTHER; note = 2'-O-methyluridine-3'-phosphate
  modified_base 9: mod_base = OTHER; note = 2'-O-methyluridine-3'-phosphate
  modified_base 10: mod_base = OTHER; note = 2'-O-methyluridine-3'-phosphate
  modified_base 11: mod_base = OTHER; note = 2'-O-methyluridine-3'-phosphate
  modified_base 13: mod_base = OTHER; note = 2'-O-methyluridine-3'-phosphate
  modified_base 14: mod_base = OTHER; note = 2'-O-methyluridine-3'-phosphate
  modified_base 15: mod_base = OTHER; note = 2'-O-methylcytidine-3'-phosphate
  modified_base 20: mod_base = OTHER; note = 2'-deoxythymidine(or 5-methyluridine)-3'-phosphorothioate
  misc_feature 1..19: note = RNA
  misc_feature 20..21: note = DNA
gcctggagtttattcggaatt

SEQ ID NO: 1509 - DNA, 21 bp, synthetic construct
  source 1..21: mol_type = other DNA
  modified_base 2: mod_base = OTHER; note = 2'-O-methylcytidine-3'-phosphate
  modified_base 3: mod_base = OTHER; note = 2'-O-methylcytidine-3'-phosphate
  modified_base 4: mod_base = OTHER; note = 2'-O-methyluridine-3'-phosphate
  modified_base 9: mod_base = OTHER; note = 2'-O-methyluridine-3'-phosphate
  modified_base 10: mod_base = OTHER; note = 2'-O-methyluridine-3'-phosphate
  modified_base 11: mod_base = OTHER; note = 2'-O-methyluridine-3'-phosphate
  modified_base 13: mod_base = OTHER; note = 2'-O-methyluridine-3'-phosphate
  modified_base 14: mod_base = OTHER; note = 2'-O-methyluridine-3'-phosphate
  modified_base 15: mod_base = OTHER; note = 2'-O-methylcytidine-3'-phosphate
  misc_feature 1..19: note = RNA
  misc_feature 20..21: note = DNA
gcctggagtttattcggaatt

SEQ ID NO: 1510 - DNA, 19 bp, synthetic construct
  source 1..19: mol_type = other DNA
  modified_base 1: mod_base = OTHER; note = 2'-O-methylcytidine-3'-phosphate
  modified_base 2: mod_base = OTHER; note = 2'-O-methyluridine-3'-phosphate
  modified_base 3: mod_base = OTHER; note = 2'-fluoroguanosine-3'-phosphate
  modified_base 4: mod_base = OTHER; note = 2'-O-methyluridine-3'-phosphate
  modified_base 5: mod_base = OTHER; note = 2'-fluoroguanosine-3'-phosphate
  modified_base 6: mod_base = OTHER; note = 2'-O-methylcytidine-3'-phosphate
  modified_base 7: mod_base = OTHER; note = 2'-O-methyluridine-3'-phosphate
  modified_base 8: mod_base = OTHER; note = 2'-fluoroadenosine-3'-phosphate
  modified_base 9: mod_base = OTHER; note = 2'-fluoroguanosine-3'-phosphate
  modified_base 10: mod_base = OTHER; note = 2'-O-methylcytidine-3'-phosphate
  modified_base 12: mod_base = OTHER; note = 2'-fluoroadenosine-3'-phosphate
  modified_base 13: mod_base = OTHER; note = 2'-O-methylcytidine-3'-phosphate
  modified_base 14: mod_base = OTHER; note = 2'-fluoroadenosine-3'-phosphate
  modified_base 15: mod_base = OTHER; note = 2'-O-methylcytidine-3'-phosphate
  modified_base 16: mod_base = OTHER; note = 2'-O-methylcytidine-3'-phosphate
  modified_base 17: mod_base = OTHER; note = 2'-O-methylcytidine-3'-phosphate
  modified_base 18: mod_base = OTHER; note = 2'-O-methyladenosine-3'-phosphate
  modified_base 19: mod_base = OTHER; note = 2'-O-methyladenosine
  misc_feature 1..10: note = RNA
  misc_feature 11: note = DNA
  misc_feature 12..19: note = RNA
ctgtgctagcaacacccaa

SEQ ID NO: 1511 - RNA, 21 nt, synthetic construct
  source 1..21: mol_type = other RNA
  modified_base 1: mod_base = OTHER; note = 2'-O-methyluridine-3'-phosphorothioate
  modified_base 2: mod_base = OTHER; note = 2'-fluorouridine-3'-phosphorothioate
  modified_base 3: mod_base = OTHER; note = 2'-O-methylguanosine-3'-phosphate
  modified_base 4: mod_base = OTHER; note = 2'-fluoroguanosine-3'-phosphate
  modified_base 5: mod_base = OTHER; note = 2'-O-methylguanosine-3'-phosphate
  modified_base 6: mod_base = OTHER; note = 2'-fluorouridine-3'-phosphate
  modified_base 7: mod_base = OTHER; note = 2'-O-methylguanosine-3'-phosphate
  modified_base 8: mod_base = OTHER; note = 2'-O-methyluridine-3'-phosphate
  modified_base 9: mod_base = OTHER; note = 2'-O-methyluridine-3'-phosphate
  modified_base 10: mod_base = OTHER; note = 2'-O-methylguanosine-3'-phosphate
  modified_base 11: mod_base = OTHER; note = 2'-fluorocytidine-3'-phosphate
  modified_base 12: mod_base = OTHER; note = 2'-fluorouridine-3'-phosphate
  modified_base 13: mod_base = OTHER; note = 2'-O-methyladenosine-3'-phosphate
  modified_base 14: mod_base = OTHER; note = 2'-fluoroguanosine-3'-phosphate
  modified_base 15: mod_base = OTHER; note = 2'-O-methylcytidine-3'-phosphate
  modified_base 16: mod_base = OTHER; note = 2'-fluoroadenosine-3'-phosphate
  modified_base 17: mod_base = OTHER; note = 2'-O-methylcytidine-3'-phosphate
  modified_base 18: mod_base = OTHER; note = 2'-fluoroadenosine-3'-phosphate
  modified_base 19: mod_base = OTHER; note = 2'-O-methylguanosine-3'-phosphorothioate
  modified_base 20: mod_base = OTHER; note = 2'-fluorocytidine-3'-phosphorothioate
  modified_base 21: mod_base = OTHER; note = 2'-O-methylcytidine
ttgggtgttgctagcacagcc

SEQ ID NO: 1512 - DNA, 19 bp, synthetic construct
  source 1..19: mol_type = other DNA
  modified_base 1: mod_base = OTHER; note = 2'-O-methylcytidine-3'-phosphate
  modified_base 2: mod_base = OTHER; note = 2'-O-methyluridine-3'-phosphate
  modified_base 3: mod_base = OTHER; note = 2'-fluoroguanosine-3'-phosphate
  modified_base 4: mod_base = OTHER; note = 2'-O-methyluridine-3'-phosphate
  modified_base 5: mod_base = OTHER; note = 2'-fluoroguanosine-3'-phosphate
  modified_base 6: mod_base = OTHER; note = 2'-O-methylcytidine-3'-phosphate
  modified_base 7: mod_base = OTHER; note = 2'-O-methyluridine-3'-phosphate
  modified_base 8: mod_base = OTHER; note = 2'-fluoroadenosine-3'-phosphate
  modified_base 9: mod_base = OTHER; note = 2'-fluoroguanosine-3'-phosphate
  modified_base 10: mod_base = OTHER; note = 2'-O-methylcytidine-3'-phosphate
  modified_base 12: mod_base = OTHER; note = 2'-fluoroadenosine-3'-phosphate
  modified_base 13: mod_base = OTHER; note = 2'-O-methylcytidine-3'-phosphate
  modified_base 14: mod_base = OTHER; note = 2'-O-methyladenosine-3'-phosphate
  modified_base 15: mod_base = OTHER; note = 2'-O-methylcytidine-3'-phosphate
  modified_base 16: mod_base = OTHER; note = 2'-O-methylcytidine-3'-phosphate
  modified_base 17: mod_base = OTHER; note = 2'-O-methylcytidine-3'-phosphate
  modified_base 18: mod_base = OTHER; note = 2'-O-methyladenosine-3'-phosphate
  modified_base 19: mod_base = OTHER; note = 2'-O-methyladenosine
  misc_feature 1..10: note = RNA
  misc_feature 11: note = DNA
  misc_feature 12..19: note = RNA
ctgtgctagcaacacccaa

SEQ ID NO: 1513 - RNA, 21 nt, synthetic construct
  source 1..21: mol_type = other RNA
  modified_base 1: mod_base = OTHER; note = 2'-O-methyluridine-3'-phosphorothioate
  modified_base 2: mod_base = OTHER; note = 2'-fluorouridine-3'-phosphorothioate
  modified_base 3: mod_base = OTHER; note = 2'-O-methylguanosine
  modified_base 4: mod_base = OTHER; note = 2'-fluoroguanosine
  modified_base 5: mod_base = OTHER; note = 2'-O-methylguanosine
  modified_base 6: mod_base = OTHER; note = 2'-fluorouridine
  modified_base 7: mod_base = OTHER; note = 2'-O-methylguanosine
  modified_base 8: mod_base = OTHER; note = 2'-O-methyluridine
  modified_base 9: mod_base = OTHER; note = 2'-O-methyluridine
  modified_base 10: mod_base = OTHER; note = 2'-O-methylguanosine
  modified_base 11: mod_base = OTHER; note = 2'-fluorocytidine
  modified_base 12: mod_base = OTHER; note = 2'-fluorouridine
  modified_base 13: mod_base = OTHER; note = 2'-O-methyladenosine
  modified_base 14: mod_base = OTHER; note = 2'-O-methoxyethyl(MOE) guanosine
  modified_base 15: mod_base = OTHER; note = 2'-O-methylcytidine
  modified_base 16: mod_base = OTHER; note = 2'-fluoroadenosine
  modified_base 17: mod_base = OTHER; note = 2'-O-methylcytidine
  modified_base 18: mod_base = OTHER; note = 2'-fluoroadenosine
  modified_base 19: mod_base = OTHER; note = 2'-O-methylguanosine-3'-phosphorothioate
  modified_base 20: mod_base = OTHER; note = 2'-fluorocytidine-3'-phosphorothioate
  modified_base 21: mod_base = OTHER; note = 2'-O-methylcytidine
ttgggtgttgctagcacagcc

SEQ ID NO: 1514 - DNA, 19 bp, synthetic construct
  source 1..19: mol_type = other DNA
  modified_base 1: mod_base = OTHER; note = 2'-O-methylcytidine-3'-phosphate
  modified_base 2: mod_base = OTHER; note = 2'-O-methyluridine-3'-phosphate
  modified_base 3: mod_base = OTHER; note = 2'-fluoroguanosine-3'-phosphate
  modified_base 4: mod_base = OTHER; note = 2'-O-methyluridine-3'-phosphate
  modified_base 5: mod_base = OTHER; note = 2'-fluoroguanosine-3'-phosphate
  modified_base 6: mod_base = OTHER; note = 2'-O-methylcytidine-3'-phosphate
  modified_base 7: mod_base = OTHER; note = 2'-O-methyluridine-3'-phosphate
  modified_base 8: mod_base = OTHER; note = 2'-fluoroadenosine-3'-phosphate
  modified_base 9: mod_base = OTHER; note = 2'-fluoroguanosine-3'-phosphate
  modified_base 10: mod_base = OTHER; note = 2'-O-methylcytidine-3'-phosphate
  modified_base 12: mod_base = OTHER; note = 2'-fluoroadenosine-3'-phosphate
  modified_base 13: mod_base = OTHER; note = 2'-O-methylcytidine-3'-phosphate
  modified_base 14: mod_base = OTHER; note = 2'-O-methyladenosine-3'-phosphate
  modified_base 15: mod_base = OTHER; note = 2'-O-methylcytidine-3'-phosphate
  modified_base 16: mod_base = OTHER; note = 2'-O-methylcytidine-3'-phosphate
  modified_base 17: mod_base = OTHER; note = 2'-O-methylcytidine-3'-phosphate
  modified_base 18: mod_base = OTHER; note = 2'-O-methyladenosine-3'-phosphate
  modified_base 19: mod_base = OTHER; note = 2'-O-methyladenosine
  misc_feature 1..10: note = RNA
  misc_feature 11: note = DNA
  misc_feature 12..19: note = RNA
ctgtgctagcaacacccaa

SEQ ID NO: 1515 - RNA, 21 nt, synthetic construct
  source 1..21: mol_type = other RNA
  modified_base 1: mod_base = OTHER; note = 2'-O-methyluridine-3'-phosphorothioate
  modified_base 2: mod_base = OTHER; note = 2'-fluorouridine-3'-phosphorothioate
  modified_base 3: mod_base = OTHER; note = 2'-O-methylguanosine-3'-phosphate
  modified_base 4: mod_base = OTHER; note = 2'-fluoroguanosine-3'-phosphate
  modified_base 5: mod_base = OTHER; note = 2'-O-methylguanosine-3'-phosphate
  modified_base 6: mod_base = OTHER; note = 2'-fluorouridine-3'-phosphate
  modified_base 7: mod_base = OTHER; note = 2'-O-methylguanosine-3'-phosphate
  modified_base 8: mod_base = OTHER; note = 2'-O-methyluridine-3'-phosphate
  modified_base 9: mod_base = OTHER; note = 2'-O-methyluridine-3'-phosphate
  modified_base 10: mod_base = OTHER; note = 2'-O-methylguanosine-3'-phosphate
  modified_base 11: mod_base = OTHER; note = 2'-fluorocytidine-3'-phosphate
  modified_base 12: mod_base = OTHER; note = 2'-fluorouridine-3'-phosphate
  modified_base 13: mod_base = OTHER; note = 2'-O-methyladenosine-3'-phosphate
  modified_base 14: mod_base = OTHER; note = 2'-fluoroguanosine-3'-phosphate
  modified_base 15: mod_base = OTHER; note = 2'-O-methylcytidine-3'-phosphate
  modified_base 16: mod_base = OTHER; note = 2'-fluoroadenosine-3'-phosphate
  modified_base 17: mod_base = OTHER; note = 2'-O-methylcytidine-3'-phosphate
  modified_base 18: mod_base = OTHER; note = 2'-fluoroadenosine-3'-phosphate
  modified_base 19: mod_base = OTHER; note = 2'-O-methylguanosine-3'-phosphorothioate
  modified_base 20: mod_base = OTHER; note = 2'-fluorocytidine-3'-phosphorothioate
  modified_base 21: mod_base = OTHER; note = 2'-O-methylcytidine
ttgggtgttgctagcacagcc

SEQ ID NO: 1516 - DNA, 19 bp, synthetic construct
  source 1..19: mol_type = other DNA
  modified_base 1: mod_base = OTHER; note = 2'-O-methylcytidine-3'-phosphate
  modified_base 2: mod_base = OTHER; note = 2'-O-methyluridine-3'-phosphate
  modified_base 3: mod_base = OTHER; note = 2'-fluoroguanosine-3'-phosphate
  modified_base 4: mod_base = OTHER; note = 2'-O-methyluridine-3'-phosphate
  modified_base 5: mod_base = OTHER; note = 2'-fluoroguanosine-3'-phosphate
  modified_base 6: mod_base = OTHER; note = 2'-O-methylcytidine-3'-phosphate
  modified_base 7: mod_base = OTHER; note = 2'-O-methyluridine-3'-phosphate
  modified_base 8: mod_base = OTHER; note = 2'-fluoroadenosine-3'-phosphate
  modified_base 9: mod_base = OTHER; note = 2'-fluoroguanosine-3'-phosphate
  modified_base 10: mod_base = OTHER; note = 2'-O-methylcytidine-3'-phosphate
  modified_base 12: mod_base = OTHER; note = 2'-fluoroadenosine-3'-phosphate
  modified_base 13: mod_base = OTHER; note = 2'-O-methylcytidine-3'-phosphate
  modified_base 14: mod_base = OTHER; note = 2'-O-methyladenosine-3'-phosphate
  modified_base 15: mod_base = OTHER; note = 2'-O-methylcytidine-3'-phosphate
  modified_base 16: mod_base = OTHER; note = 2'-O-methylcytidine-3'-phosphate
  modified_base 17: mod_base = OTHER; note = 2'-O-methylcytidine-3'-phosphate
  modified_base 18: mod_base = OTHER; note = 2'-O-methyladenosine-3'-phosphate
  modified_base 19: mod_base = OTHER; note = 2'-O-methyladenosine
  misc_feature 1..10: note = RNA
  misc_feature 11: note = DNA
  misc_feature 12..19: note = RNA
ctgtgctagcaacacccaa

SEQ ID NO: 1517 - RNA, 21 nt, synthetic construct
  source 1..21: mol_type = other RNA
  modified_base 1: mod_base = OTHER; note = 2'-O-methyluridine-3'-phosphorothioate
  modified_base 2: mod_base = OTHER; note = 2'-fluorouridine-3'-phosphate
  modified_base 3: mod_base = OTHER; note = 2'-O-methylguanosine-3'-phosphate
  modified_base 4: mod_base = OTHER; note = 2'-fluoroguanosine-3'-phosphate
  modified_base 5: mod_base = OTHER; note = 2'-O-methylguanosine-3'-phosphate
  modified_base 6: mod_base = OTHER; note = 2'-fluorouridine-3'-phosphate
  modified_base 7: mod_base = OTHER; note = 2'-O-methylguanosine-3'-phosphate
  modified_base 8: mod_base = OTHER; note = 2'-O-methyluridine-3'-phosphate
  modified_base 9: mod_base = OTHER; note = 2'-O-methyluridine-3'-phosphate
  modified_base 10: mod_base = OTHER; note = 2'-O-methylguanosine-3'-phosphate
  modified_base 11: mod_base = OTHER; note = 2'-fluorocytidine-3'-phosphate
  modified_base 12: mod_base = OTHER; note = 2'-fluorouridine-3'-phosphate
  modified_base 13: mod_base = OTHER; note = 2'-O-methyladenosine-3'-phosphate
  modified_base 14: mod_base = OTHER; note = 2'-fluoroguanosine-3'-phosphate
  modified_base 15: mod_base = OTHER; note = 2'-O-methylcytidine-3'-phosphate
  modified_base 16: mod_base = OTHER; note = 2'-fluoroadenosine-3'-phosphate
  modified_base 17: mod_base = OTHER; note = 2'-O-methylcytidine-3'-phosphate
  modified_base 18: mod_base = OTHER; note = 2'-fluoroadenosine-3'-phosphate
  modified_base 19: mod_base = OTHER; note = 2'-O-methylguanosine-3'-phosphorothioate
  modified_base 20: mod_base = OTHER; note = 2'-fluorocytidine-3'-phosphorothioate
  modified_base 21: mod_base = OTHER; note = 2'-O-methylcytidine
ttgggtgttgctagcacagcc

SEQ ID NO: 1518 - DNA, 19 bp, synthetic construct
  source 1..19: mol_type = other DNA
  modified_base 1: mod_base = OTHER; note = 2'-O-methylcytidine-3'-phosphate
  modified_base 2: mod_base = OTHER; note = 2'-O-methyluridine-3'-phosphate
  modified_base 3: mod_base = OTHER; note = 2'-fluoroguanosine-3'-phosphate
  modified_base 4: mod_base = OTHER; note = 2'-O-methyluridine-3'-phosphate
  modified_base 5: mod_base = OTHER; note = 2'-fluoroguanosine-3'-phosphate
  modified_base 6: mod_base = OTHER; note = 2'-O-methylcytidine-3'-phosphate
  modified_base 7: mod_base = OTHER; note = 2'-O-methyluridine-3'-phosphate
  modified_base 8: mod_base = OTHER; note = 2'-fluoroadenosine-3'-phosphate
  modified_base 9: mod_base = OTHER; note = 2'-fluoroguanosine-3'-phosphate
  modified_base 10: mod_base = OTHER; note = 2'-O-methylcytidine-3'-phosphate
  modified_base 12: mod_base = OTHER; note = 2'-fluoroadenosine-3'-phosphate
  modified_base 13: mod_base = OTHER; note = 2'-O-methylcytidine-3'-phosphate
  modified_base 14: mod_base = OTHER; note = 2'-O-methyladenosine-3'-phosphate
  modified_base 15: mod_base = OTHER; note = 2'-O-methylcytidine-3'-phosphate
  modified_base 16: mod_base = OTHER; note = 2'-O-methylcytidine-3'-phosphate
  modified_base 17: mod_base = OTHER; note = 2'-O-methylcytidine-3'-phosphate
  modified_base 18: mod_base = OTHER; note = 2'-O-methyladenosine-3'-phosphate
  modified_base 19: mod_base = OTHER; note = 2'-O-methyladenosine
  misc_feature 1..10: note = RNA
  misc_feature 11: note = DNA
  misc_feature 12..19: note = RNA
ctgtgctagcaacacccaa

SEQ ID NO: 1519 - RNA, 21 nt, synthetic construct
  source 1..21: mol_type = other RNA
  modified_base 1: mod_base = OTHER; note = 2'-O-methyluridine-3'-phosphorothioate
  modified_base 2: mod_base = OTHER; note = 2'-fluorouridine-3'-phosphate
  modified_base 3: mod_base = OTHER; note = 2'-O-methylguanosine-3'-phosphate
  modified_base 4: mod_base = OTHER; note = 2'-fluoroguanosine-3'-phosphate
  modified_base 5: mod_base = OTHER; note = 2'-O-methylguanosine-3'-phosphate
  modified_base 6: mod_base = OTHER; note = 2'-fluorouridine-3'-phosphate
  modified_base 7: mod_base = OTHER; note = 2'-O-methylguanosine-3'-phosphate
  modified_base 8: mod_base = OTHER; note = 2'-O-methyluridine-3'-phosphate
  modified_base 9: mod_base = OTHER; note = 2'-O-methyluridine-3'-phosphate
  modified_base 10: mod_base = OTHER; note = 2'-O-methylguanosine-3'-phosphate
  modified_base 11: mod_base = OTHER; note = 2'-fluorocytidine-3'-phosphate
  modified_base 12: mod_base = OTHER; note = 2'-fluorouridine-3'-phosphate
  modified_base 13: mod_base = OTHER; note = 2'-O-methyladenosine-3'-phosphate
  modified_base 14: mod_base = OTHER; note = 2'-fluoroguanosine-3'-phosphate
  modified_base 15: mod_base = OTHER; note = 2'-O-methylcytidine-3'-phosphate
  modified_base 16: mod_base = OTHER; note = 2'-fluoroadenosine-3'-phosphate
  modified_base 17: mod_base = OTHER; note = 2'-O-methylcytidine-3'-phosphate
  modified_base 18: mod_base = OTHER; note = 2'-fluoroadenosine-3'-phosphate
  modified_base 19: mod_base = OTHER; note = 2'-O-methylguanosine-3'-phosphate
  modified_base 20: mod_base = OTHER; note = 2'-fluorocytidine-3'-phosphorothioate
  modified_base 21: mod_base = OTHER; note = 2'-O-methylcytidine
ttgggtgttgctagcacagcc

SEQ ID NO: 1520 - DNA, 19 bp, synthetic construct
  source 1..19: mol_type = other DNA
  misc_feature 1..10: note = RNA
  misc_feature 11: note = DNA
  misc_feature 12..19: note = RNA
ctgtgctagcaacacccaa

SEQ ID NO: 1521 - RNA, 21 nt, synthetic construct
  source 1..21: mol_type = other RNA
  modified_base 1: mod_base = OTHER; note = 2'-fluorouridine-3'-phosphate
  modified_base 2: mod_base = OTHER; note = 2'-fluorouridine-3'-phosphate
  modified_base 3: mod_base = OTHER; note = 2'-fluoroguanosine-3'-phosphate
  modified_base 4: mod_base = OTHER; note = 2'-O-methylguanosine-3'-phosphate
  modified_base 5: mod_base = OTHER; note = 2'-fluoroguanosine-3'-phosphate
  modified_base 6: mod_base = OTHER; note = 2'-O-methyluridine-3'-phosphate
  modified_base 7: mod_base = OTHER; note = 2'-fluoroguanosine-3'-phosphate
  modified_base 8: mod_base = OTHER; note = 2'-O-methyluridine-3'-phosphate
  modified_base 9: mod_base = OTHER; note = 2'-O-methyluridine-3'-phosphate
  modified_base 10: mod_base = OTHER; note = 2'-O-methylguanosine-3'-phosphate
  modified_base 11: mod_base = OTHER; note = 2'-fluorocytidine-3'-phosphate
  modified_base 12: mod_base = OTHER; note = 2'-O-methyluridine-3'-phosphate
  modified_base 13: mod_base = OTHER; note = 2'-fluoroadenosine-3'-phosphate
  modified_base 14: mod_base = OTHER; note = 2'-fluoroguanosine-3'-phosphate
  modified_base 15: mod_base = OTHER; note = 2'-fluorocytidine-3'-phosphate
  modified_base 16: mod_base = OTHER; note = 2'-O-methyladenosine-3'-phosphate
  modified_base 17: mod_base = OTHER; note = 2'-fluorocytidine-3'-phosphate
  modified_base 18: mod_base = OTHER; note = 2'-O-methyladenosine-3'-phosphate
  modified_base 19: mod_base = OTHER; note = 2'-fluoroguanosine-3'-phosphate
  modified_base 20: mod_base = OTHER; note = 2'-O-methylcytidine-3'-phosphate
  modified_base 21: mod_base = OTHER; note = 2'-fluorocytidine
ttgggtgttgctagcacagcc

SEQ ID NO: 1522 - DNA, 19 bp, synthetic construct
  source 1..19: mol_type = other DNA
  misc_feature 1..10: note = RNA
  misc_feature 11: note = DNA
  misc_feature 12..19: note = RNA
ctgtgctagcaacacccaa

SEQ ID NO: 1523 - RNA, 21 nt, synthetic construct
  source 1..21: mol_type = other RNA
  modified_base 1: mod_base = OTHER; note = 2'-O-methyluridine
  modified_base 2: mod_base = OTHER; note = 2'-fluorouridine
  modified_base 3: mod_base = OTHER; note = 2'-fluoroguanosine
  modified_base 4: mod_base = OTHER; note = 2'-O-methylguanosine
  modified_base 5: mod_base = OTHER; note = 2'-fluoroguanosine
  modified_base 6: mod_base = OTHER; note = 2'-O-methyluridine
  modified_base 7: mod_base = OTHER; note = 2'-fluoroguanosine
  modified_base 8: mod_base = OTHER; note = 2'-O-methyluridine
  modified_base 9: mod_base = OTHER; note = 2'-O-methyluridine
  modified_base 10: mod_base = OTHER; note = 2'-O-methylguanosine
  modified_base 11: mod_base = OTHER; note = 2'-fluorocytidine
  modified_base 12: mod_base = OTHER; note = 2'-O-methyluridine
  modified_base 13: mod_base = OTHER; note = 2'-fluoroadenosine
  modified_base 14: mod_base = OTHER; note = 2'-fluoroguanosine
  modified_base 15: mod_base = OTHER; note = 2'-fluorocytidine
  modified_base 16: mod_base = OTHER; note = 2'-O-methyladenosine
  modified_base 17: mod_base = OTHER; note = 2'-fluorocytidine
  modified_base 18: mod_base = OTHER; note = 2'-O-methyladenosine
  modified_base 19: mod_base = OTHER; note = 2'-fluoroguanosine
  modified_base 20: mod_base = OTHER; note = 2'-O-methylcytidine
  modified_base 21: mod_base = OTHER; note = 2'-fluorocytidine
ttgggtgttgctagcacagcc

SEQ ID NO: 1524 - DNA, 19 bp, synthetic construct
  source 1..19: mol_type = other DNA
  misc_feature 1..10: note = RNA
  misc_feature 11: note = DNA
  misc_feature 12..19: note = RNA
ctgtgctagcaacacccaa

SEQ ID NO: 1525 - RNA, 21 nt, synthetic construct
  source 1..21: mol_type = other RNA
  modified_base 1: mod_base = OTHER; note = 2'-fluorouridine-3'-phosphate
  modified_base 2: mod_base = OTHER; note = 2'-O-methyluridine-3'-phosphate
  modified_base 3: mod_base = OTHER; note = 2'-fluoroguanosine-3'-phosphate
  modified_base 4: mod_base = OTHER; note = 2'-O-methylguanosine-3'-phosphate
  modified_base 5: mod_base = OTHER; note = 2'-fluoroguanosine-3'-phosphate
  modified_base 6: mod_base = OTHER; note = 2'-O-methyluridine-3'-phosphate
  modified_base 7: mod_base = OTHER; note = 2'-fluoroguanosine-3'-phosphate
  modified_base 8: mod_base = OTHER; note = 2'-O-methyluridine-3'-phosphate
  modified_base 9: mod_base = OTHER; note = 2'-O-methyluridine-3'-phosphate
  modified_base 10: mod_base = OTHER; note = 2'-O-methylguanosine-3'-phosphate
  modified_base 11: mod_base = OTHER; note = 2'-fluorocytidine-3'-phosphate
  modified_base 12: mod_base = OTHER; note = 2'-O-methyluridine-3'-phosphate
  modified_base 13: mod_base = OTHER; note = 2'-fluoroadenosine-3'-phosphate
  modified_base 14: mod_base = OTHER; note = 2'-fluoroguanosine-3'-phosphate
  modified_base 15: mod_base = OTHER; note = 2'-fluorocytidine-3'-phosphate
  modified_base 16: mod_base = OTHER; note = 2'-O-methyladenosine-3'-phosphate
  modified_base 17: mod_base = OTHER; note = 2'-fluorocytidine-3'-phosphate
  modified_base 18: mod_base = OTHER; note = 2'-O-methyladenosine-3'-phosphate
  modified_base 19: mod_base = OTHER; note = 2'-fluoroguanosine-3'-phosphate
  modified_base 20: mod_base = OTHER; note = 2'-O-methylcytidine-3'-phosphate
  modified_base 21: mod_base = OTHER; note = 2'-fluorocytidine
ttgggtgttgctagcacagcc

SEQ ID NO: 1526 - DNA, 19 bp, synthetic construct
  source 1..19: mol_type = other DNA
  misc_feature 1..10: note = RNA
  misc_feature 11: note = DNA
  misc_feature 12..19: note = RNA
ctgtgctagcaacacccaa

SEQ ID NO: 1527 - RNA, 21 nt, synthetic construct
  source 1..21: mol_type = other RNA
  modified_base 1: mod_base = OTHER; note = 2'-fluorouridine-3'-phosphate
  modified_base 2: mod_base = OTHER; note = 2'-fluorouridine-3'-phosphate
  modified_base 3: mod_base = OTHER; note = 2'-O-methylguanosine-3'-phosphate
  modified_base 4: mod_base = OTHER; note = 2'-O-methylguanosine-3'-phosphate
  modified_base 5: mod_base = OTHER; note = 2'-fluoroguanosine-3'-phosphate
  modified_base 6: mod_base = OTHER; note = 2'-O-methyluridine-3'-phosphate
  modified_base 7: mod_base = OTHER; note = 2'-fluoroguanosine-3'-phosphate
  modified_base 8: mod_base = OTHER; note = 2'-O-methyluridine-3'-phosphate
  modified_base 9: mod_base = OTHER; note = 2'-O-methyluridine-3'-phosphate
  modified_base 10: mod_base = OTHER; note = 2'-O-methylguanosine-3'-phosphate
  modified_base 11: mod_base = OTHER; note = 2'-fluorocytidine-3'-phosphate
  modified_base 12: mod_base = OTHER; note = 2'-O-methyluridine-3'-phosphate
  modified_base 13: mod_base = OTHER; note = 2'-fluoroadenosine-3'-phosphate
  modified_base 14: mod_base = OTHER; note = 2'-fluoroguanosine-3'-phosphate
  modified_base 15: mod_base = OTHER; note = 2'-fluorocytidine-3'-phosphate
  modified_base 16: mod_base = OTHER; note = 2'-O-methyladenosine-3'-phosphate
  modified_base 17: mod_base = OTHER; note = 2'-fluorocytidine-3'-phosphate
  modified_base 18: mod_base = OTHER; note = 2'-O-methyladenosine-3'-phosphate
  modified_base 19: mod_base = OTHER; note = 2'-fluoroguanosine-3'-phosphate
  modified_base 20: mod_base = OTHER; note = 2'-O-methylcytidine-3'-phosphate
  modified_base 21: mod_base = OTHER; note = 2'-fluorocytidine
ttgggtgttgctagcacagcc

SEQ ID NO: 1528 - DNA, 19 bp, synthetic construct
  source 1..19: mol_type = other DNA
  misc_feature 1..10: note = RNA
  misc_feature 11: note = DNA
  misc_feature 12..19: note = RNA
ctgtgctagcaacacccaa

SEQ ID NO: 1529 - RNA, 21 nt, synthetic construct
  source 1..21: mol_type = other RNA
  modified_base 1: mod_base = OTHER; note = 2'-fluorouridine-3'-phosphate
  modified_base 2: mod_base = OTHER; note = 2'-fluorouridine-3'-phosphate
  modified_base 3: mod_base = OTHER; note = 2'-fluoroguanosine-3'-phosphate
  modified_base 4: mod_base = OTHER; note = 2'-O-methylguanosine-3'-phosphate
  modified_base 5: mod_base = OTHER; note = 2'-O-methylguanosine-3'-phosphate
  modified_base 6: mod_base = OTHER; note = 2'-O-methyluridine-3'-phosphate
  modified_base 7: mod_base = OTHER; note = 2'-fluoroguanosine-3'-phosphate
  modified_base 8: mod_base = OTHER; note = 2'-O-methyluridine-3'-phosphate
  modified_base 9: mod_base = OTHER; note = 2'-O-methyluridine-3'-phosphate
  modified_base 10: mod_base = OTHER; note = 2'-O-methylguanosine-3'-phosphate
  modified_base 11: mod_base = OTHER; note = 2'-fluorocytidine-3'-phosphate
  modified_base 12: mod_base = OTHER; note = 2'-O-methyluridine-3'-phosphate
  modified_base 13: mod_base = OTHER; note = 2'-fluoroadenosine-3'-phosphate
  modified_base 14: mod_base = OTHER; note = 2'-fluoroguanosine-3'-phosphate
  modified_base 15: mod_base = OTHER; note = 2'-fluorocytidine-3'-phosphate
  modified_base 16: mod_base = OTHER; note = 2'-O-methyladenosine-3'-phosphate
  modified_base 17: mod_base = OTHER; note = 2'-fluorocytidine-3'-phosphate
  modified_base 18: mod_base = OTHER; note = 2'-O-methyladenosine-3'-phosphate
  modified_base 19: mod_base = OTHER; note = 2'-fluoroguanosine-3'-phosphate
  modified_base 20: mod_base = OTHER; note = 2'-O-methylcytidine-3'-phosphate
  modified_base 21: mod_base = OTHER; note = 2'-fluorocytidine
ttgggtgttgctagcacagcc

SEQ ID NO: 1530 - DNA, 19 bp, synthetic construct
  source 1..19: mol_type = other DNA
  misc_feature 1..10: note = RNA
  misc_feature 11: note = DNA
  misc_feature 12..19: note = RNA
ctgtgctagcaacacccaa

SEQ ID NO: 1531 - RNA, 21 nt, synthetic construct
  source 1..21: mol_type = other RNA
  modified_base 1: mod_base = OTHER; note = 2'-fluorouridine-3'-phosphate
  modified_base 2: mod_base = OTHER; note = 2'-fluorouridine-3'-phosphate
  modified_base 3: mod_base = OTHER; note = 2'-fluoroguanosine-3'-phosphate
  modified_base 4: mod_base = OTHER; note = 2'-O-methylguanosine-3'-phosphate
  modified_base 5: mod_base = OTHER; note = 2'-fluoroguanosine-3'-phosphate
  modified_base 6: mod_base = OTHER; note = 2'-O-methyluridine-3'-phosphate
  modified_base 7: mod_base = OTHER; note = 2'-O-methylguanosine-3'-phosphate
  modified_base 8: mod_base = OTHER; note = 2'-O-methyluridine-3'-phosphate
  modified_base 9: mod_base = OTHER; note = 2'-O-methyluridine-3'-phosphate
  modified_base 10: mod_base = OTHER; note = 2'-O-methylguanosine-3'-phosphate
  modified_base 11: mod_base = OTHER; note = 2'-fluorocytidine-3'-phosphate
  modified_base 12: mod_base = OTHER; note = 2'-O-methyluridine-3'-phosphate
  modified_base 13: mod_base = OTHER; note = 2'-fluoroadenosine-3'-phosphate
  modified_base 14: mod_base = OTHER; note = 2'-fluoroguanosine-3'-phosphate
  modified_base 15: mod_base = OTHER; note = 2'-fluorocytidine-3'-phosphate
  modified_base 16: mod_base = OTHER; note = 2'-O-methyladenosine-3'-phosphate
  modified_base 17: mod_base = OTHER; note = 2'-fluorocytidine-3'-phosphate
  modified_base 18: mod_base = OTHER; note = 2'-O-methyladenosine-3'-phosphate
  modified_base 19: mod_base = OTHER; note = 2'-fluoroguanosine-3'-phosphate
  modified_base 20: mod_base = OTHER; note = 2'-O-methylcytidine-3'-phosphate
  modified_base 21: mod_base = OTHER; note = 2'-fluorocytidine
ttgggtgttgctagcacagcc

SEQ ID NO: 1532 - DNA, 19 bp, synthetic construct
  source 1..19: mol_type = other DNA
  misc_feature 1..10: note = RNA
  misc_feature 11: note = DNA
  misc_feature 12..19: note = RNA
ctgtgctagcaacacccaa

SEQ ID NO: 1533 - RNA, 21 nt, synthetic construct
  source 1..21: mol_type = other RNA
  modified_base 1: mod_base = OTHER; note = 2'-fluorouridine-3'-phosphate
  modified_base 2: mod_base = OTHER; note = 2'-fluorouridine-3'-phosphate
  modified_base 3: mod_base = OTHER; note = 2'-fluoroguanosine-3'-phosphate
  modified_base 4: mod_base = OTHER; note = 2'-O-methylguanosine-3'-phosphate
  modified_base 5: mod_base = OTHER; note = 2'-fluoroguanosine-3'-phosphate
  modified_base 6: mod_base = OTHER; note = 2'-O-methyluridine-3'-phosphate
  modified_base 7: mod_base = OTHER; note = 2'-fluoroguanosine-3'-phosphate
  modified_base 8: mod_base = OTHER; note = 2'-O-methyluridine-3'-phosphate
  modified_base 9: mod_base = OTHER; note = 2'-O-methyluridine-3'-phosphate
  modified_base 10: mod_base = OTHER; note = 2'-O-methylguanosine-3'-phosphate
  modified_base 11: mod_base = OTHER; note = 2'-O-methylcytidine-3'-phosphate
  modified_base 12: mod_base = OTHER; note = 2'-O-methyluridine-3'-phosphate
  modified_base 13: mod_base = OTHER; note = 2'-fluoroadenosine-3'-phosphate
  modified_base 14: mod_base = OTHER; note = 2'-fluoroguanosine-3'-phosphate
  modified_base 15: mod_base = OTHER; note = 2'-fluorocytidine-3'-phosphate
  modified_base 16: mod_base = OTHER; note = 2'-O-methyladenosine-3'-phosphate
  modified_base 17: mod_base = OTHER; note = 2'-fluorocytidine-3'-phosphate
  modified_base 18: mod_base = OTHER; note = 2'-O-methyladenosine-3'-phosphate
  modified_base 19: mod_base = OTHER; note = 2'-fluoroguanosine-3'-phosphate
  modified_base 20: mod_base = OTHER; note = 2'-O-methylcytidine-3'-phosphate
  modified_base 21: mod_base = OTHER; note = 2'-fluorocytidine
ttgggtgttgctagcacagcc

SEQ ID NO: 1534 - DNA, 19 bp, synthetic construct
  source 1..19: mol_type = other DNA
  misc_feature 1..10: note = RNA
  misc_feature 11: note = DNA
  misc_feature 12..19: note = RNA
ctgtgctagcaacacccaa

SEQ ID NO: 1535 - RNA, 21 nt, synthetic construct
  source 1..21: mol_type = other RNA
  modified_base 1: mod_base = OTHER; note = 2'-fluorouridine-3'-phosphate
  modified_base 2: mod_base = OTHER; note = 2'-fluorouridine-3'-phosphate
  modified_base 3: mod_base = OTHER; note = 2'-fluoroguanosine-3'-phosphate
  modified_base 4: mod_base = OTHER; note = 2'-O-methylguanosine-3'-phosphate
  modified_base 5: mod_base = OTHER; note = 2'-fluoroguanosine-3'-phosphate
  modified_base 6: mod_base = OTHER; note = 2'-O-methyluridine-3'-phosphate
  modified_base 7: mod_base = OTHER; note = 2'-fluoroguanosine-3'-phosphate
  modified_base 8: mod_base = OTHER; note = 2'-O-methyluridine-3'-phosphate
  modified_base 9: mod_base = OTHER; note = 2'-O-methyluridine-3'-phosphate
  modified_base 10: mod_base = OTHER; note = 2'-O-methylguanosine-3'-phosphate
  modified_base 11: mod_base = OTHER; note = 2'-fluorocytidine-3'-phosphate
  modified_base 12: mod_base = OTHER; note = 2'-O-methyluridine-3'-phosphate
  modified_base 13: mod_base = OTHER; note = 2'-O-methyladenosine-3'-phosphate
  modified_base 14: mod_base = OTHER; note = 2'-fluoroguanosine-3'-phosphate
  modified_base 15: mod_base = OTHER; note = 2'-fluorocytidine-3'-phosphate
  modified_base 16: mod_base = OTHER; note = 2'-O-methyladenosine-3'-phosphate
  modified_base 17: mod_base = OTHER; note = 2'-fluorocytidine-3'-phosphate
  modified_base 18: mod_base = OTHER; note = 2'-O-methyladenosine-3'-phosphate
  modified_base 19: mod_base = OTHER; note = 2'-fluoroguanosine-3'-phosphate
  modified_base 20: mod_base = OTHER; note = 2'-O-methylcytidine-3'-phosphate
  modified_base 21: mod_base = OTHER; note = 2'-fluorocytidine
ttgggtgttgctagcacagcc

SEQ ID NO: 1536 - DNA, 19 bp, synthetic construct
  source 1..19: mol_type = other DNA
  misc_feature 1..10: note = RNA
  misc_feature 11: note = DNA
  misc_feature 12..19: note = RNA
ctgtgctagcaacacccaa

SEQ ID NO: 1537 - RNA, 21 nt, synthetic construct
  source 1..21: mol_type = other RNA
  modified_base 1: mod_base = OTHER; note = 2'-fluorouridine-3'-phosphate
  modified_base 2: mod_base = OTHER; note = 2'-fluorouridine-3'-phosphate
  modified_base 3: mod_base = OTHER; note = 2'-fluoroguanosine-3'-phosphate
  modified_base 4: mod_base = OTHER; note = 2'-O-methylguanosine-3'-phosphate
  modified_base 5: mod_base = OTHER; note = 2'-fluoroguanosine-3'-phosphate
  modified_base 6: mod_base = OTHER; note = 2'-O-methyluridine-3'-phosphate
  modified_base 7: mod_base = OTHER; note = 2'-fluoroguanosine-3'-phosphate
  modified_base 8: mod_base = OTHER; note = 2'-O-methyluridine-3'-phosphate
  modified_base 9: mod_base = OTHER; note = 2'-O-methyluridine-3'-phosphate
  modified_base 10: mod_base = OTHER; note = 2'-O-methylguanosine-3'-phosphate
  modified_base 11: mod_base = OTHER; note = 2'-fluorocytidine-3'-phosphate
  modified_base 12: mod_base = OTHER; note = 2'-O-methyluridine-3'-phosphate
  modified_base 13: mod_base = OTHER; note = 2'-fluoroadenosine-3'-phosphate
  modified_base 14: mod_base = OTHER; note = 2'-O-methylguanosine-3'-phosphate
  modified_base 15: mod_base = OTHER; note = 2'-fluorocytidine-3'-phosphate
  modified_base 16: mod_base = OTHER; note = 2'-O-methyladenosine-3'-phosphate
  modified_base 17: mod_base = OTHER; note = 2'-fluorocytidine-3'-phosphate
  modified_base 18: mod_base = OTHER; note = 2'-O-methyladenosine-3'-phosphate
  modified_base 19: mod_base = OTHER; note = 2'-fluoroguanosine-3'-phosphate
  modified_base 20: mod_base = OTHER; note = 2'-O-methylcytidine-3'-phosphate
  modified_base 21: mod_base = OTHER; note = 2'-fluorocytidine
ttgggtgttgctagcacagcc

SEQ ID NO: 1538 - DNA, 19 bp, synthetic construct
  source 1..19: mol_type = other DNA
  misc_feature 1..10: note = RNA
  misc_feature 11: note = DNA
  misc_feature 12..19: note = RNA
ctgtgctagcaacacccaa

SEQ ID NO: 1539 - RNA, 21 nt, synthetic construct
  source 1..21: mol_type = other RNA
  modified_base 1: mod_base = OTHER; note = 2'-fluorouridine-3'-phosphate
  modified_base 2: mod_base = OTHER; note = 2'-fluorouridine-3'-phosphate
  modified_base 3: mod_base = OTHER; note = 2'-fluoroguanosine-3'-phosphate
  modified_base 4: mod_base = OTHER; note = 2'-O-methylguanosine-3'-phosphate
  modified_base 5: mod_base = OTHER; note = 2'-fluoroguanosine-3'-phosphate
  modified_base 6: mod_base = OTHER; note = 2'-O-methyluridine-3'-phosphate
  modified_base 7: mod_base = OTHER; note = 2'-fluoroguanosine-3'-phosphate
  modified_base 8: mod_base = OTHER; note = 2'-O-methyluridine-3'-phosphate
  modified_base 9: mod_base = OTHER; note = 2'-O-methyluridine-3'-phosphate
  modified_base 10: mod_base = OTHER; note = 2'-O-methylguanosine-3'-phosphate
  modified_base 11: mod_base = OTHER; note = 2'-fluorocytidine-3'-phosphate
  modified_base 12: mod_base = OTHER; note = 2'-O-methyluridine-3'-phosphate
  modified_base 13: mod_base = OTHER; note = 2'-fluoroadenosine-3'-phosphate
  modified_base 14: mod_base = OTHER; note = 2'-fluoroguanosine-3'-phosphate
  modified_base 15: mod_base = OTHER; note = 2'-O-methylcytidine-3'-phosphate
  modified_base 16: mod_base = OTHER; note = 2'-O-methyladenosine-3'-phosphate
  modified_base 17: mod_base = OTHER; note = 2'-fluorocytidine-3'-phosphate
  modified_base 18: mod_base = OTHER; note = 2'-O-methyladenosine-3'-phosphate
  modified_base 19: mod_base = OTHER; note = 2'-fluoroguanosine-3'-phosphate
  modified_base 20: mod_base = OTHER; note = 2'-O-methylcytidine-3'-phosphate
  modified_base 21: mod_base = OTHER; note = 2'-fluorocytidine
ttgggtgttgctagcacagcc

SEQ ID NO: 1540 - DNA, 19 bp, synthetic construct
  source 1..19: mol_type = other DNA
  misc_feature 1..10: note = RNA
  misc_feature 11: note = DNA
  misc_feature 12..19: note = RNA
ctgtgctagcaacacccaa

SEQ ID NO: 1541 - RNA, 21 nt, synthetic construct
  source 1..21: mol_type = other RNA
  modified_base 1: mod_base = OTHER; note = 2'-fluorouridine-3'-phosphate
  modified_base 2: mod_base = OTHER; note = 2'-fluorouridine-3'-phosphate
  modified_base 3: mod_base = OTHER; note = 2'-fluoroguanosine-3'-phosphate
  modified_base 4: mod_base = OTHER; note = 2'-O-methylguanosine-3'-phosphate
  modified_base 5: mod_base = OTHER; note = 2'-fluoroguanosine-3'-phosphate
  modified_base 6: mod_base = OTHER; note = 2'-O-methyluridine-3'-phosphate
  modified_base 7: mod_base = OTHER; note = 2'-fluoroguanosine-3'-phosphate
  modified_base 8: mod_base = OTHER; note = 2'-O-methyluridine-3'-phosphate
  modified_base 9: mod_base = OTHER; note = 2'-O-methyluridine-3'-phosphate
  modified_base 10: mod_base = OTHER; note = 2'-O-methylguanosine-3'-phosphate
  modified_base 11: mod_base = OTHER; note = 2'-fluorocytidine-3'-phosphate
  modified_base 12: mod_base = OTHER; note = 2'-O-methyluridine-3'-phosphate
  modified_base 13: mod_base = OTHER; note = 2'-fluoroadenosine-3'-phosphate
  modified_base 14: mod_base = OTHER; note = 2'-fluoroguanosine-3'-phosphate
  modified_base 15: mod_base = OTHER; note = 2'-fluorocytidine-3'-phosphate
  modified_base 16: mod_base = OTHER; note = 2'-O-methyladenosine-3'-phosphate
  modified_base 17: mod_base = OTHER; note = 2'-O-methylcytidine-3'-phosphate
  modified_base 18: mod_base = OTHER; note = 2'-O-methyladenosine-3'-phosphate
  modified_base 19: mod_base = OTHER; note = 2'-fluoroguanosine-3'-phosphate
  modified_base 20: mod_base = OTHER; note = 2'-O-methylcytidine-3'-phosphate
  modified_base 21: mod_base = OTHER; note = 2'-fluorocytidine
ttgggtgttgctagcacagcc

SEQ ID NO: 1542 - DNA, 19 bp, synthetic construct
  source 1..19: mol_type = other DNA
  misc_feature 1..10: note = RNA
  misc_feature 11: note = DNA
  misc_feature 12..19: note = RNA
ctgtgctagcaacacccaa

SEQ ID NO: 1543 - RNA, 21 nt, synthetic construct
  source 1..21: mol_type = other RNA
  modified_base 1: mod_base = OTHER; note = 2'-fluorouridine-3'-phosphate
  modified_base 2: mod_base = OTHER; note = 2'-fluorouridine-3'-phosphate
  modified_base 3: mod_base = OTHER; note = 2'-fluoroguanosine-3'-phosphate
  modified_base 4: mod_base = OTHER; note = 2'-O-methylguanosine-3'-phosphate
  modified_base 5: mod_base = OTHER; note = 2'-fluoroguanosine-3'-phosphate
  modified_base 6: mod_base = OTHER; note = 2'-O-methyluridine-3'-phosphate
  modified_base 7: mod_base = OTHER; note = 2'-fluoroguanosine-3'-phosphate
  modified_base 8: mod_base = OTHER; note = 2'-O-methyluridine-3'-phosphate
  modified_base 9: mod_base = OTHER; note = 2'-O-methyluridine-3'-phosphate
  modified_base 10: mod_base = OTHER; note = 2'-O-methylguanosine-3'-phosphate
  modified_base 11: mod_base = OTHER; note = 2'-fluorocytidine-3'-phosphate
  modified_base 12: mod_base = OTHER; note = 2'-O-methyluridine-3'-phosphate
  modified_base 13: mod_base = OTHER; note = 2'-fluoroadenosine-3'-phosphate
  modified_base 14: mod_base = OTHER; note = 2'-fluoroguanosine-3'-phosphate
  modified_base 15: mod_base = OTHER; note = 2'-fluorocytidine-3'-phosphate
  modified_base 16: mod_base = OTHER; note = 2'-O-methyladenosine-3'-phosphate
  modified_base 17: mod_base = OTHER; note = 2'-fluorocytidine-3'-phosphate
  modified_base 18: mod_base = OTHER; note = 2'-O-methyladenosine-3'-phosphate
  modified_base 19: mod_base = OTHER; note = 2'-O-methylguanosine-3'-phosphate
  modified_base 20: mod_base = OTHER; note = 2'-O-methylcytidine
  modified_base 21: mod_base = OTHER; note = 2'-fluorocytidine
ttgggtgttgctagcacagcc

SEQ ID NO: 1544 - DNA, 19 bp, synthetic construct
  source 1..19: mol_type = other DNA
  misc_feature 1..10: note = RNA
  misc_feature 11: note = DNA
  misc_feature 12..19: note = RNA
ctgtgctagcaacacccaa

SEQ ID NO: 1545 - RNA, 21 nt, synthetic construct
  source 1..21: mol_type = other RNA
  modified_base 1: mod_base = OTHER; note = 2'-fluorouridine-3'-phosphate
  modified_base 2: mod_base = OTHER; note = 2'-fluorouridine-3'-phosphate
  modified_base 3: mod_base = OTHER; note = 2'-fluoroguanosine-3'-phosphate
  modified_base 4: mod_base = OTHER; note = 2'-O-methylguanosine-3'-phosphate
  modified_base 5: mod_base = OTHER; note = 2'-fluoroguanosine-3'-phosphate
  modified_base 6: mod_base = OTHER; note = 2'-O-methyluridine-3'-phosphate
  modified_base 7: mod_base = OTHER; note = 2'-fluoroguanosine-3'-phosphate
  modified_base 8: mod_base = OTHER; note = 2'-O-methyluridine-3'-phosphate
  modified_base 9: mod_base = OTHER; note = 2'-O-methyluridine-3'-phosphate
  modified_base 10: mod_base = OTHER; note = 2'-O-methylguanosine-3'-phosphate
  modified_base 11: mod_base = OTHER; note = 2'-fluorocytidine-3'-phosphate
  modified_base 12: mod_base = OTHER; note = 2'-O-methyluridine-3'-phosphate
  modified_base 13: mod_base = OTHER; note = 2'-fluoroadenosine-3'-phosphate
  modified_base 14: mod_base = OTHER; note = 2'-fluoroguanosine-3'-phosphate
  modified_base 15: mod_base = OTHER; note = 2'-fluorocytidine-3'-phosphate
  modified_base 16: mod_base = OTHER; note = 2'-O-methyladenosine-3'-phosphate
  modified_base 17: mod_base = OTHER; note = 2'-fluorocytidine-3'-phosphate
  modified_base 18: mod_base = OTHER; note = 2'-O-methyladenosine-3'-phosphate
  modified_base 19: mod_base = OTHER; note = 2'-fluoroguanosine-3'-phosphate
  modified_base 20: mod_base = OTHER; note = 2'-O-methylcytidine-3'-phosphate
  modified_base 21: mod_base = OTHER; note = 2'-O-methylcytidine
ttgggtgttgctagcacagcc

SEQ ID NO: 1546 - DNA, 21 bp, synthetic construct
  source 1..21: mol_type = other DNA
  modified_base 1: mod_base = OTHER; note = 2'-O-methylcytidine-3'-phosphorothioate
  modified_base 2: mod_base = OTHER; note = 2'-O-methyluridine-3'-phosphorothioate
  modified_base 3: mod_base = OTHER; note = 2'-O-methyladenosine
  modified_base 4: mod_base = OTHER; note = 2'-O-methylguanosine
  modified_base 5: mod_base = OTHER; note = 2'-O-methyladenosine
  modified_base 6: mod_base = OTHER; note = 2'-O-methylcytidine
  modified_base 7: mod_base = OTHER; note = 2'-fluorocytidine
  modified_base 8: mod_base = OTHER; note = 2'-O-methyluridine
  modified_base 9: mod_base = OTHER; note = 2'-fluoroguanosine
  modified_base 10: mod_base = OTHER; note = 2'-O-methyluridine
  modified_base 12: mod_base = OTHER; note = 2'-O-methyluridine
  modified_base 13: mod_base = OTHER; note = 2'-O-methyluridine
  modified_base 14: mod_base = OTHER; note = 2'-O-methylguanosine
  modified_base 15: mod_base = OTHER; note = 2'-O-methylcytidine
  modified_base 16: mod_base = OTHER; note = 2'-O-methyluridine
  modified_base 17: mod_base = OTHER; note = 2'-O-methyluridine
  modified_base 18: mod_base = OTHER; note = 2'-O-methyluridine
  modified_base 19: mod_base = OTHER; note = 2'-O-methyluridine
  modified_base 20: mod_base = OTHER; note = 2'-O-methylguanosine
  modified_base 21: mod_base = OTHER; note = 2'-O-methyluridine
  misc_feature 1..10: note = RNA
  misc_feature 11: note = DNA
  misc_feature 12..21: note = RNA
ctagacctgttttgcttttgt

SEQ ID NO: 1547 - RNA, 23 nt, synthetic construct
  source 1..23: mol_type = other RNA
  modified_base 1: mod_base = OTHER; note = 2'-O-methyladenosine-3'-phosphorothioate
  modified_base 2: mod_base = OTHER; note = 2'-O-methylcytidine-3'-phosphorothioate
  modified_base 3: mod_base = OTHER; note = 2'-O-methyladenosine-3'-phosphate
  modified_base 4: mod_base = OTHER; note = 2'-fluoroadenosine-3'-phosphate
  modified_base 5: mod_base = OTHER; note = 2'-O-methyladenosine-3'-phosphate
  modified_base 6: mod_base = OTHER; note = 2'-fluoroadenosine-3'-phosphate
  modified_base 7: mod_base = OTHER; note = 2'-O-methylguanosine-3'-phosphate
  modified_base 8: mod_base = OTHER; note = 2'-fluorocytidine-3'-phosphate
  modified_base 9: mod_base = OTHER; note = 2'-O-methyladenosine-3'-phosphate
  modified_base 10: mod_base = OTHER; note = 2'-fluoroadenosine-3'-phosphate
  modified_base 11: mod_base = OTHER; note = 2'-O-methyladenosine-3'-phosphate
  modified_base 12: mod_base = OTHER; note = 2'-fluoroadenosine-3'-phosphate
  modified_base 13: mod_base = OTHER; note = 2'-O-methylcytidine-3'-phosphate
  modified_base 14: mod_base = OTHER; note = 2'-O-methyladenosine-3'-phosphate
  modified_base 15: mod_base = OTHER; note = 2'-O-methylguanosine-3'-phosphate
  modified_base 16: mod_base = OTHER; note = 2'-O-methylguanosine-3'-phosphate
  modified_base 17: mod_base = OTHER; note = 2'-O-methyluridine-3'-phosphate
  modified_base 18: mod_base = OTHER; note = 2'-O-methylcytidine-3'-phosphate
  modified_base 19: mod_base = OTHER; note = 2'-O-methyluridine-3'-phosphate
  modified_base 20: mod_base = OTHER; note = 2'-O-methyladenosine-3'-phosphate
  modified_base 21: mod_base = OTHER; note = 2'-O-methylguanosine-3'-phosphorothioate
  modified_base 22: mod_base = OTHER; note = 2'-O-methyladenosine-3'-phosphorothioate
  modified_base 23: mod_base = OTHER; note = 2'-O-methyladenosine
acaaaagcaaaacaggtctagaa

SEQ ID NO: 1548 - DNA, 21 bp, synthetic construct
  source 1..21: mol_type = other DNA
  modified_base 1: mod_base = OTHER; note = 2'-O-methylcytidine-3'-phosphorothioate
  modified_base 2: mod_base = OTHER; note = 2'-O-methyluridine-3'-phosphorothioate
  modified_base 3: mod_base = OTHER; note = 2'-O-methyladenosine-3'-phosphate
  modified_base 4: mod_base = OTHER; note = 2'-O-methylguanosine-3'-phosphate
  modified_base 5: mod_base = OTHER; note = 2'-O-methyladenosine-3'-phosphate
  modified_base 6: mod_base = OTHER; note = 2'-O-methylcytidine-3'-phosphate
  modified_base 7: mod_base = OTHER; note = 2'-fluorocytidine-3'-phosphate
  modified_base 8: mod_base = OTHER; note = 2'-O-methyluridine-3'-phosphate
  modified_base 9: mod_base = OTHER; note = 2'-fluoroguanosine-3'-phosphate
  modified_base 10: mod_base = OTHER; note = 2'-O-methyluridine-3'-phosphate
  modified_base 12: mod_base = OTHER; note = 2'-O-methyluridine-3'-phosphate
  modified_base 13: mod_base = OTHER; note = 2'-O-methyluridine-3'-phosphate
  modified_base 14: mod_base = OTHER; note = 2'-O-methylguanosine-3'-phosphate
  modified_base 15: mod_base = OTHER; note = 2'-O-methylcytidine-3'-phosphate
  modified_base 16: mod_base = OTHER; note = 2'-O-methyluridine-3'-phosphate
  modified_base 17: mod_base = OTHER; note = 2'-O-methyluridine-3'-phosphate
  modified_base 18: mod_base = OTHER; note = 2'-O-methyluridine-3'-phosphate
  modified_base 19: mod_base = OTHER; note = 2'-O-methyluridine-3'-phosphate
  modified_base 20: mod_base = OTHER; note = 2'-O-methylguanosine-3'-phosphate
  modified_base 21: mod_base = OTHER; note = 2'-O-methyluridine
  misc_feature 1..10: note = RNA
  misc_feature 11: note = DNA
  misc_feature 12..21: note = RNA
ctagacctgttttgcttttgt

SEQ ID NO: 1549 - RNA, 23 nt, synthetic construct
  source 1..23: mol_type = other RNA
  modified_base 1: mod_base = OTHER; note = 2'-O-methyladenosine-3'-phosphorothioate
  modified_base 2: mod_base = OTHER; note = 2'-fluorocytidine-3'-phosphorothioate
  modified_base 3: mod_base = OTHER; note = 2'-O-methyladenosine
  modified_base 4: mod_base = OTHER; note = Adenosine-3'-phosphorothioate
  modified_base 5: mod_base = OTHER; note = 2'-O-methyladenosine-3'-phosphate
  modified_base 6: mod_base = OTHER; note = 2'-fluoroadenosine-3'-phosphate
  modified_base 7: mod_base = OTHER; note = 2'-O-methylguanosine-3'-phosphate
  modified_base 8: mod_base = OTHER; note = 2'-fluorocytidine-3'-phosphate
  modified_base 9: mod_base = OTHER; note = 2'-O-methyladenosine-3'-phosphate
  modified_base 10: mod_base = OTHER; note = 2'-fluoroadenosine-3'-phosphate
  modified_base 11: mod_base = OTHER; note = 2'-O-methyladenosine-3'-phosphate
  modified_base 12: mod_base = OTHER; note = 2'-fluoroadenosine-3'-phosphate
  modified_base 13: mod_base = OTHER; note = 2'-O-methylcytidine-3'-phosphate
  modified_base 14: mod_base = OTHER; note = 2'-O-methyladenosine-3'-phosphate
  modified_base 15: mod_base = OTHER; note = 2'-O-methylguanosine-3'-phosphate
  modified_base 16: mod_base = OTHER; note = 2'-O-methylguanosine-3'-phosphate
  modified_base 17: mod_base = OTHER; note = 2'-O-methyluridine-3'-phosphate
  modified_base 18: mod_base = OTHER; note = 2'-O-methylcytidine-3'-phosphate
  modified_base 19: mod_base = OTHER; note = 2'-O-methyluridine-3'-phosphate
  modified_base 20: mod_base = OTHER; note = 2'-O-methyladenosine-3'-phosphate
  modified_base 21: mod_base = OTHER; note = 2'-O-methylguanosine-3'-phosphorothioate
  modified_base 22: mod_base = OTHER; note = 2'-O-methyladenosine-3'-phosphorothioate
  modified_base 23: mod_base = OTHER; note = 2'-O-methyladenosine
acaaaagcaaaacaggtctagaa

SEQ ID NO: 1550 - DNA, 21 bp, synthetic construct
  source 1..21: mol_type = other DNA
  modified_base 1: mod_base = OTHER; note = 2'-O-methylcytidine-3'-phosphorothioate
  modified_base 2: mod_base = OTHER; note = 2'-O-methyluridine-3'-phosphorothioate
  modified_base 3: mod_base = OTHER; note = 2'-O-methyladenosine-3'-phosphate
  modified_base 4: mod_base = OTHER; note = 2'-O-methylguanosine-3'-phosphate
  modified_base 5: mod_base = OTHER; note = 2'-O-methyladenosine-3'-phosphate
  modified_base 6: mod_base = OTHER; note = 2'-O-methylcytidine-3'-phosphate
  modified_base 7: mod_base = OTHER; note = 2'-fluorocytidine-3'-phosphate
  modified_base 8: mod_base = OTHER; note = 2'-O-methyluridine-3'-phosphate
  modified_base 9: mod_base = OTHER; note = 2'-fluoroguanosine-3'-phosphate
  modified_base 10: mod_base = OTHER; note = 2'-O-methyluridine-3'-phosphate
  modified_base 12: mod_base = OTHER; note = 2'-O-methyluridine-3'-phosphate
  modified_base 13: mod_base = OTHER; note = 2'-O-methyluridine-3'-phosphate
  modified_base 14: mod_base = OTHER; note = 2'-O-methylguanosine-3'-phosphate
  modified_base 15: mod_base = OTHER; note = 2'-O-methylcytidine-3'-phosphate
  modified_base 16: mod_base = OTHER; note = 2'-O-methyluridine-3'-phosphate
  modified_base 17: mod_base = OTHER; note = 2'-O-methyluridine-3'-phosphate
  modified_base 18: mod_base = OTHER; note = 2'-O-methyluridine-3'-phosphate
  modified_base 19: mod_base = OTHER; note = 2'-O-methyluridine-3'-phosphate
  modified_base 20: mod_base = OTHER; note = 2'-O-methylguanosine-3'-phosphate
  modified_base 21: mod_base = OTHER; note = 2'-O-methyluridine
  misc_feature 1..10: note = RNA
  misc_feature 11: note = DNA
  misc_feature 12..21: note = RNA
ctagacctgttttgcttttgt

SEQ ID NO: 1551 - RNA, 23 nt, synthetic construct
  source 1..23: mol_type = other RNA
  modified_base 1: mod_base = OTHER; note = 2'-O-methyladenosine-3'-phosphorothioate
  modified_base 2: mod_base = OTHER; note = 2'-O-methylcytidine-3'-phosphorothioate
  modified_base 3: mod_base = OTHER; note = 2'-O-methyladenosine-3'-phosphate
  modified_base 4: mod_base = OTHER; note = 2'-fluoroadenosine-3'-phosphate
  modified_base 5: mod_base = OTHER; note = 2'-O-methyladenosine-3'-phosphate
  modified_base 6: mod_base = OTHER; note = 2'-fluoroadenosine-3'-phosphate
  modified_base 7: mod_base = OTHER; note = 2'-O-methylguanosine-3'-phosphate
  modified_base 8: mod_base = OTHER; note = 2'-fluorocytidine-3'-phosphate
  modified_base 9: mod_base = OTHER; note = 2'-O-methyladenosine-3'-phosphate
  modified_base 10: mod_base = OTHER; note = 2'-fluoroadenosine-3'-phosphate
  modified_base 11: mod_base = OTHER; note = 2'-O-methyladenosine-3'-phosphate
  modified_base 12: mod_base = OTHER; note = 2'-fluoroadenosine-3'-phosphate
  modified_base 13: mod_base = OTHER; note = 2'-O-methylcytidine-3'-phosphate
  modified_base 14: mod_base = OTHER; note = 2'-fluoroadenosine-3'-phosphate
  modified_base 15: mod_base = OTHER; note = 2'-O-methylguanosine-3'-phosphate
  modified_base 16: mod_base = OTHER; note = 2'-O-methylguanosine-3'-phosphate
  modified_base 17: mod_base = OTHER; note = 2'-O-methyluridine-3'-phosphate
  modified_base 18: mod_base = OTHER; note = 2'-O-methylcytidine-3'-phosphate
  modified_base 19: mod_base = OTHER; note = 2'-O-methyluridine-3'-phosphate
  modified_base 20: mod_base = OTHER; note = 2'-O-methyladenosine-3'-phosphate
  modified_base 21: mod_base = OTHER; note = 2'-O-methylguanosine-3'-phosphorothioate
  modified_base 22: mod_base = OTHER; note = 2'-O-methyladenosine-3'-phosphorothioate
  modified_base 23: mod_base = OTHER; note = 2'-O-methyladenosine
acaaaagcaaaacaggtctagaa

SEQ ID NO: 1552 - DNA, 21 bp, synthetic construct
  source 1..21: mol_type = other DNA
  modified_base 1: mod_base = OTHER; note = 2'-O-methylcytidine-3'-phosphorothioate
  modified_base 2: mod_base = OTHER; note = 2'-O-methyluridine-3'-phosphorothioate
  modified_base 3: mod_base = OTHER; note = 2'-O-methyladenosine-3'-phosphate
  modified_base 4: mod_base = OTHER; note = 2'-O-methylguanosine-3'-phosphate
  modified_base 5: mod_base = OTHER; note = 2'-O-methyladenosine-3'-phosphate
  modified_base 6: mod_base = OTHER; note = 2'-O-methylcytidine-3'-phosphate
  modified_base 7: mod_base = OTHER; note = 2'-fluorocytidine-3'-phosphate
  modified_base 8: mod_base = OTHER; note = 2'-O-methyluridine-3'-phosphate
  modified_base 9: mod_base = OTHER; note = 2'-fluoroguanosine-3'-phosphate
  modified_base 10: mod_base = OTHER; note = 2'-O-methyluridine-3'-phosphate
  modified_base 12: mod_base = OTHER; note = 2'-O-methyluridine-3'-phosphate
  modified_base 13: mod_base = OTHER; note = 2'-O-methyluridine-3'-phosphate
  modified_base 14: mod_base = OTHER; note = 2'-O-methylguanosine-3'-phosphate
  modified_base 15: mod_base = OTHER; note = 2'-O-methylcytidine-3'-phosphate
  modified_base 16: mod_base = OTHER; note = 2'-O-methyluridine-3'-phosphate
  modified_base 17: mod_base = OTHER; note = 2'-O-methyluridine-3'-phosphate
  modified_base 18: mod_base = OTHER; note = 2'-O-methyluridine-3'-phosphate
  modified_base 19: mod_base = OTHER; note = 2'-O-methyluridine-3'-phosphate
  modified_base 20: mod_base = OTHER; note = 2'-O-methylguanosine-3'-phosphate
  modified_base 21: mod_base = OTHER; note = 2'-O-methyluridine
  misc_feature 1..10: note = RNA
  misc_feature 11: note = DNA
  misc_feature 12..21: note = RNA
ctagacctgttttgcttttgt

SEQ ID NO: 1553 - RNA, 23 nt, synthetic construct
  source 1..23: mol_type = other RNA
  modified_base 1: mod_base = OTHER; note = 2'-O-methyladenosine-3'-phosphorothioate
  modified_base 2: mod_base = OTHER; note = 2'-O-methylcytidine-3'-phosphorothioate
  modified_base 3: mod_base = OTHER; note = 2'-O-methyladenosine
  modified_base 4: mod_base = OTHER; note = 2'-fluoroadenosine
  modified_base 5: mod_base = OTHER; note = 2'-O-methyladenosine
  modified_base 6: mod_base = OTHER; note = 2'-fluoroadenosine
  modified_base 7: mod_base = OTHER; note = 2'-O-methylguanosine
  modified_base 8: mod_base = OTHER; note = 2'-fluorocytidine
  modified_base 9: mod_base = OTHER; note = 2'-O-methyladenosine
  modified_base 10: mod_base = OTHER; note = 2'-fluoroadenosine
  modified_base 11: mod_base = OTHER; note = 2'-O-methyladenosine
  modified_base 12: mod_base = OTHER; note = 2'-fluoroadenosine
  modified_base 13: mod_base = OTHER; note = 2'-O-methylcytidine
  modified_base 14: mod_base = OTHER; note = 2'-O-methyladenosine
  modified_base 15: mod_base = OTHER; note = 2'-O-methylguanosine
  modified_base 16: mod_base = OTHER; note = 2'-fluoroguanosine
  modified_base 17: mod_base = OTHER; note = 2'-O-methyluridine
  modified_base 18: mod_base = OTHER; note = 2'-O-methylcytidine
  modified_base 19: mod_base = OTHER; note = 2'-O-methyluridine
  modified_base 20: mod_base = OTHER; note = 2'-O-methyladenosine
  modified_base 21: mod_base = OTHER; note = 2'-O-methylguanosine-3'-phosphorothioate
  modified_base 22: mod_base = OTHER; note = 2'-O-methyladenosine-3'-phosphorothioate
  modified_base 23: mod_base = OTHER; note = 2'-O-methyladenosine
acaaaagcaaaacaggtctagaa

SEQ ID NO: 1554 - DNA, 21 bp, synthetic construct
  source 1..21: mol_type = other DNA
  modified_base 1: mod_base = OTHER; note = 2'-O-methylcytidine-3'-phosphorothioate
  modified_base 2: mod_base = OTHER; note = 2'-O-methyluridine-3'-phosphorothioate
  modified_base 3: mod_base = OTHER; note = 2'-O-methyladenosine-3'-phosphate
  modified_base 4: mod_base = OTHER; note = 2'-O-methylguanosine-3'-phosphate
  modified_base 5: mod_base = OTHER; note = 2'-O-methyladenosine-3'-phosphate
  modified_base 6: mod_base = OTHER; note = 2'-O-methylcytidine-3'-phosphate
  modified_base 7: mod_base = OTHER; note = 2'-fluorocytidine-3'-phosphate
  modified_base 8: mod_base = OTHER; note = 2'-O-methyluridine-3'-phosphate
  modified_base 9: mod_base = OTHER; note = 2'-fluoroguanosine-3'-phosphate
  modified_base 10: mod_base = OTHER; note = 2'-O-methyluridine-3'-phosphate
  modified_base 12: mod_base = OTHER; note = 2'-O-methyluridine-3'-phosphate
  modified_base 13: mod_base = OTHER; note = 2'-O-methyluridine-3'-phosphate
  modified_base 14: mod_base = OTHER; note = 2'-O-methylguanosine-3'-phosphate
  modified_base 15: mod_base = OTHER; note = 2'-O-methylcytidine-3'-phosphate
  modified_base 16: mod_base = OTHER; note = 2'-O-methyluridine-3'-phosphate
  modified_base 17: mod_base = OTHER; note = 2'-O-methyluridine-3'-phosphate
  modified_base 18: mod_base = OTHER; note = 2'-O-methyluridine-3'-phosphate
  modified_base 19: mod_base = OTHER; note = 2'-O-methyluridine-3'-phosphate
  modified_base 20: mod_base = OTHER; note = 2'-O-methylguanosine-3'-phosphate
  modified_base 21: mod_base = OTHER; note = 2'-O-methyluridine
  misc_feature 1..10: note = RNA
  misc_feature 11: note = DNA
  misc_feature 12..21: note = RNA
ctagacctgttttgcttttgt

SEQ ID NO: 1555 - RNA, 23 nt, synthetic construct
  source 1..23: mol_type = other RNA
  modified_base 1: mod_base = OTHER; note = 2'-O-methyladenosine-3'-phosphorothioate
  modified_base 2: mod_base = OTHER; note = 2'-O-methylcytidine-3'-phosphorothioate
  modified_base 3: mod_base = OTHER; note = 2'-O-methyladenosine-3'-phosphate
  modified_base 4: mod_base = OTHER; note = 2'-fluoroadenosine-3'-phosphate
  modified_base 5: mod_base = OTHER; note = 2'-O-methyladenosine-3'-phosphate
  modified_base 6: mod_base = OTHER; note = 2'-fluoroadenosine-3'-phosphate
  modified_base 7: mod_base = OTHER; note = 2'-O-methylguanosine-3'-phosphate
  modified_base 8: mod_base = OTHER; note = 2'-fluorocytidine-3'-phosphate
  modified_base 9: mod_base = OTHER; note = 2'-O-methyladenosine-3'-phosphate
  modified_base 10: mod_base = OTHER; note = 2'-fluoroadenosine-3'-phosphate
  modified_base 11: mod_base = OTHER; note = 2'-O-methyladenosine-3'-phosphate
  modified_base 12: mod_base = OTHER; note = 2'-fluoroadenosine-3'-phosphate
  modified_base 13: mod_base = OTHER; note = 2'-O-methylcytidine-3'-phosphate
  modified_base 14: mod_base = OTHER; note = 2'-O-methyladenosine-3'-phosphate
  modified_base 15: mod_base = OTHER; note = 2'-O-methylguanosine-3'-phosphate
  modified_base 16: mod_base = OTHER; note = 2'-O-methylguanosine-3'-phosphate
  modified_base 17: mod_base = OTHER; note = 2'-O-methyluridine-3'-phosphate
  modified_base 18: mod_base = OTHER; note = 2'-fluorocytidine-3'-phosphate
  modified_base 19: mod_base = OTHER; note = 2'-O-methyluridine-3'-phosphate
  modified_base 20: mod_base = OTHER; note = 2'-O-methyladenosine-3'-phosphate
  modified_base 21: mod_base = OTHER; note = 2'-O-methylguanosine-3'-phosphorothioate
  modified_base 22: mod_base = OTHER; note = 2'-O-methyladenosine-3'-phosphorothioate
  modified_base 23: mod_base = OTHER; note = 2'-O-methyladenosine
acaaaagcaaaacaggtctagaa

SEQ ID NO: 1556 - RNA, 19 nt, synthetic construct
  source 1..19: mol_type = other RNA
aagcaagcagacatttatc

SEQ ID NO: 1557 - RNA, 21 nt, synthetic construct
  source 1..21: mol_type = other RNA
gataaatgtctgcttgcttgg

SEQ ID NO: 1558 - RNA, 21 nt, synthetic construct
  source 1..21: mol_type = other RNA
ccaagcaagcagacatttatc

SEQ ID NO: 1559 - RNA, 23 nt, synthetic construct
  source 1..23: mol_type = other RNA
gataaatgtctgcttgcttgggt

SEQ ID NO: 1560 - RNA, 19 nt, synthetic construct
  source 1..19: mol_type = other RNA
  modified_base 1: mod_base = OTHER; note = 2'-O-methyladenosine-3'-phosphate
  modified_base 2: mod_base = OTHER; note = 2'-O-methyladenosine-3'-phosphate
  modified_base 3: mod_base = OTHER; note = 2'-O-methylguanosine-3'-phosphate
  modified_base 4: mod_base = OTHER; note = 2'-O-methylcytidine-3'-phosphate
  modified_base 5: mod_base = OTHER; note = 2'-O-methyladenosine-3'-phosphate
  modified_base 6: mod_base = OTHER; note = 2'-O-methyladenosine-3'-phosphate
  modified_base 7: mod_base = OTHER; note = 2'-fluoroguanosine-3'-phosphate
  modified_base 8: mod_base = OTHER; note = 2'-fluorocytidine-3'-phosphate
  modified_base 9: mod_base = OTHER; note = 2'-fluoroadenosine-3'-phosphate
  modified_base 10: mod_base = OTHER; note = 2'-O-methylguanosine-3'-phosphate
  modified_base 11: mod_base = OTHER; note = 2'-O-methyladenosine-3'-phosphate
  modified_base 12: mod_base = OTHER; note = 2'-O-methylcytidine-3'-phosphate
  modified_base 13: mod_base = OTHER; note = 2'-O-methyladenosine-3'-phosphate
  modified_base 14: mod_base = OTHER; note = 2'-O-methyluridine-3'-phosphate
  modified_base 15: mod_base = OTHER; note = 2'-O-methyluridine-3'-phosphate
  modified_base 16: mod_base = OTHER; note = 2'-O-methyluridine-3'-phosphate
  modified_base 17: mod_base = OTHER; note = 2'-O-methyladenosine-3'-phosphate
  modified_base 18: mod_base = OTHER; note = 2'-O-methyluridine-3'-phosphate
  modified_base 19: mod_base = OTHER; note = 2'-O-methylcytidine
aagcaagcagacatttatc

SEQ ID NO: 1561 - RNA, 21 nt, synthetic construct
  source 1..21: mol_type = other RNA
  modified_base 1: mod_base = OTHER; note = 2'-O-methylguanosine-3'-phosphate
  modified_base 2: mod_base = OTHER; note = 2'-fluoroadenosine-3'-phosphate
  modified_base 3: mod_base = OTHER; note = 2'-O-methyluridine-3'-phosphate
  modified_base 4: mod_base = OTHER; note = 2'-O-methyladenosine-3'-phosphate
  modified_base 5: mod_base = OTHER; note = 2'-O-methyladenosine-3'-phosphate
  modified_base 6: mod_base = OTHER; note = 2'-fluoroadenosine-3'-phosphate
  modified_base 7: mod_base = OTHER; note = 2'-O-methyluridine-3'-phosphate
  modified_base 8: mod_base = OTHER; note = 2'-O-methylguanosine-3'-phosphate
  modified_base 9: mod_base = OTHER; note = 2'-O-methyluridine-3'-phosphate
  modified_base 10: mod_base = OTHER; note = 2'-O-methylcytidine-3'-phosphate
  modified_base 11: mod_base = OTHER; note = 2'-O-methyluridine-3'-phosphate
  modified_base 12: mod_base = OTHER; note = 2'-O-methylguanosine-3'-phosphate
  modified_base 13: mod_base = OTHER; note = 2'-O-methylcytidine-3'-phosphate
  modified_base 14: mod_base = OTHER; note = 2'-fluorouridine-3'-phosphate
  modified_base 15: mod_base = OTHER; note = 2'-O-methyluridine-3'-phosphate
  modified_base 16: mod_base = OTHER; note = 2'-fluoroguanosine-3'-phosphate
  modified_base 17: mod_base = OTHER; note = 2'-O-methylcytidine-3'-phosphate
  modified_base 18: mod_base = OTHER; note = 2'-O-methyluridine-3'-phosphate
  modified_base 19: mod_base = OTHER; note = 2'-O-methyluridine-3'-phosphate
  modified_base 20: mod_base = OTHER; note = 2'-O-methylguanosine-3'-phosphate
  modified_base 21: mod_base = OTHER; note = 2'-O-methylguanosine
gataaatgtctgcttgcttgg

SEQ ID NO: 1562 - RNA, 19 nt, synthetic construct
  source 1..19: mol_type = other RNA
  modified_base 1: mod_base = OTHER; note = 2'-O-methyladenosine-3'-phosphate
  modified_base 2: mod_base = OTHER; note = 2'-O-methyladenosine-3'-phosphate
  modified_base 3: mod_base = OTHER; note = 2'-O-methylguanosine-3'-phosphate
  modified_base 4: mod_base = OTHER; note = 2'-O-methylcytidine-3'-phosphate
  modified_base 5: mod_base = OTHER; note = 2'-fluoroadenosine-3'-phosphate
  modified_base 6: mod_base = OTHER; note = 2'-O-methyladenosine-3'-phosphate
  modified_base 7: mod_base = OTHER; note = 2'-fluoroguanosine-3'-phosphate
  modified_base 8: mod_base = OTHER; note = 2'-fluorocytidine-3'-phosphate
  modified_base 9: mod_base = OTHER; note = 2'-fluoroadenosine-3'-phosphate
  modified_base 10: mod_base = OTHER; note = 2'-O-methylguanosine-3'-phosphate
  modified_base 11: mod_base = OTHER; note = 2'-O-methyladenosine-3'-phosphate
  modified_base 12: mod_base = OTHER; note = 2'-O-methylcytidine-3'-phosphate
  modified_base 13: mod_base = OTHER; note = 2'-O-methyladenosine-3'-phosphate
  modified_base 14: mod_base = OTHER; note = 2'-O-methyluridine-3'-phosphate
  modified_base 15: mod_base = OTHER; note = 2'-O-methyluridine-3'-phosphate
  modified_base 16: mod_base = OTHER; note = 2'-O-methyluridine-3'-phosphate
  modified_base 17: mod_base = OTHER; note = 2'-O-methyladenosine-3'-phosphate
  modified_base 18: mod_base = OTHER; note = 2'-O-methyluridine-3'-phosphate
  modified_base 19: mod_base = OTHER; note = 2'-O-methylcytidine
aagcaagcagacatttatc

SEQ ID NO: 1563 - RNA, 21 nt, synthetic construct
  source 1..21: mol_type = other RNA
  modified_base 1: mod_base = OTHER; note = 2'-O-methylguanosine-3'-phosphate
  modified_base 2: mod_base = OTHER; note = 2'-fluoroadenosine-3'-phosphate
  modified_base 3: mod_base = OTHER; note = 2'-O-methyluridine-3'-phosphate
  modified_base 4: mod_base = OTHER; note = 2'-O-methyladenosine-3'-phosphate
  modified_base 5: mod_base = OTHER; note = 2'-O-methyladenosine-3'-phosphate
  modified_base 6: mod_base = OTHER; note = 2'-fluoroadenosine-3'-phosphate
  modified_base 7: mod_base = OTHER; note = 2'-O-methyluridine-3'-phosphate
  modified_base 8: mod_base = OTHER; note = 2'-fluoroguanosine-3'-phosphate
  modified_base 9: mod_base = OTHER; note = 2'-fluorouridine-3'-phosphate
  modified_base 10: mod_base = OTHER; note = 2'-O-methylcytidine-3'-phosphate
  modified_base 11: mod_base = OTHER; note = 2'-O-methyluridine-3'-phosphate
  modified_base 12: mod_base = OTHER; note = 2'-O-methylguanosine-3'-phosphate
  modified_base 13: mod_base = OTHER; note = 2'-O-methylcytidine-3'-phosphate
  modified_base 14: mod_base = OTHER; note = 2'-fluorouridine-3'-phosphate
  modified_base 15: mod_base = OTHER; note = 2'-O-methyluridine-3'-phosphate
  modified_base 16: mod_base = OTHER; note = 2'-fluoroguanosine-3'-phosphate
  modified_base 17: mod_base = OTHER; note = 2'-O-methylcytidine-3'-phosphate
  modified_base 18: mod_base = OTHER; note = 2'-O-methyluridine-3'-phosphate
  modified_base 19: mod_base = OTHER; note = 2'-O-methyluridine-3'-phosphate
  modified_base 20: mod_base = OTHER; note = 2'-O-methylguanosine-3'-phosphate
  modified_base 21: mod_base = OTHER; note = 2'-O-methylguanosine
gataaatgtctgcttgcttgg

SEQ ID NO: 1564 - RNA, 19 nt, synthetic construct
  source 1..19: mol_type = other RNA
  modified_base 1: mod_base = OTHER; note = 2'-O-methyladenosine-3'-phosphate
  modified_base 2: mod_base = OTHER; note = 2'-O-methyladenosine-3'-phosphate
  modified_base 3: mod_base = OTHER; note = 2'-O-methylguanosine-3'-phosphate
  modified_base 4: mod_base = OTHER; note = 2'-O-methylcytidine-3'-phosphate
  modified_base 5: mod_base = OTHER; note = 2'-fluoroadenosine-3'-phosphate
  modified_base 6: mod_base = OTHER; note = 2'-O-methyladenosine-3'-phosphate
  modified_base 7: mod_base = OTHER; note = 2'-fluoroguanosine-3'-phosphate
  modified_base 8: mod_base = OTHER; note = 2'-fluorocytidine-3'-phosphate
  modified_base 9: mod_base = OTHER; note = 2'-fluoroadenosine-3'-phosphate
  modified_base 10: mod_base = OTHER; note = 2'-O-methylguanosine-3'-phosphate
  modified_base 11: mod_base = OTHER; note = 2'-O-methyladenosine-3'-phosphate
  modified_base 12: mod_base = OTHER; note = 2'-O-methylcytidine-3'-phosphate
  modified_base 13: mod_base = OTHER; note = 2'-O-methyladenosine-3'-phosphate
  modified_base 14: mod_base = OTHER; note = 2'-O-methyluridine-3'-phosphate
  modified_base 15: mod_base = OTHER; note = 2'-O-methyluridine-3'-phosphate
  modified_base 16: mod_base = OTHER; note = 2'-O-methyluridine-3'-phosphate
  modified_base 17: mod_base = OTHER; note = 2'-O-methyladenosine-3'-phosphate
  modified_base 18: mod_base = OTHER; note = 2'-O-methyluridine-3'-phosphate
  modified_base 19: mod_base = OTHER; note = 2'-O-methylcytidine
aagcaagcagacatttatc

SEQ ID NO: 1565 - RNA, 21 nt, synthetic construct
  source 1..21: mol_type = other RNA
  modified_base 1: mod_base = OTHER; note = 2'-O-methylguanosine-3'-phosphate
  modified_base 2: mod_base = OTHER; note = 2'-fluoroadenosine-3'-phosphate
  modified_base 3: mod_base = OTHER; note = 2'-O-methyluridine-3'-phosphate
  modified_base 4: mod_base = OTHER; note = 2'-O-methyladenosine-3'-phosphate
  modified_base 5: mod_base = OTHER; note = 2'-O-methyladenosine-3'-phosphate
  modified_base 6: mod_base = OTHER; note = 2'-fluoroadenosine-3'-phosphate
  modified_base 7: mod_base = OTHER; note = 2'-O-methyluridine-3'-phosphate
  modified_base 8: mod_base = OTHER; note = 2'-O-methylguanosine-3'-phosphate
  modified_base 9: mod_base = OTHER; note = 2'-O-methyluridine-3'-phosphate
  modified_base 10: mod_base = OTHER; note = 2'-O-methylcytidine-3'-phosphate
  modified_base 11: mod_base = OTHER; note = 2'-O-methyluridine-3'-phosphate
  modified_base 12: mod_base = OTHER; note = 2'-O-methylguanosine-3'-phosphate
  modified_base 13: mod_base = OTHER; note = 2'-O-methylcytidine-3'-phosphate
  modified_base 14: mod_base = OTHER; note = 2'-fluorouridine-3'-phosphate
  modified_base 15: mod_base = OTHER; note = 2'-O-methyluridine-3'-phosphate
  modified_base 16: mod_base = OTHER; note = 2'-fluoroguanosine-3'-phosphate
  modified_base 17: mod_base = OTHER; note = 2'-O-methylcytidine-3'-phosphate
  modified_base 18: mod_base = OTHER; note = 2'-O-methyluridine-3'-phosphate
  modified_base 19: mod_base = OTHER; note = 2'-O-methyluridine-3'-phosphate
  modified_base 20: mod_base = OTHER; note = 2'-O-methylguanosine-3'-phosphate
  modified_base 21: mod_base = OTHER; note = 2'-O-methylguanosine
gataaatgtctgcttgcttgg

SEQ ID NO: 1566 - RNA, 21 nt, synthetic construct
  source 1..21: mol_type = other RNA
  modified_base 1: mod_base = OTHER; note = 2'-O-methylcytidine-3'-phosphate
  modified_base 2: mod_base = OTHER; note = 2'-O-methylcytidine-3'-phosphate
  modified_base 3: mod_base = OTHER; note = 2'-O-methyladenosine-3'-phosphate
  modified_base 4: mod_base = OTHER; note = 2'-O-methyladenosine-3'-phosphate
  modified_base 5: mod_base = OTHER; note = 2'-O-methylguanosine-3'-phosphate
  modified_base 6: mod_base = OTHER; note = 2'-O-methylcytidine-3'-phosphate
  modified_base 7: mod_base = OTHER; note = 2'-O-methyladenosine-3'-phosphate
  modified_base 8: mod_base = OTHER; note = 2'-O-methyladenosine-3'-phosphate
  modified_base 9: mod_base = OTHER; note = 2'-fluoroguanosine-3'-phosphate
  modified_base 10: mod_base = OTHER; note = 2'-fluorocytidine-3'-phosphate
  modified_base 11: mod_base = OTHER; note = 2'-fluoroadenosine-3'-phosphate
  modified_base 12: mod_base = OTHER; note = 2'-O-methylguanosine-3'-phosphate
  modified_base 13: mod_base = OTHER; note = 2'-O-methyladenosine-3'-phosphate
  modified_base 14: mod_base = OTHER; note = 2'-O-methylcytidine-3'-phosphate
  modified_base 15: mod_base = OTHER; note = 2'-O-methyladenosine-3'-phosphate
  modified_base 16: mod_base = OTHER; note = 2'-O-methyluridine-3'-phosphate
  modified_base 17: mod_base = OTHER; note = 2'-O-methyluridine-3'-phosphate
  modified_base 18: mod_base = OTHER; note = 2'-O-methyluridine-3'-phosphate
  modified_base 19: mod_base = OTHER; note = 2'-O-methyladenosine-3'-phosphate
  modified_base 20: mod_base = OTHER; note = 2'-O-methyluridine-3'-phosphate
  modified_base 21: mod_base = OTHER; note = 2'-O-methylcytidine
ccaagcaagcagacatttatc

SEQ ID NO: 1567 - RNA, 23 nt, synthetic construct
  source 1..23: mol_type = other RNA
  modified_base 1: mod_base = OTHER; note = 2'-O-methylguanosine-3'-phosphate
  modified_base 2: mod_base = OTHER; note = 2'-fluoroadenosine-3'-phosphate
  modified_base 3: mod_base = OTHER; note = 2'-O-methyluridine-3'-phosphate
  modified_base 4: mod_base = OTHER; note = 2'-O-methyladenosine-3'-phosphate
  modified_base 5: mod_base = OTHER; note = 2'-O-methyladenosine-3'-phosphate
  modified_base 6: mod_base = OTHER; note = 2'-fluoroadenosine-3'-phosphate
  modified_base 7: mod_base = OTHER; note = 2'-O-methyluridine-3'-phosphate
  modified_base 8: mod_base = OTHER; note = 2'-O-methylguanosine-3'-phosphate
  modified_base 9: mod_base = OTHER; note = 2'-O-methyluridine-3'-phosphate
  modified_base 10: mod_base = OTHER; note = 2'-O-methylcytidine-3'-phosphate
  modified_base 11: mod_base = OTHER; note = 2'-O-methyluridine-3'-phosphate
  modified_base 12: mod_base = OTHER; note = 2'-O-methylguanosine-3'-phosphate
  modified_base 13: mod_base = OTHER; note = 2'-O-methylcytidine-3'-phosphate
  modified_base 14: mod_base = OTHER; note = 2'-fluorouridine-3'-phosphate
  modified_base 15: mod_base = OTHER; note = 2'-O-methyluridine-3'-phosphate
  modified_base 16: mod_base = OTHER; note = 2'-fluoroguanosine-3'-phosphate
  modified_base 17: mod_base = OTHER; note = 2'-O-methylcytidine-3'-phosphate
  modified_base 18: mod_base = OTHER; note = 2'-O-methyluridine-3'-phosphate
  modified_base 19: mod_base = OTHER; note = 2'-O-methyluridine-3'-phosphate
  modified_base 20: mod_base = OTHER; note = 2'-O-methylguanosine-3'-phosphate
  modified_base 21: mod_base = OTHER; note = 2'-O-methylguanosine-3'-phosphate
  modified_base 22: mod_base = OTHER; note = 2'-O-methylguanosine-3'-phosphate
  modified_base 23: mod_base = OTHER; note = 2'-O-methyluridine
gataaatgtctgcttgcttgggt

SEQ ID NO: 1568 - RNA, 21 nt, synthetic construct
  source 1..21: mol_type = other RNA
  modified_base 1: mod_base = OTHER; note = 2'-O-methylcytidine-3'-phosphate
  modified_base 2: mod_base = OTHER; note = 2'-O-methylcytidine-3'-phosphate
  modified_base 3: mod_base = OTHER; note = 2'-O-methyladenosine-3'-phosphate
  modified_base 4: mod_base = OTHER; note = 2'-O-methyladenosine-3'-phosphate
  modified_base 5: mod_base = OTHER; note = 2'-O-methylguanosine-3'-phosphate
  modified_base 6: mod_base = OTHER; note = 2'-O-methylcytidine-3'-phosphate
  modified_base 7: mod_base = OTHER; note = 2'-fluoroadenosine-3'-phosphate
  modified_base 8: mod_base = OTHER; note = 2'-O-methyladenosine-3'-phosphate
  modified_base 9: mod_base = OTHER; note = 2'-fluoroguanosine-3'-phosphate
  modified_base 10: mod_base = OTHER; note = 2'-fluorocytidine-3'-phosphate
  modified_base 11: mod_base = OTHER; note = 2'-fluoroadenosine-3'-phosphate
  modified_base 12: mod_base = OTHER; note = 2'-O-methylguanosine-3'-phosphate
  modified_base 13: mod_base = OTHER; note = 2'-O-methyladenosine-3'-phosphate
  modified_base 14: mod_base = OTHER; note = 2'-O-methylcytidine-3'-phosphate
  modified_base 15: mod_base = OTHER; note = 2'-O-methyladenosine-3'-phosphate
  modified_base 16: mod_base = OTHER; note = 2'-O-methyluridine-3'-phosphate
  modified_base 17: mod_base = OTHER; note = 2'-O-methyluridine-3'-phosphate
  modified_base 18: mod_base = OTHER; note = 2'-O-methyluridine-3'-phosphate
  modified_base 19: mod_base = OTHER; note = 2'-O-methyladenosine-3'-phosphate
  modified_base 20: mod_base = OTHER; note = 2'-O-methyluridine-3'-phosphate
  modified_base 21: mod_base = OTHER; note = 2'-O-methylcytidine
ccaagcaagcagacatttatc

SEQ ID NO: 1569 - RNA, 23 nt, synthetic construct
  source 1..23: mol_type = other RNA
  modified_base 1: mod_base = OTHER; note = 2'-O-methylguanosine-3'-phosphate
  modified_base 2: mod_base = OTHER; note = 2'-fluoroadenosine-3'-phosphate
  modified_base 3: mod_base = OTHER; note = 2'-O-methyluridine-3'-phosphate
  modified_base 4: mod_base = OTHER; note = 2'-O-methyladenosine-3'-phosphate
  modified_base 5: mod_base = OTHER; note = 2'-O-methyladenosine-3'-phosphate
  modified_base 6: mod_base = OTHER; note = 2'-fluoroadenosine-3'-phosphate
  modified_base 7: mod_base = OTHER; note = 2'-O-methyluridine-3'-phosphate
  modified_base 8: mod_base = OTHER; note = 2'-fluoroguanosine-3'-phosphate
  modified_base 9: mod_base = OTHER; note = 2'-fluorouridine-3'-phosphate
  modified_base 10: mod_base = OTHER; note = 2'-O-methylcytidine-3'-phosphate
  modified_base 11: mod_base = OTHER; note = 2'-O-methyluridine-3'-phosphate
  modified_base 12: mod_base = OTHER; note = 2'-O-methylguanosine-3'-phosphate
  modified_base 13: mod_base = OTHER; note = 2'-O-methylcytidine-3'-phosphate
  modified_base 14: mod_base = OTHER; note = 2'-fluorouridine-3'-phosphate
  modified_base 15: mod_base = OTHER; note = 2'-O-methyluridine-3'-phosphate
  modified_base 16: mod_base = OTHER; note = 2'-fluoroguanosine-3'-phosphate
  modified_base 17: mod_base = OTHER; note = 2'-O-methylcytidine-3'-phosphate
  modified_base 18: mod_base = OTHER; note = 2'-O-methyluridine-3'-phosphate
  modified_base 19: mod_base = OTHER; note = 2'-O-methyluridine-3'-phosphate
  modified_base 20: mod_base = OTHER; note = 2'-O-methylguanosine-3'-phosphate
  modified_base 21: mod_base = OTHER; note = 2'-O-methylguanosine-3'-phosphate
  modified_base 22: mod_base = OTHER; note = 2'-O-methylguanosine-3'-phosphate
  modified_base 23: mod_base = OTHER; note = 2'-O-methyluridine
gataaatgtctgcttgcttgggt

SEQ ID NO: 1570 - RNA, 21 nt, synthetic construct
  source 1..21: mol_type = other RNA
  modified_base 1: mod_base = OTHER; note = 2'-O-methylcytidine-3'-phosphate
  modified_base 2: mod_base = OTHER; note = 2'-O-methylcytidine-3'-phosphate
  modified_base 3: mod_base = OTHER; note = 2'-O-methyladenosine-3'-phosphate
  modified_base 4: mod_base = OTHER; note = 2'-O-methyladenosine-3'-phosphate
  modified_base 5: mod_base = OTHER; note = 2'-O-methylguanosine-3'-phosphate
  modified_base 6: mod_base = OTHER; note = 2'-O-methylcytidine-3'-phosphate
  modified_base 7: mod_base = OTHER; note = 2'-fluoroadenosine-3'-phosphate
  modified_base 8: mod_base = OTHER; note = 2'-O-methyladenosine-3'-phosphate
  modified_base 9: mod_base = OTHER; note = 2'-fluoroguanosine-3'-phosphate
  modified_base 10: mod_base = OTHER; note = 2'-fluorocytidine-3'-phosphate
  modified_base 11: mod_base = OTHER; note = 2'-fluoroadenosine-3'-phosphate
  modified_base 12: mod_base = OTHER; note = 2'-O-methylguanosine-3'-phosphate
  modified_base 13: mod_base = OTHER; note = 2'-O-methyladenosine-3'-phosphate
  modified_base 14: mod_base = OTHER; note = 2'-O-methylcytidine-3'-phosphate
  modified_base 15: mod_base = OTHER; note = 2'-O-methyladenosine-3'-phosphate
  modified_base 16: mod_base = OTHER; note = 2'-O-methyluridine-3'-phosphate
  modified_base 17: mod_base = OTHER; note = 2'-O-methyluridine-3'-phosphate
  modified_base 18: mod_base = OTHER; note = 2'-O-methyluridine-3'-phosphate
  modified_base 19: mod_base = OTHER; note = 2'-O-methyladenosine-3'-phosphate
  modified_base 20: mod_base = OTHER; note = 2'-O-methyluridine-3'-phosphate
  modified_base 21: mod_base = OTHER; note = 2'-O-methylcytidine
ccaagcaagcagacatttatc

SEQ ID NO: 1571 - RNA, 23 nt, synthetic construct
  source 1..23: mol_type = other RNA
  modified_base 1: mod_base = OTHER; note = 2'-O-methylguanosine-3'-phosphate
  modified_base 2: mod_base = OTHER; note = 2'-fluoroadenosine-3'-phosphate
  modified_base 3: mod_base = OTHER; note = 2'-O-methyluridine-3'-phosphate
  modified_base 4: mod_base = OTHER; note = 2'-O-methyladenosine-3'-phosphate
  modified_base 5: mod_base = OTHER; note = 2'-O-methyladenosine-3'-phosphate
  modified_base 6: mod_base = OTHER; note = 2'-fluoroadenosine-3'-phosphate
  modified_base 7: mod_base = OTHER; note = 2'-O-methyluridine-3'-phosphate
  modified_base 8: mod_base = OTHER; note = 2'-O-methylguanosine-3'-phosphate
  modified_base 9: mod_base = OTHER; note = 2'-O-methyluridine-3'-phosphate
  modified_base 10: mod_base = OTHER; note = 2'-O-methylcytidine-3'-phosphate
  modified_base 11: mod_base = OTHER; note = 2'-O-methyluridine-3'-phosphate
  modified_base 12: mod_base = OTHER; note = 2'-O-methylguanosine-3'-phosphate
  modified_base 13: mod_base = OTHER; note = 2'-O-methylcytidine-3'-phosphate
  modified_base 14: mod_base = OTHER; note = 2'-fluorouridine-3'-phosphate
  modified_base 15: mod_base = OTHER; note = 2'-O-methyluridine-3'-phosphate
  modified_base 16: mod_base = OTHER; note = 2'-fluoroguanosine-3'-phosphate
  modified_base 17: mod_base = OTHER; note = 2'-O-methylcytidine-3'-phosphate
  modified_base 18: mod_base = OTHER; note = 2'-O-methyluridine-3'-phosphate
  modified_base 19: mod_base = OTHER; note = 2'-O-methyluridine-3'-phosphate
  modified_base 20: mod_base = OTHER; note = 2'-O-methylguanosine-3'-phosphate
  modified_base 21: mod_base = OTHER; note = 2'-O-methylguanosine-3'-phosphate
  modified_base 22: mod_base = OTHER; note = 2'-O-methylguanosine-3'-phosphate
  modified_base 23: mod_base = OTHER; note = 2'-O-methyluridine
gataaatgtctgcttgcttgggt

SEQ ID NO: 1572 - RNA, 19 nt, synthetic construct
  source 1..19: mol_type = other RNA
  modified_base 1: mod_base = OTHER; note = 2'-O-methyladenosine-3'-phosphorothioate
  modified_base 2: mod_base = OTHER; note = 2'-O-methyladenosine-3'-phosphorothioate
  modified_base 3: mod_base = OTHER; note = 2'-O-methylguanosine-3'-phosphate
  modified_base 4: mod_base = OTHER; note = 2'-O-methylcytidine-3'-phosphate
  modified_base 5: mod_base = OTHER; note = 2'-O-methyladenosine-3'-phosphate
  modified_base 6: mod_base = OTHER; note = 2'-O-methyladenosine-3'-phosphate
  modified_base 7: mod_base = OTHER; note = 2'-fluoroguanosine-3'-phosphate
  modified_base 8: mod_base = OTHER; note = 2'-fluorocytidine-3'-phosphate
  modified_base 9: mod_base = OTHER; note = 2'-fluoroadenosine-3'-phosphate
  modified_base 10: mod_base = OTHER; note = 2'-O-methylguanosine-3'-phosphate
  modified_base 11: mod_base = OTHER; note = 2'-O-methyladenosine-3'-phosphate
  modified_base 12: mod_base = OTHER; note = 2'-O-methylcytidine-3'-phosphate
  modified_base 13: mod_base = OTHER; note = 2'-O-methyladenosine-3'-phosphate
  modified_base 14: mod_base = OTHER; note = 2'-O-methyluridine-3'-phosphate
  modified_base 15: mod_base = OTHER; note = 2'-O-methyluridine-3'-phosphate
  modified_base 16: mod_base = OTHER; note = 2'-O-methyluridine-3'-phosphate
  modified_base 17: mod_base = OTHER; note = 2'-O-methyladenosine-3'-phosphate
  modified_base 18: mod_base = OTHER; note = 2'-O-methyluridine-3'-phosphate
  modified_base 19: mod_base = OTHER; note = 2'-O-methylcytidine
aagcaagcagacatttatc

SEQ ID NO: 1573 - RNA, 21 nt, synthetic construct
  source 1..21: mol_type = other RNA
  modified_base 1: mod_base = OTHER; note = 2'-O-methylguanosine-3'-phosphorothioate
  modified_base 2: mod_base = OTHER; note = 2'-fluoroadenosine-3'-phosphorothioate
  modified_base 3: mod_base = OTHER; note = 2'-O-methyluridine-3'-phosphate
  modified_base 4: mod_base = OTHER; note = 2'-O-methyladenosine-3'-phosphate
  modified_base 5: mod_base = OTHER; note = 2'-O-methyladenosine-3'-phosphate
  modified_base 6: mod_base = OTHER; note = 2'-fluoroadenosine-3'-phosphate
  modified_base 7: mod_base = OTHER; note = 2'-O-methyluridine-3'-phosphate
  modified_base 8: mod_base = OTHER; note = 2'-O-methylguanosine-3'-phosphate
  modified_base 9: mod_base = OTHER; note = 2'-O-methyluridine-3'-phosphate
  modified_base 10: mod_base = OTHER; note = 2'-O-methylcytidine-3'-phosphate
  modified_base 11: mod_base = OTHER; note = 2'-O-methyluridine-3'-phosphate
  modified_base 12: mod_base = OTHER; note = 2'-O-methylguanosine-3'-phosphate
  modified_base 13: mod_base = OTHER; note = 2'-O-methylcytidine-3'-phosphate
  modified_base 14: mod_base = OTHER; note = 2'-fluorouridine-3'-phosphate
  modified_base 15: mod_base = OTHER; note = 2'-O-methyluridine-3'-phosphate
  modified_base 16: mod_base = OTHER; note = 2'-fluoroguanosine-3'-phosphate
  modified_base 17: mod_base = OTHER; note = 2'-O-methylcytidine-3'-phosphate
  modified_base 18: mod_base = OTHER; note = 2'-O-methyluridine-3'-phosphate
  modified_base 19: mod_base = OTHER; note = 2'-O-methyluridine-3'-phosphorothioate
  modified_base 20: mod_base = OTHER; note = 2'-O-methylguanosine-3'-phosphorothioate
  modified_base 21: mod_base = OTHER; note = 2'-O-methylguanosine
gataaatgtctgcttgcttgg

SEQ ID NO: 1574 - RNA, 19 nt, synthetic construct
  source 1..19: mol_type = other RNA
  modified_base 1: mod_base = OTHER; note = 2'-O-methyladenosine-3'-phosphorothioate
  modified_base 2: mod_base = OTHER; note = 2'-O-methyladenosine-3'-phosphorothioate
  modified_base 3: mod_base = OTHER; note = 2'-O-methylguanosine-3'-phosphate
  modified_base 4: mod_base = OTHER; note = 2'-O-methylcytidine-3'-phosphate
  modified_base 5: mod_base = OTHER; note = 2'-fluoroadenosine-3'-phosphate
  modified_base 6: mod_base = OTHER; note = 2'-O-methyladenosine-3'-phosphate
  modified_base 7: mod_base = OTHER; note = 2'-fluoroguanosine-3'-phosphate
  modified_base 8: mod_base = OTHER; note = 2'-fluorocytidine-3'-phosphate
  modified_base 9: mod_base = OTHER; note = 2'-fluoroadenosine-3'-phosphate
  modified_base 10: mod_base = OTHER; note = 2'-O-methylguanosine-3'-phosphate
  modified_base 11: mod_base = OTHER; note = 2'-O-methyladenosine-3'-phosphate
  modified_base 12: mod_base = OTHER; note = 2'-O-methylcytidine-3'-phosphate
  modified_base 13: mod_base = OTHER; note = 2'-O-methyladenosine-3'-phosphate
  modified_base 14: mod_base = OTHER; note = 2'-O-methyluridine-3'-phosphate
  modified_base 15: mod_base = OTHER; note = 2'-O-methyluridine-3'-phosphate
  modified_base 16: mod_base = OTHER; note = 2'-O-methyluridine-3'-phosphate
  modified_base 17: mod_base = OTHER; note = 2'-O-methyladenosine-3'-phosphate
  modified_base 18: mod_base = OTHER; note = 2'-O-methyluridine-3'-phosphate
  modified_base 19: mod_base = OTHER; note = 2'-O-methylcytidine
aagcaagcagacatttatc

SEQ ID NO: 1575 - RNA, 21 nt, synthetic construct
  source 1..21: mol_type = other RNA
  modified_base 1: mod_base = OTHER; note = 2'-O-methylguanosine-3'-phosphorothioate
  modified_base 2: mod_base = OTHER; note = 2'-fluoroadenosine-3'-phosphorothioate
  modified_base 3: mod_base = OTHER; note = 2'-O-methyluridine-3'-phosphate
  modified_base 4: mod_base = OTHER; note = 2'-O-methyladenosine-3'-phosphate
  modified_base 5: mod_base = OTHER; note = 2'-O-methyladenosine-3'-phosphate
  modified_base 6: mod_base = OTHER; note = 2'-fluoroadenosine-3'-phosphate
  modified_base 7: mod_base = OTHER; note = 2'-O-methyluridine-3'-phosphate
  modified_base 8: mod_base = OTHER; note = 2'-fluoroguanosine-3'-phosphate
  modified_base 9: mod_base = OTHER; note = 2'-fluorouridine-3'-phosphate
  modified_base 10: mod_base = OTHER; note = 2'-O-methylcytidine-3'-phosphate
  modified_base 11: mod_base = OTHER; note = 2'-O-methyluridine-3'-phosphate
  modified_base 12: mod_base = OTHER; note = 2'-O-methylguanosine-3'-phosphate
  modified_base 13: mod_base = OTHER; note = 2'-O-methylcytidine-3'-phosphate
  modified_base 14: mod_base = OTHER; note = 2'-fluorouridine-3'-phosphate
  modified_base 15: mod_base = OTHER; note = 2'-O-methyluridine-3'-phosphate
  modified_base 16: mod_base = OTHER; note = 2'-fluoroguanosine-3'-phosphate
  modified_base 17: mod_base = OTHER; note = 2'-O-methylcytidine-3'-phosphate
  modified_base 18: mod_base = OTHER; note = 2'-O-methyluridine-3'-phosphate
  modified_base 19: mod_base = OTHER; note = 2'-O-methyluridine-3'-phosphorothioate
  modified_base 20: mod_base = OTHER; note = 2'-O-methylguanosine-3'-phosphorothioate
  modified_base 21: mod_base = OTHER; note = 2'-O-methylguanosine
gataaatgtctgcttgcttgg

SEQ ID NO: 1576 - RNA, 19 nt, synthetic construct
  source 1..19: mol_type = other RNA
  modified_base 1: mod_base = OTHER; note = 2'-O-methyladenosine-3'-phosphorothioate
  modified_base 2: mod_base = OTHER; note = 2'-O-methyladenosine-3'-phosphorothioate
  modified_base 3: mod_base = OTHER; note = 2'-O-methylguanosine-3'-phosphate
  modified_base 4: mod_base = OTHER; note = 2'-O-methylcytidine-3'-phosphate
  modified_base 5: mod_base = OTHER; note = 2'-fluoroadenosine-3'-phosphate
  modified_base 6: mod_base = OTHER; note = 2'-O-methyladenosine-3'-phosphate
  modified_base 7: mod_base = OTHER; note = 2'-fluoroguanosine-3'-phosphate
  modified_base 8: mod_base = OTHER; note = 2'-fluorocytidine-3'-phosphate
  modified_base 9: mod_base = OTHER; note = 2'-fluoroadenosine-3'-phosphate
  modified_base 10: mod_base = OTHER; note = 2'-O-methylguanosine-3'-phosphate
  modified_base 11: mod_base = OTHER; note = 2'-O-methyladenosine-3'-phosphate
  modified_base 12: mod_base = OTHER; note = 2'-O-methylcytidine-3'-phosphate
  modified_base 13: mod_base = OTHER; note = 2'-O-methyladenosine-3'-phosphate
  modified_base 14: mod_base = OTHER; note = 2'-O-methyluridine-3'-phosphate
  modified_base 15: mod_base = OTHER; note = 2'-O-methyluridine-3'-phosphate
  modified_base 16: mod_base = OTHER; note = 2'-O-methyluridine-3'-phosphate
  modified_base 17: mod_base = OTHER; note = 2'-O-methyladenosine-3'-phosphate
  modified_base 18: mod_base = OTHER; note = 2'-O-methyluridine-3'-phosphate
  modified_base 19: mod_base = OTHER; note = 2'-O-methylcytidine
aagcaagcagacatttatc

SEQ ID NO: 1577 - RNA, 21 nt, synthetic construct
  source 1..21: mol_type = other RNA
  modified_base 1: mod_base = OTHER; note = 2'-O-methylguanosine-3'-phosphorothioate
  modified_base 2: mod_base = OTHER; note = 2'-fluoroadenosine-3'-phosphorothioate
  modified_base 3: mod_base = OTHER; note = 2'-O-methyluridine-3'-phosphate
  modified_base 4: mod_base = OTHER; note = 2'-O-methyladenosine-3'-phosphate
  modified_base 5: mod_base = OTHER; note = 2'-O-methyladenosine-3'-phosphate
  modified_base 6: mod_base = OTHER; note = 2'-fluoroadenosine-3'-phosphate
  modified_base 7: mod_base = OTHER; note = 2'-O-methyluridine-3'-phosphate
  modified_base 8: mod_base = OTHER; note = 2'-O-methylguanosine-3'-phosphate
  modified_base 9: mod_base = OTHER; note = 2'-O-methyluridine-3'-phosphate
  modified_base 10: mod_base = OTHER; note = 2'-O-methylcytidine-3'-phosphate
  modified_base 11: mod_base = OTHER; note = 2'-O-methyluridine-3'-phosphate
  modified_base 12: mod_base = OTHER; note = 2'-O-methylguanosine-3'-phosphate
  modified_base 13: mod_base = OTHER; note = 2'-O-methylcytidine-3'-phosphate
  modified_base 14: mod_base = OTHER; note = 2'-fluorouridine-3'-phosphate
  modified_base 15: mod_base = OTHER; note = 2'-O-methyluridine-3'-phosphate
  modified_base 16: mod_base = OTHER; note = 2'-fluoroguanosine-3'-phosphate
  modified_base 17: mod_base = OTHER; note = 2'-O-methylcytidine-3'-phosphate
  modified_base 18: mod_base = OTHER; note = 2'-O-methyluridine-3'-phosphate
  modified_base 19: mod_base = OTHER; note = 2'-O-methyluridine-3'-phosphorothioate
  modified_base 20: mod_base = OTHER; note = 2'-O-methylguanosine-3'-phosphorothioate
  modified_base 21: mod_base = OTHER; note = 2'-O-methylguanosine
gataaatgtctgcttgcttgg

SEQ ID NO: 1578 - RNA, 21 nt, synthetic construct
  source 1..21: mol_type = other RNA
  modified_base 1: mod_base = OTHER; note = 2'-O-methylcytidine-3'-phosphorothioate
  modified_base 2: mod_base = OTHER; note = 2'-O-methylcytidine-3'-phosphorothioate
  modified_base 3: mod_base = OTHER; note = 2'-O-methyladenosine-3'-phosphate
  modified_base 4: mod_base = OTHER; note = 2'-O-methyladenosine-3'-phosphate
  modified_base 5: mod_base = OTHER; note = 2'-O-methylguanosine-3'-phosphate
  modified_base 6: mod_base = OTHER; note = 2'-O-methylcytidine-3'-phosphate
  modified_base 7: mod_base = OTHER; note = 2'-O-methyladenosine-3'-phosphate
  modified_base 8: mod_base = OTHER; note = 2'-O-methyladenosine-3'-phosphate
  modified_base 9: mod_base = OTHER; note = 2'-fluoroguanosine-3'-phosphate
  modified_base 10: mod_base = OTHER; note = 2'-fluorocytidine-3'-phosphate
  modified_base 11: mod_base = OTHER; note = 2'-fluoroadenosine-3'-phosphate
  modified_base 12: mod_base = OTHER; note = 2'-O-methylguanosine-3'-phosphate
  modified_base 13: mod_base = OTHER; note = 2'-O-methyladenosine-3'-phosphate
  modified_base 14: mod_base = OTHER; note = 2'-O-methylcytidine-3'-phosphate
  modified_base 15: mod_base = OTHER; note = 2'-O-methyladenosine-3'-phosphate
  modified_base 16: mod_base = OTHER; note = 2'-O-methyluridine-3'-phosphate
  modified_base 17: mod_base = OTHER; note = 2'-O-methyluridine-3'-phosphate
  modified_base 18: mod_base = OTHER; note = 2'-O-methyluridine-3'-phosphate
  modified_base 19: mod_base = OTHER; note = 2'-O-methyladenosine-3'-phosphate
  modified_base 20: mod_base = OTHER; note = 2'-O-methyluridine-3'-phosphate
  modified_base 21: mod_base = OTHER; note = 2'-O-methylcytidine
ccaagcaagcagacatttatc

SEQ ID NO: 1579 - RNA, 23 nt, synthetic construct
  source 1..23: mol_type = other RNA
  modified_base 1: mod_base = OTHER; note = 2'-O-methylguanosine-3'-phosphorothioate
  modified_base 2: mod_base = OTHER; note = 2'-fluoroadenosine-3'-phosphorothioate
  modified_base 3: mod_base = OTHER; note = 2'-O-methyluridine-3'-phosphate
  modified_base 4: mod_base = OTHER; note = 2'-O-methyladenosine-3'-phosphate
  modified_base 5: mod_base = OTHER; note = 2'-O-methyladenosine-3'-phosphate
  modified_base 6: mod_base = OTHER; note = 2'-fluoroadenosine-3'-phosphate
  modified_base 7: mod_base = OTHER; note = 2'-O-methyluridine-3'-phosphate
  modified_base 8: mod_base = OTHER; note = 2'-O-methylguanosine-3'-phosphate
  modified_base 9: mod_base = OTHER; note = 2'-O-methyluridine-3'-phosphate
  modified_base 10: mod_base = OTHER; note = 2'-O-methylcytidine-3'-phosphate
  modified_base 11: mod_base = OTHER; note = 2'-O-methyluridine-3'-phosphate
  modified_base 12: mod_base = OTHER; note = 2'-O-methylguanosine-3'-phosphate
  modified_base 13: mod_base = OTHER; note = 2'-O-methylcytidine-3'-phosphate
  modified_base 14: mod_base = OTHER; note = 2'-fluorouridine-3'-phosphate
  modified_base 15: mod_base = OTHER; note = 2'-O-methyluridine-3'-phosphate
  modified_base 16: mod_base = OTHER; note = 2'-fluoroguanosine-3'-phosphate
  modified_base 17: mod_base = OTHER; note = 2'-O-methylcytidine-3'-phosphate
  modified_base 18: mod_base = OTHER; note = 2'-O-methyluridine-3'-phosphate
  modified_base 19: mod_base = OTHER; note = 2'-O-methyluridine-3'-phosphate
  modified_base 20: mod_base = OTHER; note = 2'-O-methylguanosine-3'-phosphate
  modified_base 21: mod_base = OTHER; note = 2'-O-methylguanosine-3'-phosphorothioate
  modified_base 22: mod_base = OTHER; note = 2'-O-methylguanosine-3'-phosphorothioate
  modified_base 23: mod_base = OTHER; note = 2'-O-methyluridine
gataaatgtctgcttgcttgggt

SEQ ID NO: 1580 - RNA, 21 nt, synthetic construct
  source 1..21: mol_type = other RNA
  modified_base 1: mod_base = OTHER; note = 2'-O-methylcytidine-3'-phosphorothioate
  modified_base 2: mod_base = OTHER; note = 2'-O-methylcytidine-3'-phosphorothioate
  modified_base 3: mod_base = OTHER; note = 2'-O-methyladenosine-3'-phosphate
  modified_base 4: mod_base = OTHER; note = 2'-O-methyladenosine-3'-phosphate
  modified_base 5: mod_base = OTHER; note = 2'-O-methylguanosine-3'-phosphate
  modified_base 6: mod_base = OTHER; note = 2'-O-methylcytidine-3'-phosphate
  modified_base 7: mod_base = OTHER; note = 2'-fluoroadenosine-3'-phosphate
  modified_base 8: mod_base = OTHER; note = 2'-O-methyladenosine-3'-phosphate
  modified_base 9: mod_base = OTHER; note = 2'-fluoroguanosine-3'-phosphate
  modified_base 10: mod_base = OTHER; note = 2'-fluorocytidine-3'-phosphate
  modified_base 11: mod_base = OTHER; note = 2'-fluoroadenosine-3'-phosphate
  modified_base 12: mod_base = OTHER; note = 2'-O-methylguanosine-3'-phosphate
  modified_base 13: mod_base = OTHER; note = 2'-O-methyladenosine-3'-phosphate
  modified_base 14: mod_base = OTHER; note = 2'-O-methylcytidine-3'-phosphate
  modified_base 15: mod_base = OTHER; note = 2'-O-methyladenosine-3'-phosphate
  modified_base 16: mod_base = OTHER; note = 2'-O-methyluridine-3'-phosphate
  modified_base 17: mod_base = OTHER; note = 2'-O-methyluridine-3'-phosphate
  modified_base 18: mod_base = OTHER; note = 2'-O-methyluridine-3'-phosphate
  modified_base 19: mod_base = OTHER; note = 2'-O-methyladenosine-3'-phosphate
  modified_base 20: mod_base = OTHER; note = 2'-O-methyluridine-3'-phosphate
  modified_base 21: mod_base = OTHER; note = 2'-O-methylcytidine
ccaagcaagcagacatttatc

SEQ ID NO: 1581 - RNA, 23 nt, synthetic construct
  source 1..23: mol_type = other RNA
  modified_base 1: mod_base = OTHER; note = 2'-O-methylguanosine-3'-phosphorothioate
  modified_base 2: mod_base = OTHER; note = 2'-fluoroadenosine-3'-phosphorothioate
  modified_base 3: mod_base = OTHER; note = 2'-O-methyluridine-3'-phosphate
  modified_base 4: mod_base = OTHER; note = 2'-O-methyladenosine-3'-phosphate
  modified_base 5: mod_base = OTHER; note = 2'-O-methyladenosine-3'-phosphate
  modified_base 6: mod_base = OTHER; note = 2'-fluoroadenosine-3'-phosphate
  modified_base 7: mod_base = OTHER; note = 2'-O-methyluridine-3'-phosphate
  modified_base 8: mod_base = OTHER; note = 2'-fluoroguanosine-3'-phosphate
  modified_base 9: mod_base = OTHER; note = 2'-fluorouridine-3'-phosphate
  modified_base 10: mod_base = OTHER; note = 2'-O-methylcytidine-3'-phosphate
  modified_base 11: mod_base = OTHER; note = 2'-O-methyluridine-3'-phosphate
  modified_base 12: mod_base = OTHER; note = 2'-O-methylguanosine-3'-phosphate
  modified_base 13: mod_base = OTHER; note = 2'-O-methylcytidine-3'-phosphate
  modified_base 14: mod_base = OTHER; note = 2'-fluorouridine-3'-phosphate
  modified_base 15: mod_base = OTHER; note = 2'-O-methyluridine-3'-phosphate
  modified_base 16: mod_base = OTHER; note = 2'-fluoroguanosine-3'-phosphate
  modified_base 17: mod_base = OTHER; note = 2'-O-methylcytidine-3'-phosphate
  modified_base 18: mod_base = OTHER; note = 2'-O-methyluridine-3'-phosphate
  modified_base 19: mod_base = OTHER; note = 2'-O-methyluridine-3'-phosphate
  modified_base 20: mod_base = OTHER; note = 2'-O-methylguanosine-3'-phosphate
  modified_base 21: mod_base = OTHER; note = 2'-O-methylguanosine-3'-phosphorothioate
  modified_base 22: mod_base = OTHER; note = 2'-O-methylguanosine-3'-phosphorothioate
  modified_base 23: mod_base = OTHER; note = 2'-O-methyluridine
gataaatgtctgcttgcttgggt

SEQ ID NO: 1582 - RNA, 21 nt, synthetic construct
  source 1..21: mol_type = other RNA
  modified_base 1: mod_base = OTHER; note = 2'-O-methylcytidine-3'-phosphorothioate
  modified_base 2: mod_base = OTHER; note = 2'-O-methylcytidine-3'-phosphorothioate
  modified_base 3: mod_base = OTHER; note = 2'-O-methyladenosine-3'-phosphate
  modified_base 4: mod_base = OTHER; note = 2'-O-methyladenosine-3'-phosphate
  modified_base 5: mod_base = OTHER; note = 2'-O-methylguanosine-3'-phosphate
  modified_base 6: mod_base = OTHER; note = 2'-O-methylcytidine-3'-phosphate
  modified_base 7: mod_base = OTHER; note = 2'-fluoroadenosine-3'-phosphate
  modified_base 8: mod_base = OTHER; note = 2'-O-methyladenosine-3'-phosphate
  modified_base 9: mod_base = OTHER; note = 2'-fluoroguanosine-3'-phosphate
  modified_base 10: mod_base = OTHER; note = 2'-fluorocytidine-3'-phosphate
  modified_base 11: mod_base = OTHER; note = 2'-fluoroadenosine-3'-phosphate
  modified_base 12: mod_base = OTHER; note = 2'-O-methylguanosine-3'-phosphate
  modified_base 13: mod_base = OTHER; note = 2'-O-methyladenosine-3'-phosphate
  modified_base 14: mod_base = OTHER; note = 2'-O-methylcytidine-3'-phosphate
  modified_base 15: mod_base = OTHER; note = 2'-O-methyladenosine-3'-phosphate
  modified_base 16: mod_base = OTHER; note = 2'-O-methyluridine-3'-phosphate
  modified_base 17: mod_base = OTHER; note = 2'-O-methyluridine-3'-phosphate
  modified_base 18: mod_base = OTHER; note = 2'-O-methyluridine-3'-phosphate
  modified_base 19: mod_base = OTHER; note = 2'-O-methyladenosine-3'-phosphate
  modified_base 20: mod_base = OTHER; note = 2'-O-methyluridine-3'-phosphate
  modified_base 21: mod_base = OTHER; note = 2'-O-methylcytidine
ccaagcaagcagacatttatc

SEQ ID NO: 1583 - RNA, 23 nt, synthetic construct
  source 1..23: mol_type = other RNA
  modified_base 1: mod_base = OTHER; note = 2'-O-methylguanosine-3'-phosphorothioate
  modified_base 2: mod_base = OTHER; note = 2'-fluoroadenosine-3'-phosphorothioate
  modified_base 3: mod_base = OTHER; note = 2'-O-methyluridine-3'-phosphate
  modified_base 4: mod_base = OTHER; note = 2'-O-methyladenosine-3'-phosphate
  modified_base 5: mod_base = OTHER; note = 2'-O-methyladenosine-3'-phosphate
  modified_base 6: mod_base = OTHER; note = 2'-fluoroadenosine-3'-phosphate
  modified_base 7: mod_base = OTHER; note = 2'-O-methyluridine-3'-phosphate
  modified_base 8: mod_base = OTHER; note = 2'-O-methylguanosine-3'-phosphate
  modified_base 9: mod_base = OTHER; note = 2'-O-methyluridine-3'-phosphate
  modified_base 10: mod_base = OTHER; note = 2'-O-methylcytidine-3'-phosphate
  modified_base 11: mod_base = OTHER; note = 2'-O-methyluridine-3'-phosphate
  modified_base 12: mod_base = OTHER; note = 2'-O-methylguanosine-3'-phosphate
  modified_base 13: mod_base = OTHER; note = 2'-O-methylcytidine-3'-phosphate
  modified_base 14: mod_base = OTHER; note = 2'-fluorouridine-3'-phosphate
  modified_base 15: mod_base = OTHER; note = 2'-O-methyluridine-3'-phosphate
  modified_base 16: mod_base = OTHER; note = 2'-fluoroguanosine-3'-phosphate
  modified_base 17: mod_base = OTHER; note = 2'-O-methylcytidine-3'-phosphate
  modified_base 18: mod_base = OTHER; note = 2'-O-methyluridine-3'-phosphate
  modified_base 19: mod_base = OTHER; note = 2'-O-methyluridine-3'-phosphate
  modified_base 20: mod_base = OTHER; note = 2'-O-methylguanosine-3'-phosphate
  modified_base 21: mod_base = OTHER; note = 2'-O-methylguanosine-3'-phosphorothioate
  modified_base 22: mod_base = OTHER; note = 2'-O-methylguanosine-3'-phosphorothioate
  modified_base 23: mod_base = OTHER; note = 2'-O-methyluridine
gataaatgtctgcttgcttgggt

SEQ ID NO: 1584 - RNA, 19 nt, synthetic construct
  source 1..19: mol_type = other RNA
  modified_base 1: mod_base = OTHER; note = 2'-O-methyladenosine-3'-phosphate
  modified_base 2: mod_base = OTHER; note = 2'-O-methyladenosine-3'-phosphate
  modified_base 3: mod_base = OTHER; note = 2'-O-methylguanosine-3'-phosphate
  modified_base 4: mod_base = OTHER; note = 2'-O-methylcytidine-3'-phosphate
  modified_base 5: mod_base = OTHER; note = 2'-O-methyladenosine-3'-phosphate
  modified_base 6: mod_base = OTHER; note = 2'-O-methyladenosine-3'-phosphate
  modified_base 7: mod_base = OTHER; note = 2'-fluoroguanosine-3'-phosphate
  modified_base 8: mod_base = OTHER; note = 2'-fluorocytidine-3'-phosphate
  modified_base 9: mod_base = OTHER; note = 2'-fluoroadenosine-3'-phosphate
  modified_base 10: mod_base = OTHER; note = 2'-O-methylguanosine-3'-phosphate
  modified_base 11: mod_base = OTHER; note = 2'-O-methyladenosine-3'-phosphate
  modified_base 12: mod_base = OTHER; note = 2'-O-methylcytidine-3'-phosphate
  modified_base 13: mod_base = OTHER; note = 2'-O-methyladenosine-3'-phosphate
  modified_base 14: mod_base = OTHER; note = 2'-O-methyluridine-3'-phosphate
  modified_base 15: mod_base = OTHER; note = 2'-O-methyluridine-3'-phosphate
  modified_base 16: mod_base = OTHER; note = 2'-O-methyluridine-3'-phosphate
  modified_base 17: mod_base = OTHER; note = 2'-O-methyladenosine-3'-phosphate
  modified_base 18: mod_base = OTHER; note = 2'-O-methyluridine-3'-phosphate
  modified_base 19: mod_base = OTHER; note = 2'-O-methylcytidine
aagcaagcagacatttatc

SEQ ID NO: 1585 - RNA, 21 nt, synthetic construct
  source 1..21: mol_type = other RNA
  modified_base 1: mod_base = OTHER; note = 5'-phosphate-2'-O-methylguanosine-3'-phosphate
  modified_base 2: mod_base = OTHER; note = 2'-fluoroadenosine-3'-phosphate
  modified_base 3: mod_base = OTHER; note = 2'-O-methyluridine-3'-phosphate
  modified_base 4: mod_base = OTHER; note = 2'-O-methyladenosine-3'-phosphate
  modified_base 5: mod_base = OTHER; note = 2'-O-methyladenosine-3'-phosphate
  modified_base 6: mod_base = OTHER; note = 2'-fluoroadenosine-3'-phosphate
  modified_base 7: mod_base = OTHER; note = 2'-O-methyluridine-3'-phosphate
  modified_base 8: mod_base = OTHER; note = 2'-O-methylguanosine-3'-phosphate
  modified_base 9: mod_base = OTHER; note = 2'-O-methyluridine-3'-phosphate
  modified_base 10: mod_base = OTHER; note = 2'-O-methylcytidine-3'-phosphate
  modified_base 11: mod_base = OTHER; note = 2'-O-methyluridine-3'-phosphate
  modified_base 12: mod_base = OTHER; note = 2'-O-methylguanosine-3'-phosphate
  modified_base 13: mod_base = OTHER; note = 2'-O-methylcytidine-3'-phosphate
  modified_base 14: mod_base = OTHER; note = 2'-fluorouridine-3'-phosphate
  modified_base 15: mod_base = OTHER; note = 2'-O-methyluridine-3'-phosphate
  modified_base 16: mod_base = OTHER; note = 2'-fluoroguanosine-3'-phosphate
  modified_base 17: mod_base = OTHER; note = 2'-O-methylcytidine-3'-phosphate
  modified_base 18: mod_base = OTHER; note = 2'-O-methyluridine-3'-phosphate
  modified_base 19: mod_base = OTHER; note = 2'-O-methyluridine-3'-phosphate
  modified_base 20: mod_base = OTHER; note = 2'-O-methylguanosine-3'-phosphate
  modified_base 21: mod_base = OTHER; note = 2'-O-methylguanosine
gataaatgtctgcttgcttgg

SEQ ID NO: 1586 - RNA, 19 nt, synthetic construct
  source 1..19: mol_type = other RNA
  modified_base 1: mod_base = OTHER; note = 2'-O-methyladenosine-3'-phosphate
  modified_base 2: mod_base = OTHER; note = 2'-O-methyladenosine-3'-phosphate
  modified_base 3: mod_base = OTHER; note = 2'-O-methylguanosine-3'-phosphate
  modified_base 4: mod_base = OTHER; note = 2'-O-methylcytidine-3'-phosphate
  modified_base 5: mod_base = OTHER; note = 2'-fluoroadenosine-3'-phosphate
  modified_base 6: mod_base = OTHER; note = 2'-O-methyladenosine-3'-phosphate
  modified_base 7: mod_base = OTHER; note = 2'-fluoroguanosine-3'-phosphate
  modified_base 8: mod_base = OTHER; note = 2'-fluorocytidine-3'-phosphate
  modified_base 9: mod_base = OTHER; note = 2'-fluoroadenosine-3'-phosphate
  modified_base 10: mod_base = OTHER; note = 2'-O-methylguanosine-3'-phosphate
  modified_base 11: mod_base = OTHER; note = 2'-O-methyladenosine-3'-phosphate
  modified_base 12: mod_base = OTHER; note = 2'-O-methylcytidine-3'-phosphate
  modified_base 13: mod_base = OTHER; note = 2'-O-methyladenosine-3'-phosphate
  modified_base 14: mod_base = OTHER; note = 2'-O-methyluridine-3'-phosphate
  modified_base 15: mod_base = OTHER; note = 2'-O-methyluridine-3'-phosphate
  modified_base 16: mod_base = OTHER; note = 2'-O-methyluridine-3'-phosphate
  modified_base 17: mod_base = OTHER; note = 2'-O-methyladenosine-3'-phosphate
  modified_base 18: mod_base = OTHER; note = 2'-O-methyluridine-3'-phosphate
  modified_base 19: mod_base = OTHER; note = 2'-O-methylcytidine
aagcaagcagacatttatc

SEQ ID NO: 1587 - RNA, 21 nt, synthetic construct
  source 1..21: mol_type = other RNA
  modified_base 1: mod_base = OTHER; note = 5'-phosphate-2'-O-methylguanosine-3'-phosphate
  modified_base 2: mod_base = OTHER; note = 2'-fluoroadenosine-3'-phosphate
  modified_base 3: mod_base = OTHER; note = 2'-O-methyluridine-3'-phosphate
  modified_base 4: mod_base = OTHER; note = 2'-O-methyladenosine-3'-phosphate
  modified_base 5: mod_base = OTHER; note = 2'-O-methyladenosine-3'-phosphate
  modified_base 6: mod_base = OTHER; note = 2'-fluoroadenosine-3'-phosphate
  modified_base 7: mod_base = OTHER; note = 2'-O-methyluridine-3'-phosphate
  modified_base 8: mod_base = OTHER; note = 2'-fluoroguanosine-3'-phosphate
  modified_base 9: mod_base = OTHER; note = 2'-fluorouridine-3'-phosphate
  modified_base 10: mod_base = OTHER; note = 2'-O-methylcytidine-3'-phosphate
  modified_base 11: mod_base = OTHER; note = 2'-O-methyluridine-3'-phosphate
  modified_base 12: mod_base = OTHER; note = 2'-O-methylguanosine-3'-phosphate
  modified_base 13: mod_base = OTHER; note = 2'-O-methylcytidine-3'-phosphate
  modified_base 14: mod_base = OTHER; note = 2'-fluorouridine-3'-phosphate
  modified_base 15: mod_base = OTHER; note = 2'-O-methyluridine-3'-phosphate
  modified_base 16: mod_base = OTHER; note = 2'-fluoroguanosine-3'-phosphate
  modified_base 17: mod_base = OTHER; note = 2'-O-methylcytidine-3'-phosphate
  modified_base 18: mod_base = OTHER; note = 2'-O-methyluridine-3'-phosphate
  modified_base 19: mod_base = OTHER; note = 2'-O-methyluridine-3'-phosphate
  modified_base 20: mod_base = OTHER; note = 2'-O-methylguanosine-3'-phosphate
  modified_base 21: mod_base = OTHER; note = 2'-O-methylguanosine
gataaatgtctgcttgcttgg

SEQ ID NO: 1588 - RNA, 19 nt, synthetic construct
  source 1..19: mol_type = other RNA
  modified_base 1: mod_base = OTHER; note = 2'-O-methyladenosine-3'-phosphate
  modified_base 2: mod_base = OTHER; note = 2'-O-methyladenosine-3'-phosphate
  modified_base 3: mod_base = OTHER; note = 2'-O-methylguanosine-3'-phosphate
  modified_base 4: mod_base = OTHER; note = 2'-O-methylcytidine-3'-phosphate
  modified_base 5: mod_base = OTHER; note = 2'-fluoroadenosine-3'-phosphate
  modified_base 6: mod_base = OTHER; note = 2'-O-methyladenosine-3'-phosphate
  modified_base 7: mod_base = OTHER; note = 2'-fluoroguanosine-3'-phosphate
  modified_base 8: mod_base = OTHER; note = 2'-fluorocytidine-3'-phosphate
  modified_base 9: mod_base = OTHER; note = 2'-fluoroadenosine-3'-phosphate
  modified_base 10: mod_base = OTHER; note = 2'-O-methylguanosine-3'-phosphate
  modified_base 11: mod_base = OTHER; note = 2'-O-methyladenosine-3'-phosphate
  modified_base 12: mod_base = OTHER; note = 2'-O-methylcytidine-3'-phosphate
  modified_base 13: mod_base = OTHER; note = 2'-O-methyladenosine-3'-phosphate
  modified_base 14: mod_base = OTHER; note = 2'-O-methyluridine-3'-phosphate
  modified_base 15: mod_base = OTHER; note = 2'-O-methyluridine-3'-phosphate
  modified_base 16: mod_base = OTHER; note = 2'-O-methyluridine-3'-phosphate
  modified_base 17: mod_base = OTHER; note = 2'-O-methyladenosine-3'-phosphate
  modified_base 18: mod_base = OTHER; note = 2'-O-methyluridine-3'-phosphate
  modified_base 19: mod_base = OTHER; note = 2'-O-methylcytidine
aagcaagcagacatttatc

SEQ ID NO: 1589 - RNA, 21 nt, synthetic construct
  source 1..21: mol_type = other RNA
  modified_base 1: mod_base = OTHER; note = 5'-phosphate-2'-O-methylguanosine-3'-phosphate
  modified_base 2: mod_base = OTHER; note = 2'-fluoroadenosine-3'-phosphate
  modified_base 3: mod_base = OTHER; note = 2'-O-methyluridine-3'-phosphate
  modified_base 4: mod_base = OTHER; note = 2'-O-methyladenosine-3'-phosphate
  modified_base 5: mod_base = OTHER; note = 2'-O-methyladenosine-3'-phosphate
  modified_base 6: mod_base = OTHER; note = 2'-fluoroadenosine-3'-phosphate
  modified_base 7: mod_base = OTHER; note = 2'-O-methyluridine-3'-phosphate
  modified_base 8: mod_base = OTHER; note = 2'-O-methylguanosine-3'-phosphate
  modified_base 9: mod_base = OTHER; note = 2'-O-methyluridine-3'-phosphate
  modified_base 10: mod_base = OTHER; note = 2'-O-methylcytidine-3'-phosphate
  modified_base 11: mod_base = OTHER; note = 2'-O-methyluridine-3'-phosphate
  modified_base 12: mod_base = OTHER; note = 2'-O-methylguanosine-3'-phosphate
  modified_base 13: mod_base = OTHER; note = 2'-O-methylcytidine-3'-phosphate
  modified_base 14: mod_base = OTHER; note = 2'-fluorouridine-3'-phosphate
  modified_base 15: mod_base = OTHER; note = 2'-O-methyluridine-3'-phosphate
  modified_base 16: mod_base = OTHER; note = 2'-fluoroguanosine-3'-phosphate
  modified_base 17: mod_base = OTHER; note = 2'-O-methylcytidine-3'-phosphate
  modified_base 18: mod_base = OTHER; note = 2'-O-methyluridine-3'-phosphate
  modified_base 19: mod_base = OTHER; note = 2'-O-methyluridine-3'-phosphate
  modified_base 20: mod_base = OTHER; note = 2'-O-methylguanosine-3'-phosphate
  modified_base 21: mod_base = OTHER; note = 2'-O-methylguanosine
gataaatgtctgcttgcttgg

SEQ ID NO: 1590 - RNA, 21 nt, synthetic construct
  source 1..21: mol_type = other RNA
  modified_base 1: mod_base = OTHER; note = 2'-O-methylcytidine-3'-phosphate
  modified_base 2: mod_base = OTHER; note = 2'-O-methylcytidine-3'-phosphate
  modified_base 3: mod_base = OTHER; note = 2'-O-methyladenosine-3'-phosphate
  modified_base 4: mod_base = OTHER; note = 2'-O-methyladenosine-3'-phosphate
  modified_base 5: mod_base = OTHER; note = 2'-O-methylguanosine-3'-phosphate
  modified_base 6: mod_base = OTHER; note = 2'-O-methylcytidine-3'-phosphate
  modified_base 7: mod_base = OTHER; note = 2'-O-methyladenosine-3'-phosphate
  modified_base 8: mod_base = OTHER; note = 2'-O-methyladenosine-3'-phosphate
  modified_base 9: mod_base = OTHER; note = 2'-fluoroguanosine-3'-phosphate
  modified_base 10: mod_base = OTHER; note = 2'-fluorocytidine-3'-phosphate
  modified_base 11: mod_base = OTHER; note = 2'-fluoroadenosine-3'-phosphate
  modified_base 12: mod_base = OTHER; note = 2'-O-methylguanosine-3'-phosphate
  modified_base 13: mod_base = OTHER; note = 2'-O-methyladenosine-3'-phosphate
  modified_base 14: mod_base = OTHER; note = 2'-O-methylcytidine-3'-phosphate
  modified_base 15: mod_base = OTHER; note = 2'-O-methyladenosine-3'-phosphate
  modified_base 16: mod_base = OTHER; note = 2'-O-methyluridine-3'-phosphate
  modified_base 17: mod_base = OTHER; note = 2'-O-methyluridine-3'-phosphate
  modified_base 18: mod_base = OTHER; note = 2'-O-methyluridine-3'-phosphate
  modified_base 19: mod_base = OTHER; note = 2'-O-methyladenosine-3'-phosphate
  modified_base 20: mod_base = OTHER; note = 2'-O-methyluridine-3'-phosphate
  modified_base 21: mod_base = OTHER; note = 2'-O-methylcytidine
ccaagcaagcagacatttatc

SEQ ID NO: 1591 - RNA, 23 nt, synthetic construct
  source 1..23: mol_type = other RNA
  modified_base 1: mod_base = OTHER; note = 5'-phosphate-2'-O-methylguanosine-3'-phosphate
  modified_base 2: mod_base = OTHER; note = 2'-fluoroadenosine-3'-phosphate
  modified_base 3: mod_base = OTHER; note = 2'-O-methyluridine-3'-phosphate
  modified_base 4: mod_base = OTHER; note = 2'-O-methyladenosine-3'-phosphate
  modified_base 5: mod_base = OTHER; note = 2'-O-methyladenosine-3'-phosphate
  modified_base 6: mod_base = OTHER; note = 2'-fluoroadenosine-3'-phosphate
  modified_base 7: mod_base = OTHER; note = 2'-O-methyluridine-3'-phosphate
  modified_base 8: mod_base = OTHER; note = 2'-O-methylguanosine-3'-phosphate
  modified_base 9: mod_base = OTHER; note = 2'-O-methyluridine-3'-phosphate
  modified_base 10: mod_base = OTHER; note = 2'-O-methylcytidine-3'-phosphate
  modified_base 11: mod_base = OTHER; note = 2'-O-methyluridine-3'-phosphate
  modified_base 12: mod_base = OTHER; note = 2'-O-methylguanosine-3'-phosphate
  modified_base 13: mod_base = OTHER; note = 2'-O-methylcytidine-3'-phosphate
  modified_base 14: mod_base = OTHER; note = 2'-fluorouridine-3'-phosphate
  modified_base 15: mod_base = OTHER; note = 2'-O-methyluridine-3'-phosphate
  modified_base 16: mod_base = OTHER; note = 2'-fluoroguanosine-3'-phosphate
  modified_base 17: mod_base = OTHER; note = 2'-O-methylcytidine-3'-phosphate
  modified_base 18: mod_base = OTHER; note = 2'-O-methyluridine-3'-phosphate
  modified_base 19: mod_base = OTHER; note = 2'-O-methyluridine-3'-phosphate
  modified_base 20: mod_base = OTHER; note = 2'-O-methylguanosine-3'-phosphate
  modified_base 21: mod_base = OTHER; note = 2'-O-methylguanosine-3'-phosphate
  modified_base 22: mod_base = OTHER; note = 2'-O-methylguanosine-3'-phosphate
  modified_base 23: mod_base = OTHER; note = 2'-O-methyluridine
gataaatgtctgcttgcttgggt

SEQ ID NO: 1592 - RNA, 21 nt, synthetic construct
  source 1..21: mol_type = other RNA
  modified_base 1: mod_base = OTHER; note = 2'-O-methylcytidine-3'-phosphate
  modified_base 2: mod_base = OTHER; note = 2'-O-methylcytidine-3'-phosphate
  modified_base 3: mod_base = OTHER; note = 2'-O-methyladenosine-3'-phosphate
  modified_base 4: mod_base = OTHER; note = 2'-O-methyladenosine-3'-phosphate
  modified_base 5: mod_base = OTHER; note = 2'-O-methylguanosine-3'-phosphate
  modified_base 6: mod_base = OTHER; note = 2'-O-methylcytidine-3'-phosphate
  modified_base 7: mod_base = OTHER; note = 2'-fluoroadenosine-3'-phosphate
  modified_base 8: mod_base = OTHER; note = 2'-O-methyladenosine-3'-phosphate
  modified_base 9: mod_base = OTHER; note = 2'-fluoroguanosine-3'-phosphate
  modified_base 10: mod_base = OTHER; note = 2'-fluorocytidine-3'-phosphate
  modified_base 11: mod_base = OTHER; note = 2'-fluoroadenosine-3'-phosphate
  modified_base 12: mod_base = OTHER; note = 2'-O-methylguanosine-3'-phosphate
  modified_base 13: mod_base = OTHER; note = 2'-O-methyladenosine-3'-phosphate
  modified_base 14: mod_base = OTHER; note = 2'-O-methylcytidine-3'-phosphate
  modified_base 15: mod_base = OTHER; note = 2'-O-methyladenosine-3'-phosphate
  modified_base 16: mod_base = OTHER; note = 2'-O-methyluridine-3'-phosphate
  modified_base 17: mod_base = OTHER; note = 2'-O-methyluridine-3'-phosphate
  modified_base 18: mod_base = OTHER; note = 2'-O-methyluridine-3'-phosphate
  modified_base 19: mod_base = OTHER; note = 2'-O-methyladenosine-3'-phosphate
  modified_base 20: mod_base = OTHER; note = 2'-O-methyluridine-3'-phosphate
  modified_base 21: mod_base = OTHER; note = 2'-O-methylcytidine
ccaagcaagcagacatttatc

SEQ ID NO: 1593 - RNA, 23 nt, synthetic construct
  source 1..23: mol_type = other RNA
  modified_base 1: mod_base = OTHER; note = 5'-phosphate-2'-O-methylguanosine-3'-phosphate
  modified_base 2: mod_base = OTHER; note = 2'-fluoroadenosine-3'-phosphate
  modified_base 3: mod_base = OTHER; note = 2'-O-methyluridine-3'-phosphate
  modified_base 4: mod_base = OTHER; note = 2'-O-methyladenosine-3'-phosphate
  modified_base 5: mod_base = OTHER; note = 2'-O-methyladenosine-3'-phosphate
  modified_base 6: mod_base = OTHER; note = 2'-fluoroadenosine-3'-phosphate
  modified_base 7: mod_base = OTHER; note = 2'-O-methyluridine-3'-phosphate
  modified_base 8: mod_base = OTHER; note = 2'-fluoroguanosine-3'-phosphate
  modified_base 9: mod_base = OTHER; note = 2'-fluorouridine-3'-phosphate
  modified_base 10: mod_base = OTHER; note = 2'-O-methylcytidine-3'-phosphate
  modified_base 11: mod_base = OTHER; note = 2'-O-methyluridine-3'-phosphate
  modified_base 12: mod_base = OTHER; note = 2'-O-methylguanosine-3'-phosphate
  modified_base 13: mod_base = OTHER; note = 2'-O-methylcytidine-3'-phosphate
  modified_base 14: mod_base = OTHER; note = 2'-fluorouridine-3'-phosphate
  modified_base 15: mod_base = OTHER; note = 2'-O-methyluridine-3'-phosphate
  modified_base 16: mod_base = OTHER; note = 2'-fluoroguanosine-3'-phosphate
  modified_base 17: mod_base = OTHER; note = 2'-O-methylcytidine-3'-phosphate
  modified_base 18: mod_base = OTHER; note = 2'-O-methyluridine-3'-phosphate
  modified_base 19: mod_base = OTHER; note = 2'-O-methyluridine-3'-phosphate
  modified_base 20: mod_base = OTHER; note = 2'-O-methylguanosine-3'-phosphate
  modified_base 21: mod_base = OTHER; note = 2'-O-methylguanosine-3'-phosphate
  modified_base 22: mod_base = OTHER; note = 2'-O-methylguanosine-3'-phosphate
  modified_base 23: mod_base = OTHER; note = 2'-O-methyluridine
gataaatgtctgcttgcttgggt

SEQ ID NO: 1594 - RNA, 21 nt, synthetic construct
  source 1..21: mol_type = other RNA
  modified_base 1: mod_base = OTHER; note = 2'-O-methylcytidine-3'-phosphate
  modified_base 2: mod_base = OTHER; note = 2'-O-methylcytidine-3'-phosphate
  modified_base 3: mod_base = OTHER; note = 2'-O-methyladenosine-3'-phosphate
  modified_base 4: mod_base = OTHER; note = 2'-O-methyladenosine-3'-phosphate
  modified_base 5: mod_base = OTHER; note = 2'-O-methylguanosine-3'-phosphate
  modified_base 6: mod_base = OTHER; note = 2'-O-methylcytidine-3'-phosphate
  modified_base 7: mod_base = OTHER; note = 2'-fluoroadenosine-3'-phosphate
  modified_base 8: mod_base = OTHER; note = 2'-O-methyladenosine-3'-phosphate
  modified_base 9: mod_base = OTHER; note = 2'-fluoroguanosine-3'-phosphate
  modified_base 10: mod_base = OTHER; note = 2'-fluorocytidine-3'-phosphate
  modified_base 11: mod_base = OTHER; note = 2'-fluoroadenosine-3'-phosphate
  modified_base 12: mod_base = OTHER; note = 2'-O-methylguanosine-3'-phosphate
  modified_base 13: mod_base = OTHER; note = 2'-O-methyladenosine-3'-phosphate
  modified_base 14: mod_base = OTHER; note = 2'-O-methylcytidine-3'-phosphate
  modified_base 15: mod_base = OTHER; note = 2'-O-methyladenosine-3'-phosphate
  modified_base 16: mod_base = OTHER; note = 2'-O-methyluridine-3'-phosphate
  modified_base 17: mod_base = OTHER; note = 2'-O-methyluridine-3'-phosphate
  modified_base 18: mod_base = OTHER; note = 2'-O-methyluridine-3'-phosphate
  modified_base 19: mod_base = OTHER; note = 2'-O-methyladenosine-3'-phosphate
  modified_base 20: mod_base = OTHER; note = 2'-O-methyluridine-3'-phosphate
  modified_base 21: mod_base = OTHER; note = 2'-O-methylcytidine
ccaagcaagcagacatttatc

SEQ ID NO: 1595 - RNA, 23 nt, synthetic construct
  source 1..23: mol_type = other RNA
  modified_base 1: mod_base = OTHER; note = 5'-phosphate-2'-O-methylguanosine-3'-phosphate
  modified_base 2: mod_base = OTHER; note = 2'-fluoroadenosine-3'-phosphate
  modified_base 3: mod_base = OTHER; note = 2'-O-methyluridine-3'-phosphate
  modified_base 4: mod_base = OTHER; note = 2'-O-methyladenosine-3'-phosphate
  modified_base 5: mod_base = OTHER; note = 2'-O-methyladenosine-3'-phosphate
  modified_base 6: mod_base = OTHER; note = 2'-fluoroadenosine-3'-phosphate
  modified_base 7: mod_base = OTHER; note = 2'-O-methyluridine-3'-phosphate
  modified_base 8: mod_base = OTHER; note = 2'-O-methylguanosine-3'-phosphate
  modified_base 9: mod_base = OTHER; note = 2'-O-methyluridine-3'-phosphate
  modified_base 10: mod_base = OTHER; note = 2'-O-methylcytidine-3'-phosphate
  modified_base 11: mod_base = OTHER; note = 2'-O-methyluridine-3'-phosphate
  modified_base 12: mod_base = OTHER; note = 2'-O-methylguanosine-3'-phosphate
  modified_base 13: mod_base = OTHER; note = 2'-O-methylcytidine-3'-phosphate
  modified_base 14: mod_base = OTHER; note = 2'-fluorouridine-3'-phosphate
  modified_base 15: mod_base = OTHER; note = 2'-O-methyluridine-3'-phosphate
  modified_base 16: mod_base = OTHER; note = 2'-fluoroguanosine-3'-phosphate
  modified_base 17: mod_base = OTHER; note = 2'-O-methylcytidine-3'-phosphate
  modified_base 18: mod_base = OTHER; note = 2'-O-methyluridine-3'-phosphate
  modified_base 19: mod_base = OTHER; note = 2'-O-methyluridine-3'-phosphate
  modified_base 20: mod_base = OTHER; note = 2'-O-methylguanosine-3'-phosphate
  modified_base 21: mod_base = OTHER; note = 2'-O-methylguanosine-3'-phosphate
  modified_base 22: mod_base = OTHER; note = 2'-O-methylguanosine-3'-phosphate
  modified_base 23: mod_base = OTHER; note = 2'-O-methyluridine
gataaatgtctgcttgcttgggt

SEQ ID NO: 1596 - RNA, 19 nt, synthetic construct
  source 1..19: mol_type = other RNA
  modified_base 1: mod_base = OTHER; note = 2'-O-methyladenosine-3'-phosphorothioate
  modified_base 2: mod_base = OTHER; note = 2'-O-methyladenosine-3'-phosphorothioate
  modified_base 3: mod_base = OTHER; note = 2'-O-methylguanosine-3'-phosphate
  modified_base 4: mod_base = OTHER; note = 2'-O-methylcytidine-3'-phosphate
  modified_base 5: mod_base = OTHER; note = 2'-O-methyladenosine-3'-phosphate
  modified_base 6: mod_base = OTHER; note = 2'-O-methyladenosine-3'-phosphate
  modified_base 7: mod_base = OTHER; note = 2'-fluoroguanosine-3'-phosphate
  modified_base 8: mod_base = OTHER; note = 2'-fluorocytidine-3'-phosphate
  modified_base 9: mod_base = OTHER; note = 2'-fluoroadenosine-3'-phosphate
  modified_base 10: mod_base = OTHER; note = 2'-O-methylguanosine-3'-phosphate
  modified_base 11: mod_base = OTHER; note = 2'-O-methyladenosine-3'-phosphate
  modified_base 12: mod_base = OTHER; note = 2'-O-methylcytidine-3'-phosphate
  modified_base 13: mod_base = OTHER; note = 2'-O-methyladenosine-3'-phosphate
  modified_base 14: mod_base = OTHER; note = 2'-O-methyluridine-3'-phosphate
  modified_base 15: mod_base = OTHER; note = 2'-O-methyluridine-3'-phosphate
  modified_base 16: mod_base = OTHER; note = 2'-O-methyluridine-3'-phosphate
  modified_base 17: mod_base = OTHER; note = 2'-O-methyladenosine-3'-phosphate
  modified_base 18: mod_base = OTHER; note = 2'-O-methyluridine-3'-phosphate
  modified_base 19: mod_base = OTHER; note = 2'-O-methylcytidine
aagcaagcagacatttatc

SEQ ID NO: 1597 - RNA, 21 nt, synthetic construct
  source 1..21: mol_type = other RNA
  modified_base 1: mod_base = OTHER; note = 5'-phosphate-2'-O-methylguanosine-3'-phosphorothioate
  modified_base 2: mod_base = OTHER; note = 2'-fluoroadenosine-3'-phosphorothioate
  modified_base 3: mod_base = OTHER; note = 2'-O-methyluridine-3'-phosphate
  modified_base 4: mod_base = OTHER; note = 2'-O-methyladenosine-3'-phosphate
  modified_base 5: mod_base = OTHER; note = 2'-O-methyladenosine-3'-phosphate
  modified_base 6: mod_base = OTHER; note = 2'-fluoroadenosine-3'-phosphate
  modified_base 7: mod_base = OTHER; note = 2'-O-methyluridine-3'-phosphate
  modified_base 8: mod_base = OTHER; note = 2'-O-methylguanosine-3'-phosphate
  modified_base 9: mod_base = OTHER; note = 2'-O-methyluridine-3'-phosphate
  modified_base 10: mod_base = OTHER; note = 2'-O-methylcytidine-3'-phosphate
  modified_base 11: mod_base = OTHER; note = 2'-O-methyluridine-3'-phosphate
  modified_base 12: mod_base = OTHER; note = 2'-O-methylguanosine-3'-phosphate
  modified_base 13: mod_base = OTHER; note = 2'-O-methylcytidine-3'-phosphate
  modified_base 14: mod_base = OTHER; note = 2'-fluorouridine-3'-phosphate
  modified_base 15: mod_base = OTHER; note = 2'-O-methyluridine-3'-phosphate
  modified_base 16: mod_base = OTHER; note = 2'-fluoroguanosine-3'-phosphate
  modified_base 17: mod_base = OTHER; note = 2'-O-methylcytidine-3'-phosphate
  modified_base 18: mod_base = OTHER; note = 2'-O-methyluridine-3'-phosphate
  modified_base 19: mod_base = OTHER; note = 2'-O-methyluridine-3'-phosphorothioate
  modified_base 20: mod_base = OTHER; note = 2'-O-methylguanosine-3'-phosphorothioate
  modified_base 21: mod_base = OTHER; note = 2'-O-methylguanosine
gataaatgtctgcttgcttgg

SEQ ID NO: 1598 - RNA, 19 nt, synthetic construct
  source 1..19: mol_type = other RNA
  modified_base 1: mod_base = OTHER; note = 2'-O-methyladenosine-3'-phosphorothioate
  modified_base 2: mod_base = OTHER; note = 2'-O-methyladenosine-3'-phosphorothioate
  modified_base 3: mod_base = OTHER; note = 2'-O-methylguanosine-3'-phosphate
  modified_base 4: mod_base = OTHER; note = 2'-O-methylcytidine-3'-phosphate
  modified_base 5: mod_base = OTHER; note = 2'-fluoroadenosine-3'-phosphate
  modified_base 6: mod_base = OTHER; note = 2'-O-methyladenosine-3'-phosphate
  modified_base 7: mod_base = OTHER; note = 2'-fluoroguanosine-3'-phosphate
  modified_base 8: mod_base = OTHER; note = 2'-fluorocytidine-3'-phosphate
  modified_base 9: mod_base = OTHER; note = 2'-fluoroadenosine-3'-phosphate
  modified_base 10: mod_base = OTHER; note = 2'-O-methylguanosine-3'-phosphate
  modified_base 11: mod_base = OTHER; note = 2'-O-methyladenosine-3'-phosphate
  modified_base 12: mod_base = OTHER; note = 2'-O-methylcytidine-3'-phosphate
  modified_base 13: mod_base = OTHER; note = 2'-O-methyladenosine-3'-phosphate
  modified_base 14: mod_base = OTHER; note = 2'-O-methyluridine-3'-phosphate
  modified_base 15: mod_base = OTHER; note = 2'-O-methyluridine-3'-phosphate
  modified_base 16: mod_base = OTHER; note = 2'-O-methyluridine-3'-phosphate
  modified_base 17: mod_base = OTHER; note = 2'-O-methyladenosine-3'-phosphate
  modified_base 18: mod_base = OTHER; note = 2'-O-methyluridine-3'-phosphate
  modified_base 19: mod_base = OTHER; note = 2'-O-methylcytidine
aagcaagcagacatttatc

SEQ ID NO: 1599 - RNA, 21 nt, synthetic construct
  source 1..21: mol_type = other RNA
  modified_base 1: mod_base = OTHER; note = 5'-phosphate-2'-O-methylguanosine-3'-phosphorothioate
  modified_base 2: mod_base = OTHER; note = 2'-fluoroadenosine-3'-phosphorothioate
  modified_base 3: mod_base = OTHER; note = 2'-O-methyluridine-3'-phosphate
  modified_base 4: mod_base = OTHER; note = 2'-O-methyladenosine-3'-phosphate
  modified_base 5: mod_base = OTHER; note = 2'-O-methyladenosine-3'-phosphate
  modified_base 6: mod_base = OTHER; note = 2'-fluoroadenosine-3'-phosphate
  modified_base 7: mod_base = OTHER; note = 2'-O-methyluridine-3'-phosphate
  modified_base 8: mod_base = OTHER; note = 2'-fluoroguanosine-3'-phosphate
  modified_base 9: mod_base = OTHER; note = 2'-fluorouridine-3'-phosphate
  modified_base 10: mod_base = OTHER; note = 2'-O-methylcytidine-3'-phosphate
  modified_base 11: mod_base = OTHER; note = 2'-O-methyluridine-3'-phosphate
  modified_base 12: mod_base = OTHER; note = 2'-O-methylguanosine-3'-phosphate
  modified_base 13: mod_base = OTHER; note = 2'-O-methylcytidine-3'-phosphate
  modified_base 14: mod_base = OTHER; note = 2'-fluorouridine-3'-phosphate
  modified_base 15: mod_base = OTHER; note = 2'-O-methyluridine-3'-phosphate
  modified_base 16: mod_base = OTHER; note = 2'-fluoroguanosine-3'-phosphate
  modified_base 17: mod_base = OTHER; note = 2'-O-methylcytidine-3'-phosphate
  modified_base 18: mod_base = OTHER; note = 2'-O-methyluridine-3'-phosphate
  modified_base 19: mod_base = OTHER; note = 2'-O-methyluridine-3'-phosphorothioate
  modified_base 20: mod_base = OTHER; note = 2'-O-methylguanosine-3'-phosphorothioate
  modified_base 21: mod_base = OTHER; note = 2'-O-methylguanosine
gataaatgtctgcttgcttgg

SEQ ID NO: 1600 - RNA, 19 nt, synthetic construct
  source 1..19: mol_type = other RNA
  modified_base 1: mod_base = OTHER; note = 2'-O-methyladenosine-3'-phosphorothioate
  modified_base 2: mod_base = OTHER; note = 2'-O-methyladenosine-3'-phosphorothioate
  modified_base 3: mod_base = OTHER; note = 2'-O-methylguanosine-3'-phosphate
  modified_base 4: mod_base = OTHER; note = 2'-O-methylcytidine-3'-phosphate
  modified_base 5: mod_base = OTHER; note = 2'-fluoroadenosine-3'-phosphate
  modified_base 6: mod_base = OTHER; note = 2'-O-methyladenosine-3'-phosphate
  modified_base 7: mod_base = OTHER; note = 2'-fluoroguanosine-3'-phosphate
  modified_base 8: mod_base = OTHER; note = 2'-fluorocytidine-3'-phosphate
  modified_base 9: mod_base = OTHER; note = 2'-fluoroadenosine-3'-phosphate
  modified_base 10: mod_base = OTHER; note = 2'-O-methylguanosine-3'-phosphate
  modified_base 11: mod_base = OTHER; note = 2'-O-methyladenosine-3'-phosphate
  modified_base 12: mod_base = OTHER; note = 2'-O-methylcytidine-3'-phosphate
  modified_base 13: mod_base = OTHER; note = 2'-O-methyladenosine-3'-phosphate
  modified_base 14: mod_base = OTHER; note = 2'-O-methyluridine-3'-phosphate
  modified_base 15: mod_base = OTHER; note = 2'-O-methyluridine-3'-phosphate
  modified_base 16: mod_base = OTHER; note = 2'-O-methyluridine-3'-phosphate
  modified_base 17: mod_base = OTHER; note = 2'-O-methyladenosine-3'-phosphate
  modified_base 18: mod_base = OTHER; note = 2'-O-methyluridine-3'-phosphate
  modified_base 19: mod_base = OTHER; note = 2'-O-methylcytidine
aagcaagcagacatttatc

SEQ ID NO: 1601 - RNA, 21 nt, synthetic construct
  source 1..21: mol_type = other RNA
  modified_base 1: mod_base = OTHER; note = 5'-phosphate-2'-O-methylguanosine-3'-phosphorothioate
  modified_base 2: mod_base = OTHER; note = 2'-fluoroadenosine-3'-phosphorothioate
  modified_base 3: mod_base = OTHER; note = 2'-O-methyluridine-3'-phosphate
  modified_base 4: mod_base = OTHER; note = 2'-O-methyladenosine-3'-phosphate
  modified_base 5: mod_base = OTHER; note = 2'-O-methyladenosine-3'-phosphate
  modified_base 6: mod_base = OTHER; note = 2'-fluoroadenosine-3'-phosphate
  modified_base 7: mod_base = OTHER; note = 2'-O-methyluridine-3'-phosphate
  modified_base 8: mod_base = OTHER; note = 2'-O-methylguanosine-3'-phosphate
  modified_base 9: mod_base = OTHER; note = 2'-O-methyluridine-3'-phosphate
  modified_base 10: mod_base = OTHER; note = 2'-O-methylcytidine-3'-phosphate
  modified_base 11: mod_base = OTHER; note = 2'-O-methyluridine-3'-phosphate
  modified_base 12: mod_base = OTHER; note = 2'-O-methylguanosine-3'-phosphate
  modified_base 13: mod_base = OTHER; note = 2'-O-methylcytidine-3'-phosphate
  modified_base 14: mod_base = OTHER; note = 2'-fluorouridine-3'-phosphate
  modified_base 15: mod_base = OTHER; note = 2'-O-methyluridine-3'-phosphate
  modified_base 16: mod_base = OTHER; note = 2'-fluoroguanosine-3'-phosphate
  modified_base 17: mod_base = OTHER; note = 2'-O-methylcytidine-3'-phosphate
  modified_base 18: mod_base = OTHER; note = 2'-O-methyluridine-3'-phosphate
  modified_base 19: mod_base = OTHER; note = 2'-O-methyluridine-3'-phosphorothioate
  modified_base 20: mod_base = OTHER; note = 2'-O-methylguanosine-3'-phosphorothioate
  modified_base 21: mod_base = OTHER; note = 2'-O-methylguanosine
gataaatgtctgcttgcttgg

SEQ ID NO: 1602 - RNA, 21 nt, synthetic construct
  source 1..21: mol_type = other RNA
  modified_base 1: mod_base = OTHER; note = 2'-O-methylcytidine-3'-phosphorothioate
  modified_base 2: mod_base = OTHER; note = 2'-O-methylcytidine-3'-phosphorothioate
  modified_base 3: mod_base = OTHER; note = 2'-O-methyladenosine-3'-phosphate
  modified_base 4: mod_base = OTHER; note = 2'-O-methyladenosine-3'-phosphate
  modified_base 5: mod_base = OTHER; note = 2'-O-methylguanosine-3'-phosphate
  modified_base 6: mod_base = OTHER; note = 2'-O-methylcytidine-3'-phosphate
  modified_base 7: mod_base = OTHER; note = 2'-O-methyladenosine-3'-phosphate
  modified_base 8: mod_base = OTHER; note = 2'-O-methyladenosine-3'-phosphate
  modified_base 9: mod_base = OTHER; note = 2'-fluoroguanosine-3'-phosphate
  modified_base 10: mod_base = OTHER; note = 2'-fluorocytidine-3'-phosphate
  modified_base 11: mod_base = OTHER; note = 2'-fluoroadenosine-3'-phosphate
  modified_base 12: mod_base = OTHER; note = 2'-O-methylguanosine-3'-phosphate
  modified_base 13: mod_base = OTHER; note = 2'-O-methyladenosine-3'-phosphate
  modified_base 14: mod_base = OTHER; note = 2'-O-methylcytidine-3'-phosphate
  modified_base 15: mod_base = OTHER; note = 2'-O-methyladenosine-3'-phosphate
  modified_base 16: mod_base = OTHER; note = 2'-O-methyluridine-3'-phosphate
  modified_base 17: mod_base = OTHER; note = 2'-O-methyluridine-3'-phosphate
  modified_base 18: mod_base = OTHER; note = 2'-O-methyluridine-3'-phosphate
  modified_base 19: mod_base = OTHER; note = 2'-O-methyladenosine-3'-phosphate
  modified_base 20: mod_base = OTHER; note = 2'-O-methyluridine-3'-phosphate
  modified_base 21: mod_base = OTHER; note = 2'-O-methylcytidine
ccaagcaagcagacatttatc

SEQ ID NO: 1603 - RNA, 23 nt, synthetic construct
  source 1..23: mol_type = other RNA
  modified_base 1: mod_base = OTHER; note = 5'-phosphate-2'-O-methylguanosine-3'-phosphorothioate
  modified_base 2: mod_base = OTHER; note = 2'-fluoroadenosine-3'-phosphorothioate
  modified_base 3: mod_base = OTHER; note = 2'-O-methyluridine-3'-phosphate
  modified_base 4: mod_base = OTHER; note = 2'-O-methyladenosine-3'-phosphate
  modified_base 5: mod_base = OTHER; note = 2'-O-methyladenosine-3'-phosphate
  modified_base 6: mod_base = OTHER; note = 2'-fluoroadenosine-3'-phosphate
  modified_base 7: mod_base = OTHER; note = 2'-O-methyluridine-3'-phosphate
  modified_base 8: mod_base = OTHER; note = 2'-O-methylguanosine-3'-phosphate
  modified_base 9: mod_base = OTHER; note = 2'-O-methyluridine-3'-phosphate
  modified_base 10: mod_base = OTHER; note = 2'-O-methylcytidine-3'-phosphate
  modified_base 11: mod_base = OTHER; note = 2'-O-methyluridine-3'-phosphate
  modified_base 12: mod_base = OTHER; note = 2'-O-methylguanosine-3'-phosphate
  modified_base 13: mod_base = OTHER; note = 2'-O-methylcytidine-3'-phosphate
  modified_base 14: mod_base = OTHER; note = 2'-fluorouridine-3'-phosphate
  modified_base 15: mod_base = OTHER; note = 2'-O-methyluridine-3'-phosphate
  modified_base 16: mod_base = OTHER; note = 2'-fluoroguanosine-3'-phosphate
  modified_base 17: mod_base = OTHER; note = 2'-O-methylcytidine-3'-phosphate
  modified_base 18: mod_base = OTHER; note = 2'-O-methyluridine-3'-phosphate
  modified_base 19: mod_base = OTHER; note = 2'-O-methyluridine-3'-phosphate
  modified_base 20: mod_base = OTHER; note = 2'-O-methylguanosine-3'-phosphate
  modified_base 21: mod_base = OTHER; note = 2'-O-methylguanosine-3'-phosphorothioate
  modified_base 22: mod_base = OTHER; note = 2'-O-methylguanosine-3'-phosphorothioate
  modified_base 23: mod_base = OTHER; note = 2'-O-methyluridine
gataaatgtctgcttgcttgggt

SEQ ID NO: 1604 - RNA, 21 nt, synthetic construct
  source 1..21: mol_type = other RNA
  modified_base 1: mod_base = OTHER; note = 2'-O-methylcytidine-3'-phosphorothioate
  modified_base 2: mod_base = OTHER; note = 2'-O-methylcytidine-3'-phosphorothioate
  modified_base 3: mod_base = OTHER; note = 2'-O-methyladenosine-3'-phosphate
  modified_base 4: mod_base = OTHER; note = 2'-O-methyladenosine-3'-phosphate
  modified_base 5: mod_base = OTHER; note = 2'-O-methylguanosine-3'-phosphate
  modified_base 6: mod_base = OTHER; note = 2'-O-methylcytidine-3'-phosphate
  modified_base 7: mod_base = OTHER; note = 2'-fluoroadenosine-3'-phosphate
  modified_base 8: mod_base = OTHER; note = 2'-O-methyladenosine-3'-phosphate
  modified_base 9: mod_base = OTHER; note = 2'-fluoroguanosine-3'-phosphate
  modified_base 10: mod_base = OTHER; note = 2'-fluorocytidine-3'-phosphate
  modified_base 11: mod_base = OTHER; note = 2'-fluoroadenosine-3'-phosphate
  modified_base 12: mod_base = OTHER; note = 2'-O-methylguanosine-3'-phosphate
  modified_base 13: mod_base = OTHER; note = 2'-O-methyladenosine-3'-phosphate
  modified_base 14: mod_base = OTHER; note = 2'-O-methylcytidine-3'-phosphate
  modified_base 15: mod_base = OTHER; note = 2'-O-methyladenosine-3'-phosphate
  modified_base 16: mod_base = OTHER; note = 2'-O-methyluridine-3'-phosphate
  modified_base 17: mod_base = OTHER; note = 2'-O-methyluridine-3'-phosphate
  modified_base 18: mod_base = OTHER; note = 2'-O-methyluridine-3'-phosphate
  modified_base 19: mod_base = OTHER; note = 2'-O-methyladenosine-3'-phosphate
  modified_base 20: mod_base = OTHER; note = 2'-O-methyluridine-3'-phosphate
  modified_base 21: mod_base = OTHER; note = 2'-O-methylcytidine
ccaagcaagcagacatttatc

SEQ ID NO: 1605 - RNA, 23 nt, synthetic construct
  source 1..23: mol_type = other RNA
  modified_base 1: mod_base = OTHER; note = 5'-phosphate-2'-O-methylguanosine-3'-phosphorothioate
  modified_base 2: mod_base = OTHER; note = 2'-fluoroadenosine-3'-phosphorothioate
  modified_base 3: mod_base = OTHER; note = 2'-O-methyluridine-3'-phosphate
  modified_base 4: mod_base = OTHER; note = 2'-O-methyladenosine-3'-phosphate
  modified_base 5: mod_base = OTHER; note = 2'-O-methyladenosine-3'-phosphate
  modified_base 6: mod_base = OTHER; note = 2'-fluoroadenosine-3'-phosphate
  modified_base 7: mod_base = OTHER; note = 2'-O-methyluridine-3'-phosphate
  modified_base 8: mod_base = OTHER; note = 2'-fluoroguanosine-3'-phosphate
  modified_base 9: mod_base = OTHER; note = 2'-fluorouridine-3'-phosphate
  modified_base 10: mod_base = OTHER; note = 2'-O-methylcytidine-3'-phosphate
  modified_base 11: mod_base = OTHER; note = 2'-O-methyluridine-3'-phosphate
  modified_base 12: mod_base = OTHER; note = 2'-O-methylguanosine-3'-phosphate
  modified_base 13: mod_base = OTHER; note = 2'-O-methylcytidine-3'-phosphate
  modified_base 14: mod_base = OTHER; note = 2'-fluorouridine-3'-phosphate
  modified_base 15: mod_base = OTHER; note = 2'-O-methyluridine-3'-phosphate
  modified_base 16: mod_base = OTHER; note = 2'-fluoroguanosine-3'-phosphate
  modified_base 17: mod_base = OTHER; note = 2'-O-methylcytidine-3'-phosphate
  modified_base 18: mod_base = OTHER; note = 2'-O-methyluridine-3'-phosphate
  modified_base 19: mod_base = OTHER; note = 2'-O-methyluridine-3'-phosphate
  modified_base 20: mod_base = OTHER; note = 2'-O-methylguanosine-3'-phosphate
  modified_base 21: mod_base = OTHER; note = 2'-O-methylguanosine-3'-phosphorothioate
  modified_base 22: mod_base = OTHER; note = 2'-O-methylguanosine-3'-phosphorothioate
  modified_base 23: mod_base = OTHER; note = 2'-O-methyluridine
gataaatgtctgcttgcttgggt

SEQ ID NO: 1606 - RNA, 21 nt, synthetic construct
  source 1..21: mol_type = other RNA
  modified_base 1: mod_base = OTHER; note = 2'-O-methylcytidine-3'-phosphorothioate
  modified_base 2: mod_base = OTHER; note = 2'-O-methylcytidine-3'-phosphorothioate
  modified_base 3: mod_base = OTHER; note = 2'-O-methyladenosine-3'-phosphate
  modified_base 4: mod_base = OTHER; note = 2'-O-methyladenosine-3'-phosphate
  modified_base 5: mod_base = OTHER; note = 2'-O-methylguanosine-3'-phosphate
  modified_base 6: mod_base = OTHER; note = 2'-O-methylcytidine-3'-phosphate
  modified_base 7: mod_base = OTHER; note = 2'-fluoroadenosine-3'-phosphate
  modified_base 8: mod_base = OTHER; note = 2'-O-methyladenosine-3'-phosphate
  modified_base 9: mod_base = OTHER; note = 2'-fluoroguanosine-3'-phosphate
  modified_base 10: mod_base = OTHER; note = 2'-fluorocytidine-3'-phosphate
  modified_base 11: mod_base = OTHER; note = 2'-fluoroadenosine-3'-phosphate
  modified_base 12: mod_base = OTHER; note = 2'-O-methylguanosine-3'-phosphate
  modified_base 13: mod_base = OTHER; note = 2'-O-methyladenosine-3'-phosphate
  modified_base 14: mod_base = OTHER; note = 2'-O-methylcytidine-3'-phosphate
  modified_base 15: mod_base = OTHER; note = 2'-O-methyladenosine-3'-phosphate
  modified_base 16: mod_base = OTHER; note = 2'-O-methyluridine-3'-phosphate
  modified_base 17: mod_base = OTHER; note = 2'-O-methyluridine-3'-phosphate
  modified_base 18: mod_base = OTHER; note = 2'-O-methyluridine-3'-phosphate
  modified_base 19: mod_base = OTHER; note = 2'-O-methyladenosine-3'-phosphate
  modified_base 20: mod_base = OTHER; note = 2'-O-methyluridine-3'-phosphate
  modified_base 21: mod_base = OTHER; note = 2'-O-methylcytidine
ccaagcaagcagacatttatc

SEQ ID NO: 1607 - RNA, 23 nt, synthetic construct
  source 1..23: mol_type = other RNA
  modified_base 1: mod_base = OTHER; note = 5'-phosphate-2'-O-methylguanosine-3'-phosphorothioate
  modified_base 2: mod_base = OTHER; note = 2'-fluoroadenosine-3'-phosphorothioate
  modified_base 3: mod_base = OTHER; note = 2'-O-methyluridine-3'-phosphate
  modified_base 4: mod_base = OTHER; note = 2'-O-methyladenosine-3'-phosphate
  modified_base 5: mod_base = OTHER; note = 2'-O-methyladenosine-3'-phosphate
  modified_base 6: mod_base = OTHER; note = 2'-fluoroadenosine-3'-phosphate
  modified_base 7: mod_base = OTHER; note = 2'-O-methyluridine-3'-phosphate
  modified_base 8: mod_base = OTHER; note = 2'-O-methylguanosine-3'-phosphate
  modified_base 9: mod_base = OTHER; note = 2'-O-methyluridine-3'-phosphate
  modified_base 10: mod_base = OTHER; note = 2'-O-methylcytidine-3'-phosphate
  modified_base 11: mod_base = OTHER; note = 2'-O-methyluridine-3'-phosphate
  modified_base 12: mod_base = OTHER; note = 2'-O-methylguanosine-3'-phosphate
  modified_base 13: mod_base = OTHER; note = 2'-O-methylcytidine-3'-phosphate
  modified_base 14: mod_base = OTHER; note = 2'-fluorouridine-3'-phosphate
  modified_base 15: mod_base = OTHER; note = 2'-O-methyluridine-3'-phosphate
  modified_base 16: mod_base = OTHER; note = 2'-fluoroguanosine-3'-phosphate
  modified_base 17: mod_base = OTHER; note = 2'-O-methylcytidine-3'-phosphate
  modified_base 18: mod_base = OTHER; note = 2'-O-methyluridine-3'-phosphate
  modified_base 19: mod_base = OTHER; note = 2'-O-methyluridine-3'-phosphate
  modified_base 20: mod_base = OTHER; note = 2'-O-methylguanosine-3'-phosphate
  modified_base 21: mod_base = OTHER; note = 2'-O-methylguanosine-3'-phosphorothioate
  modified_base 22: mod_base = OTHER; note = 2'-O-methylguanosine-3'-phosphorothioate
  modified_base 23: mod_base = OTHER; note = 2'-O-methyluridine
gataaatgtctgcttgcttgggt

SEQ ID NO: 1608 - RNA, 19 nt, synthetic construct
  source 1..19: mol_type = other RNA
tttgtagcatttttattaa

SEQ ID NO: 1609 - RNA, 21 nt, synthetic construct
  source 1..21: mol_type = other RNA
ttaataaaaatgctacaaaac

SEQ ID NO: 1610 - RNA, 21 nt, synthetic construct
  source 1..21: mol_type = other RNA
gttttgtagcatttttattaa

SEQ ID NO: 1611 - RNA, 23 nt, synthetic construct
  source 1..23: mol_type = other RNA
ttaataaaaatgctacaaaaccc

SEQ ID NO: 1612 - RNA, 19 nt, synthetic construct
  source 1..19: mol_type = other RNA
  modified_base 1: mod_base = OTHER; note = 2'-O-methyluridine-3'-phosphate
  modified_base 2: mod_base = OTHER; note = 2'-O-methyluridine-3'-phosphate
  modified_base 3: mod_base = OTHER; note = 2'-O-methyluridine-3'-phosphate
  modified_base 4: mod_base = OTHER; note = 2'-O-methylguanosine-3'-phosphate
  modified_base 5: mod_base = OTHER; note = 2'-O-methyluridine-3'-phosphate
  modified_base 6: mod_base = OTHER; note = 2'-O-methyladenosine-3'-phosphate
  modified_base 7: mod_base = OTHER; note = 2'-fluoroguanosine-3'-phosphate
  modified_base 8: mod_base = OTHER; note = 2'-fluorocytidine-3'-phosphate
  modified_base 9: mod_base = OTHER; note = 2'-fluoroadenosine-3'-phosphate
  modified_base 10: mod_base = OTHER; note = 2'-O-methyluridine-3'-phosphate
  modified_base 11: mod_base = OTHER; note = 2'-O-methyluridine-3'-phosphate
  modified_base 12: mod_base = OTHER; note = 2'-O-methyluridine-3'-phosphate
  modified_base 13: mod_base = OTHER; note = 2'-O-methyluridine-3'-phosphate
  modified_base 14: mod_base = OTHER; note = 2'-O-methyluridine-3'-phosphate
  modified_base 15: mod_base = OTHER; note = 2'-O-methyladenosine-3'-phosphate
  modified_base 16: mod_base = OTHER; note = 2'-O-methyluridine-3'-phosphate
  modified_base 17: mod_base = OTHER; note = 2'-O-methyluridine-3'-phosphate
  modified_base 18: mod_base = OTHER; note = 2'-O-methyladenosine-3'-phosphate
  modified_base 19: mod_base = OTHER; note = 2'-O-methyladenosine
tttgtagcatttttattaa

SEQ ID NO: 1613 - RNA, 21 nt, synthetic construct
  source 1..21: mol_type = other RNA
  modified_base 1: mod_base = OTHER; note = 2'-O-methyluridine-3'-phosphate
  modified_base 2: mod_base = OTHER; note = 2'-fluorouridine-3'-phosphate
  modified_base 3: mod_base = OTHER; note = 2'-O-methyladenosine-3'-phosphate
  modified_base 4: mod_base = OTHER; note = 2'-O-methyladenosine-3'-phosphate
  modified_base 5: mod_base = OTHER; note = 2'-O-methyluridine-3'-phosphate
  modified_base 6: mod_base = OTHER; note = 2'-fluoroadenosine-3'-phosphate
  modified_base 7: mod_base = OTHER; note = 2'-O-methyladenosine-3'-phosphate
  modified_base 8: mod_base = OTHER; note = 2'-O-methyladenosine-3'-phosphate
  modified_base 9: mod_base = OTHER; note = 2'-O-methyladenosine-3'-phosphate
  modified_base 10: mod_base = OTHER; note = 2'-O-methyladenosine-3'-phosphate
  modified_base 11: mod_base = OTHER; note = 2'-O-methyluridine-3'-phosphate
  modified_base 12: mod_base = OTHER; note = 2'-fluoroguanosine-3'-phosphate
  modified_base 13: mod_base = OTHER; note = 2'-O-methylcytidine-3'-phosphate
  modified_base 14: mod_base = OTHER; note = 2'-fluorouridine-3'-phosphate
  modified_base 15: mod_base = OTHER; note = 2'-O-methyladenosine-3'-phosphate
  modified_base 16: mod_base = OTHER; note = 2'-O-methylcytidine-3'-phosphate
  modified_base 17: mod_base = OTHER; note = 2'-O-methyladenosine-3'-phosphate
  modified_base 18: mod_base = OTHER; note = 2'-O-methyladenosine-3'-phosphate
  modified_base 19: mod_base = OTHER; note = 2'-O-methyladenosine-3'-phosphate
  modified_base 20: mod_base = OTHER; note = 2'-O-methyladenosine-3'-phosphate
  modified_base 21: mod_base = OTHER; note = 2'-O-methylcytidine
ttaataaaaatgctacaaaac

SEQ ID NO: 1614 - RNA, 19 nt, synthetic construct
  source 1..19: mol_type = other RNA
  modified_base 1: mod_base = OTHER; note = 2'-O-methyluridine-3'-phosphate
  modified_base 2: mod_base = OTHER; note = 2'-O-methyluridine-3'-phosphate
  modified_base 3: mod_base = OTHER; note = 2'-O-methyluridine-3'-phosphate
  modified_base 4: mod_base = OTHER; note = 2'-O-methylguanosine-3'-phosphate
  modified_base 5: mod_base = OTHER; note = 2'-fluorouridine-3'-phosphate
  modified_base 6: mod_base = OTHER; note = 2'-O-methyladenosine-3'-phosphate
  modified_base 7: mod_base = OTHER; note = 2'-fluoroguanosine-3'-phosphate
  modified_base 8: mod_base = OTHER; note = 2'-fluorocytidine-3'-phosphate
  modified_base 9: mod_base = OTHER; note = 2'-fluoroadenosine-3'-phosphate
  modified_base 10: mod_base = OTHER; note = 2'-O-methyluridine-3'-phosphate
  modified_base 11: mod_base = OTHER; note = 2'-O-methyluridine-3'-phosphate
  modified_base 12: mod_base = OTHER; note = 2'-O-methyluridine-3'-phosphate
  modified_base 13: mod_base = OTHER; note = 2'-O-methyluridine-3'-phosphate
  modified_base 14: mod_base = OTHER; note = 2'-O-methyluridine-3'-phosphate
  modified_base 15: mod_base = OTHER; note = 2'-O-methyladenosine-3'-phosphate
  modified_base 16: mod_base = OTHER; note = 2'-O-methyluridine-3'-phosphate
  modified_base 17: mod_base = OTHER; note = 2'-O-methyluridine-3'-phosphate
  modified_base 18: mod_base = OTHER; note = 2'-O-methyladenosine-3'-phosphate
  modified_base 19: mod_base = OTHER; note = 2'-O-methyladenosine
tttgtagcatttttattaa

SEQ ID NO: 1615 - RNA, 21 nt, synthetic construct
  source 1..21: mol_type = other RNA
  modified_base 1: mod_base = OTHER; note = 2'-O-methyluridine-3'-phosphate
  modified_base 2: mod_base = OTHER; note = 2'-fluorouridine-3'-phosphate
  modified_base 3: mod_base = OTHER; note = 2'-O-methyladenosine-3'-phosphate
  modified_base 4: mod_base = OTHER; note = 2'-O-methyladenosine-3'-phosphate
  modified_base 5: mod_base = OTHER; note = 2'-O-methyluridine-3'-phosphate
  modified_base 6: mod_base = OTHER; note = 2'-fluoroadenosine-3'-phosphate
  modified_base 7: mod_base = OTHER; note = 2'-O-methyladenosine-3'-phosphate
  modified_base 8: mod_base = OTHER; note = 2'-fluoroadenosine-3'-phosphate
  modified_base 9: mod_base = OTHER; note = 2'-fluoroadenosine-3'-phosphate
  modified_base 10: mod_base = OTHER; note = 2'-O-methyladenosine-3'-phosphate
  modified_base 11: mod_base = OTHER; note = 2'-O-methyluridine-3'-phosphate
  modified_base 12: mod_base = OTHER; note = 2'-fluoroguanosine-3'-phosphate
  modified_base 13: mod_base = OTHER; note = 2'-O-methylcytidine-3'-phosphate
  modified_base 14: mod_base = OTHER; note = 2'-fluorouridine-3'-phosphate
  modified_base 15: mod_base = OTHER; note = 2'-O-methyladenosine-3'-phosphate
  modified_base 16: mod_base = OTHER; note = 2'-O-methylcytidine-3'-phosphate
  modified_base 17: mod_base = OTHER; note = 2'-O-methyladenosine-3'-phosphate
  modified_base 18: mod_base = OTHER; note = 2'-O-methyladenosine-3'-phosphate
  modified_base 19: mod_base = OTHER; note = 2'-O-methyladenosine-3'-phosphate
  modified_base 20: mod_base = OTHER; note = 2'-O-methyladenosine-3'-phosphate
  modified_base 21: mod_base = OTHER; note = 2'-O-methylcytidine
ttaataaaaatgctacaaaac

SEQ ID NO: 1616 - RNA, 19 nt, synthetic construct
  source 1..19: mol_type = other RNA
  modified_base 1: mod_base = OTHER; note = 2'-O-methyluridine-3'-phosphate
  modified_base 2: mod_base = OTHER; note = 2'-O-methyluridine-3'-phosphate
  modified_base 3: mod_base = OTHER; note = 2'-O-methyluridine-3'-phosphate
  modified_base 4: mod_base = OTHER; note = 2'-O-methylguanosine-3'-phosphate
  modified_base 5: mod_base = OTHER; note = 2'-fluorouridine-3'-phosphate
  modified_base 6: mod_base = OTHER; note = 2'-O-methyladenosine-3'-phosphate
  modified_base 7: mod_base = OTHER; note = 2'-fluoroguanosine-3'-phosphate
  modified_base 8: mod_base = OTHER; note = 2'-fluorocytidine-3'-phosphate
  modified_base 9: mod_base = OTHER; note = 2'-fluoroadenosine-3'-phosphate
  modified_base 10: mod_base = OTHER; note = 2'-O-methyluridine-3'-phosphate
  modified_base 11: mod_base = OTHER; note = 2'-O-methyluridine-3'-phosphate
  modified_base 12: mod_base = OTHER; note = 2'-O-methyluridine-3'-phosphate
  modified_base 13: mod_base = OTHER; note = 2'-O-methyluridine-3'-phosphate
  modified_base 14: mod_base = OTHER; note = 2'-O-methyluridine-3'-phosphate
  modified_base 15: mod_base = OTHER; note = 2'-O-methyladenosine-3'-phosphate
  modified_base 16: mod_base = OTHER; note = 2'-O-methyluridine-3'-phosphate
  modified_base 17: mod_base = OTHER; note = 2'-O-methyluridine-3'-phosphate
  modified_base 18: mod_base = OTHER; note = 2'-O-methyladenosine-3'-phosphate
  modified_base 19: mod_base = OTHER; note = 2'-O-methyladenosine
tttgtagcatttttattaa

SEQ ID NO: 1617 - RNA, 21 nt, synthetic construct
  source 1..21: mol_type = other RNA
  modified_base 1: mod_base = OTHER; note = 2'-O-methyluridine-3'-phosphate
  modified_base 2: mod_base = OTHER; note = 2'-fluorouridine-3'-phosphate
  modified_base 3: mod_base = OTHER; note = 2'-O-methyladenosine-3'-phosphate
  modified_base 4: mod_base = OTHER; note = 2'-O-methyladenosine-3'-phosphate
  modified_base 5: mod_base = OTHER; note = 2'-O-methyluridine-3'-phosphate
  modified_base 6: mod_base = OTHER; note = 2'-fluoroadenosine-3'-phosphate
  modified_base 7: mod_base = OTHER; note = 2'-O-methyladenosine-3'-phosphate
  modified_base 8: mod_base = OTHER; note = 2'-O-methyladenosine-3'-phosphate
  modified_base 9: mod_base = OTHER; note = 2'-O-methyladenosine-3'-phosphate
  modified_base 10: mod_base = OTHER; note = 2'-O-methyladenosine-3'-phosphate
  modified_base 11: mod_base = OTHER; note = 2'-O-methyluridine-3'-phosphate
  modified_base 12: mod_base = OTHER; note = 2'-fluoroguanosine-3'-phosphate
  modified_base 13: mod_base = OTHER; note = 2'-O-methylcytidine-3'-phosphate
  modified_base 14: mod_base = OTHER; note = 2'-fluorouridine-3'-phosphate
  modified_base 15: mod_base = OTHER; note = 2'-O-methyladenosine-3'-phosphate
  modified_base 16: mod_base = OTHER; note = 2'-O-methylcytidine-3'-phosphate
  modified_base 17: mod_base = OTHER; note = 2'-O-methyladenosine-3'-phosphate
  modified_base 18: mod_base = OTHER; note = 2'-O-methyladenosine-3'-phosphate
  modified_base 19: mod_base = OTHER; note = 2'-O-methyladenosine-3'-phosphate
  modified_base 20: mod_base = OTHER; note = 2'-O-methyladenosine-3'-phosphate
  modified_base 21: mod_base = OTHER; note = 2'-O-methylcytidine
ttaataaaaatgctacaaaac

SEQ ID NO: 1618 - RNA, 21 nt, synthetic construct
  source 1..21: mol_type = other RNA
  modified_base 1: mod_base = OTHER; note = 2'-O-methylguanosine-3'-phosphate
  modified_base 2: mod_base = OTHER; note = 2'-O-methyluridine-3'-phosphate
  modified_base 3: mod_base = OTHER; note = 2'-O-methyluridine-3'-phosphate
  modified_base 4: mod_base = OTHER; note = 2'-O-methyluridine-3'-phosphate
  modified_base 5: mod_base = OTHER; note = 2'-O-methyluridine-3'-phosphate
  modified_base 6: mod_base = OTHER; note = 2'-O-methylguanosine-3'-phosphate
  modified_base 7: mod_base = OTHER; note = 2'-O-methyluridine-3'-phosphate
  modified_base 8: mod_base = OTHER; note = 2'-O-methyladenosine-3'-phosphate
  modified_base 9: mod_base = OTHER; note = 2'-fluoroguanosine-3'-phosphate
  modified_base 10: mod_base = OTHER; note = 2'-fluorocytidine-3'-phosphate
  modified_base 11: mod_base = OTHER; note = 2'-fluoroadenosine-3'-phosphate
  modified_base 12: mod_base = OTHER; note = 2'-O-methyluridine-3'-phosphate
  modified_base 13: mod_base = OTHER; note = 2'-O-methyluridine-3'-phosphate
  modified_base 14: mod_base = OTHER; note = 2'-O-methyluridine-3'-phosphate
  modified_base 15: mod_base = OTHER; note = 2'-O-methyluridine-3'-phosphate
  modified_base 16: mod_base = OTHER; note = 2'-O-methyluridine-3'-phosphate
  modified_base 17: mod_base = OTHER; note = 2'-O-methyladenosine-3'-phosphate
  modified_base 18: mod_base = OTHER; note = 2'-O-methyluridine-3'-phosphate
  modified_base 19: mod_base = OTHER; note = 2'-O-methyluridine-3'-phosphate
  modified_base 20: mod_base = OTHER; note = 2'-O-methyladenosine-3'-phosphate
  modified_base 21: mod_base = OTHER; note = 2'-O-methyladenosine
gttttgtagcatttttattaa

SEQ ID NO: 1619 - RNA, 23 nt, synthetic construct
  source 1..23: mol_type = other RNA
  modified_base 1: mod_base = OTHER; note = 2'-O-methyluridine-3'-phosphate
  modified_base 2: mod_base = OTHER; note = 2'-fluorouridine-3'-phosphate
  modified_base 3: mod_base = OTHER; note = 2'-O-methyladenosine-3'-phosphate
  modified_base 4: mod_base = OTHER; note = 2'-O-methyladenosine-3'-phosphate
  modified_base 5: mod_base = OTHER; note = 2'-O-methyluridine-3'-phosphate
  modified_base 6: mod_base = OTHER; note = 2'-fluoroadenosine-3'-phosphate
  modified_base 7: mod_base = OTHER; note = 2'-O-methyladenosine-3'-phosphate
  modified_base 8: mod_base = OTHER; note = 2'-O-methyladenosine-3'-phosphate
  modified_base 9: mod_base = OTHER; note = 2'-O-methyladenosine-3'-phosphate
  modified_base 10: mod_base = OTHER; note = 2'-O-methyladenosine-3'-phosphate
  modified_base 11: mod_base = OTHER; note = 2'-O-methyluridine-3'-phosphate
  modified_base 12: mod_base = OTHER; note = 2'-fluoroguanosine-3'-phosphate
  modified_base 13: mod_base = OTHER; note = 2'-O-methylcytidine-3'-phosphate
  modified_base 14: mod_base = OTHER; note = 2'-fluorouridine-3'-phosphate
  modified_base 15: mod_base = OTHER; note = 2'-O-methyladenosine-3'-phosphate
  modified_base 16: mod_base = OTHER; note = 2'-O-methylcytidine-3'-phosphate
  modified_base 17: mod_base = OTHER; note = 2'-O-methyladenosine-3'-phosphate
  modified_base 18: mod_base = OTHER; note = 2'-O-methyladenosine-3'-phosphate
  modified_base 19: mod_base = OTHER; note = 2'-O-methyladenosine-3'-phosphate
  modified_base 20: mod_base = OTHER; note = 2'-O-methyladenosine-3'-phosphate
  modified_base 21: mod_base = OTHER; note = 2'-O-methylcytidine-3'-phosphate
  modified_base 22: mod_base = OTHER; note = 2'-O-methylcytidine-3'-phosphate
  modified_base 23: mod_base = OTHER; note = 2'-O-methylcytidine
ttaataaaaatgctacaaaaccc

SEQ ID NO: 1620 - RNA, 21 nt, synthetic construct
  source 1..21: mol_type = other RNA
  modified_base 1: mod_base = OTHER; note = 2'-O-methylguanosine-3'-phosphate
  modified_base 2: mod_base = OTHER; note = 2'-O-methyluridine-3'-phosphate
  modified_base 3: mod_base = OTHER; note = 2'-O-methyluridine-3'-phosphate
  modified_base 4: mod_base = OTHER; note = 2'-O-methyluridine-3'-phosphate
  modified_base 5: mod_base = OTHER; note = 2'-O-methyluridine-3'-phosphate
  modified_base 6: mod_base = OTHER; note = 2'-O-methylguanosine-3'-phosphate
  modified_base 7: mod_base = OTHER; note = 2'-fluorouridine-3'-phosphate
  modified_base 8: mod_base = OTHER; note = 2'-O-methyladenosine-3'-phosphate
  modified_base 9: mod_base = OTHER; note = 2'-fluoroguanosine-3'-phosphate
  modified_base 10: mod_base = OTHER; note = 2'-fluorocytidine-3'-phosphate
  modified_base 11: mod_base = OTHER; note = 2'-fluoroadenosine-3'-phosphate
  modified_base 12: mod_base = OTHER; note = 2'-O-methyluridine-3'-phosphate
  modified_base 13: mod_base = OTHER; note = 2'-O-methyluridine-3'-phosphate
  modified_base 14: mod_base = OTHER; note = 2'-O-methyluridine-3'-phosphate
  modified_base 15: mod_base = OTHER; note = 2'-O-methyluridine-3'-phosphate
  modified_base 16: mod_base = OTHER; note = 2'-O-methyluridine-3'-phosphate
  modified_base 17: mod_base = OTHER; note = 2'-O-methyladenosine-3'-phosphate
  modified_base 18: mod_base = OTHER; note = 2'-O-methyluridine-3'-phosphate
  modified_base 19: mod_base = OTHER; note = 2'-O-methyluridine-3'-phosphate
  modified_base 20: mod_base = OTHER; note = 2'-O-methyladenosine-3'-phosphate
  modified_base 21: mod_base = OTHER; note = 2'-O-methyladenosine
gttttgtagcatttttattaa

SEQ ID NO: 1621 - RNA, 23 nt, synthetic construct
  source 1..23: mol_type = other RNA
  modified_base 1: mod_base = OTHER; note = 2'-O-methyluridine-3'-phosphate
  modified_base 2: mod_base = OTHER; note = 2'-fluorouridine-3'-phosphate
  modified_base 3: mod_base = OTHER; note = 2'-O-methyladenosine-3'-phosphate
  modified_base 4: mod_base = OTHER; note = 2'-O-methyladenosine-3'-phosphate
  modified_base 5: mod_base = OTHER; note = 2'-O-methyluridine-3'-phosphate
  modified_base 6: mod_base = OTHER; note = 2'-fluoroadenosine-3'-phosphate
  modified_base 7: mod_base = OTHER; note = 2'-O-methyladenosine-3'-phosphate
  modified_base 8: mod_base = OTHER; note = 2'-fluoroadenosine-3'-phosphate
  modified_base 9: mod_base = OTHER; note = 2'-fluoroadenosine-3'-phosphate
  modified_base 10: mod_base = OTHER; note = 2'-O-methyladenosine-3'-phosphate
  modified_base 11: mod_base = OTHER; note = 2'-O-methyluridine-3'-phosphate
  modified_base 12: mod_base = OTHER; note = 2'-fluoroguanosine-3'-phosphate
  modified_base 13: mod_base = OTHER; note = 2'-O-methylcytidine-3'-phosphate
  modified_base 14: mod_base = OTHER; note = 2'-fluorouridine-3'-phosphate
  modified_base 15: mod_base = OTHER; note = 2'-O-methyladenosine-3'-phosphate
  modified_base 16: mod_base = OTHER; note = 2'-O-methylcytidine-3'-phosphate
  modified_base 17: mod_base = OTHER; note = 2'-O-methyladenosine-3'-phosphate
  modified_base 18: mod_base = OTHER; note = 2'-O-methyladenosine-3'-phosphate
  modified_base 19: mod_base = OTHER; note = 2'-O-methyladenosine-3'-phosphate
  modified_base 20: mod_base = OTHER; note = 2'-O-methyladenosine-3'-phosphate
  modified_base 21: mod_base = OTHER; note = 2'-O-methylcytidine-3'-phosphate
  modified_base 22: mod_base = OTHER; note = 2'-O-methylcytidine-3'-phosphate
  modified_base 23: mod_base = OTHER; note = 2'-O-methylcytidine
ttaataaaaatgctacaaaaccc

SEQ ID NO: 1622 - RNA, 21 nt, synthetic construct
  source 1..21: mol_type = other RNA
  modified_base 1: mod_base = OTHER; note = 2'-O-methylguanosine-3'-phosphate
  modified_base 2: mod_base = OTHER; note = 2'-O-methyluridine-3'-phosphate
  modified_base 3: mod_base = OTHER; note = 2'-O-methyluridine-3'-phosphate
  modified_base 4: mod_base = OTHER; note = 2'-O-methyluridine-3'-phosphate
  modified_base 5: mod_base = OTHER; note = 2'-O-methyluridine-3'-phosphate
  modified_base 6: mod_base = OTHER; note = 2'-O-methylguanosine-3'-phosphate
  modified_base 7: mod_base = OTHER; note = 2'-fluorouridine-3'-phosphate
  modified_base 8: mod_base = OTHER; note = 2'-O-methyladenosine-3'-phosphate
  modified_base 9: mod_base = OTHER; note = 2'-fluoroguanosine-3'-phosphate
  modified_base 10: mod_base = OTHER; note = 2'-fluorocytidine-3'-phosphate
  modified_base 11: mod_base = OTHER; note = 2'-fluoroadenosine-3'-phosphate
  modified_base 12: mod_base = OTHER; note = 2'-O-methyluridine-3'-phosphate
  modified_base 13: mod_base = OTHER; note = 2'-O-methyluridine-3'-phosphate
  modified_base 14: mod_base = OTHER; note = 2'-O-methyluridine-3'-phosphate
  modified_base 15: mod_base = OTHER; note = 2'-O-methyluridine-3'-phosphate
  modified_base 16: mod_base = OTHER; note = 2'-O-methyluridine-3'-phosphate
  modified_base 17: mod_base = OTHER; note = 2'-O-methyladenosine-3'-phosphate
  modified_base 18: mod_base = OTHER; note = 2'-O-methyluridine-3'-phosphate
  modified_base 19: mod_base = OTHER; note = 2'-O-methyluridine-3'-phosphate
  modified_base 20: mod_base = OTHER; note = 2'-O-methyladenosine-3'-phosphate
  modified_base 21: mod_base = OTHER; note = 2'-O-methyladenosine
gttttgtagcatttttattaa

SEQ ID NO: 1623 - RNA, 23 nt, synthetic construct
  source 1..23: mol_type = other RNA
  modified_base 1: mod_base = OTHER; note = 2'-O-methyluridine-3'-phosphate
  modified_base 2: mod_base = OTHER; note = 2'-fluorouridine-3'-phosphate
  modified_base 3: mod_base = OTHER; note = 2'-O-methyladenosine-3'-phosphate
  modified_base 4: mod_base = OTHER; note = 2'-O-methyladenosine-3'-phosphate
  modified_base 5: mod_base = OTHER; note = 2'-O-methyluridine-3'-phosphate
  modified_base 6: mod_base = OTHER; note = 2'-fluoroadenosine-3'-phosphate
  modified_base 7: mod_base = OTHER; note = 2'-O-methyladenosine-3'-phosphate
  modified_base 8: mod_base = OTHER; note = 2'-O-methyladenosine-3'-phosphate
  modified_base 9: mod_base = OTHER; note = 2'-O-methyladenosine-3'-phosphate
  modified_base 10: mod_base = OTHER; note = 2'-O-methyladenosine-3'-phosphate
  modified_base 11: mod_base = OTHER; note = 2'-O-methyluridine-3'-phosphate
  modified_base 12: mod_base = OTHER; note = 2'-fluoroguanosine-3'-phosphate
  modified_base 13: mod_base = OTHER; note = 2'-O-methylcytidine-3'-phosphate
  modified_base 14: mod_base = OTHER; note = 2'-fluorouridine-3'-phosphate
  modified_base 15: mod_base = OTHER; note = 2'-O-methyladenosine-3'-phosphate
  modified_base 16: mod_base = OTHER; note = 2'-O-methylcytidine-3'-phosphate
  modified_base 17: mod_base = OTHER; note = 2'-O-methyladenosine-3'-phosphate
  modified_base 18: mod_base = OTHER; note = 2'-O-methyladenosine-3'-phosphate
  modified_base 19: mod_base = OTHER; note = 2'-O-methyladenosine-3'-phosphate
  modified_base 20: mod_base = OTHER; note = 2'-O-methyladenosine-3'-phosphate
  modified_base 21: mod_base = OTHER; note = 2'-O-methylcytidine-3'-phosphate
  modified_base 22: mod_base = OTHER; note = 2'-O-methylcytidine-3'-phosphate
  modified_base 23: mod_base = OTHER; note = 2'-O-methylcytidine
ttaataaaaatgctacaaaaccc

SEQ ID NO: 1624 - RNA, 19 nt, synthetic construct
  source 1..19: mol_type = other RNA
  modified_base 1: mod_base = OTHER; note = 2'-O-methyluridine-3'-phosphorothioate
  modified_base 2: mod_base = OTHER; note = 2'-O-methyluridine-3'-phosphorothioate
  modified_base 3: mod_base = OTHER; note = 2'-O-methyluridine-3'-phosphate
  modified_base 4: mod_base = OTHER; note = 2'-O-methylguanosine-3'-phosphate
  modified_base 5: mod_base = OTHER; note = 2'-O-methyluridine-3'-phosphate
  modified_base 6: mod_base = OTHER; note = 2'-O-methyladenosine-3'-phosphate
  modified_base 7: mod_base = OTHER; note = 2'-fluoroguanosine-3'-phosphate
  modified_base 8: mod_base = OTHER; note = 2'-fluorocytidine-3'-phosphate
  modified_base 9: mod_base = OTHER; note = 2'-fluoroadenosine-3'-phosphate
  modified_base 10: mod_base = OTHER; note = 2'-O-methyluridine-3'-phosphate
  modified_base 11: mod_base = OTHER; note = 2'-O-methyluridine-3'-phosphate
  modified_base 12: mod_base = OTHER; note = 2'-O-methyluridine-3'-phosphate
  modified_base 13: mod_base = OTHER; note = 2'-O-methyluridine-3'-phosphate
  modified_base 14: mod_base = OTHER; note = 2'-O-methyluridine-3'-phosphate
  modified_base 15: mod_base = OTHER; note = 2'-O-methyladenosine-3'-phosphate
  modified_base 16: mod_base = OTHER; note = 2'-O-methyluridine-3'-phosphate
  modified_base 17: mod_base = OTHER; note = 2'-O-methyluridine-3'-phosphate
  modified_base 18: mod_base = OTHER; note = 2'-O-methyladenosine-3'-phosphate
  modified_base 19: mod_base = OTHER; note = 2'-O-methyladenosine
tttgtagcatttttattaa

SEQ ID NO: 1625 - RNA, 21 nt, synthetic construct
  source 1..21: mol_type = other RNA
  modified_base 1: mod_base = OTHER; note = 2'-O-methyluridine-3'-phosphorothioate
  modified_base 2: mod_base = OTHER; note = 2'-fluorouridine-3'-phosphorothioate
  modified_base 3: mod_base = OTHER; note = 2'-O-methyladenosine-3'-phosphate
  modified_base 4: mod_base = OTHER; note = 2'-O-methyladenosine-3'-phosphate
  modified_base 5: mod_base = OTHER; note = 2'-O-methyluridine-3'-phosphate
  modified_base 6: mod_base = OTHER; note = 2'-fluoroadenosine-3'-phosphate
  modified_base 7: mod_base = OTHER; note = 2'-O-methyladenosine-3'-phosphate
  modified_base 8: mod_base = OTHER; note = 2'-O-methyladenosine-3'-phosphate
  modified_base 9: mod_base = OTHER; note = 2'-O-methyladenosine-3'-phosphate
  modified_base 10: mod_base = OTHER; note = 2'-O-methyladenosine-3'-phosphate
  modified_base 11: mod_base = OTHER; note = 2'-O-methyluridine-3'-phosphate
  modified_base 12: mod_base = OTHER; note = 2'-fluoroguanosine-3'-phosphate
  modified_base 13: mod_base = OTHER; note = 2'-O-methylcytidine-3'-phosphate
  modified_base 14: mod_base = OTHER; note = 2'-fluorouridine-3'-phosphate
  modified_base 15: mod_base = OTHER; note = 2'-O-methyladenosine-3'-phosphate
  modified_base 16: mod_base = OTHER; note = 2'-O-methylcytidine-3'-phosphate
  modified_base 17: mod_base = OTHER; note = 2'-O-methyladenosine-3'-phosphate
  modified_base 18: mod_base = OTHER; note = 2'-O-methyladenosine-3'-phosphate
  modified_base 19: mod_base = OTHER; note = 2'-O-methyladenosine-3'-phosphorothioate
  modified_base 20: mod_base = OTHER; note = 2'-O-methyladenosine-3'-phosphorothioate
  modified_base 21: mod_base = OTHER; note = 2'-O-methylcytidine
ttaataaaaatgctacaaaac

SEQ ID NO: 1626 - RNA, 19 nt, synthetic construct
  source 1..19: mol_type = other RNA
  modified_base 1: mod_base = OTHER; note = 2'-O-methyluridine-3'-phosphorothioate
  modified_base 2: mod_base = OTHER; note = 2'-O-methyluridine-3'-phosphorothioate
  modified_base 3: mod_base = OTHER; note = 2'-O-methyluridine-3'-phosphate
  modified_base 4: mod_base = OTHER; note = 2'-O-methylguanosine-3'-phosphate
  modified_base 5: mod_base = OTHER; note = 2'-fluorouridine-3'-phosphate
  modified_base 6: mod_base = OTHER; note = 2'-O-methyladenosine-3'-phosphate
  modified_base 7: mod_base = OTHER; note = 2'-fluoroguanosine-3'-phosphate
  modified_base 8: mod_base = OTHER; note = 2'-fluorocytidine-3'-phosphate
  modified_base 9: mod_base = OTHER; note = 2'-fluoroadenosine-3'-phosphate
  modified_base 10: mod_base = OTHER; note = 2'-O-methyluridine-3'-phosphate
  modified_base 11: mod_base = OTHER; note = 2'-O-methyluridine-3'-phosphate
  modified_base 12: mod_base = OTHER; note = 2'-O-methyluridine-3'-phosphate
  modified_base 13: mod_base = OTHER; note = 2'-O-methyluridine-3'-phosphate
  modified_base 14: mod_base = OTHER; note = 2'-O-methyluridine-3'-phosphate
  modified_base 15: mod_base = OTHER; note = 2'-O-methyladenosine-3'-phosphate
  modified_base 16: mod_base = OTHER; note = 2'-O-methyluridine-3'-phosphate
  modified_base 17: mod_base = OTHER; note = 2'-O-methyluridine-3'-phosphate
  modified_base 18: mod_base = OTHER; note = 2'-O-methyladenosine-3'-phosphate
  modified_base 19: mod_base = OTHER; note = 2'-O-methyladenosine
tttgtagcatttttattaa

SEQ ID NO: 1627 - RNA, 21 nt, synthetic construct
  source 1..21: mol_type = other RNA
  modified_base 1: mod_base = OTHER; note = 2'-O-methyluridine-3'-phosphorothioate
  modified_base 2: mod_base = OTHER; note = 2'-fluorouridine-3'-phosphorothioate
  modified_base 3: mod_base = OTHER; note = 2'-O-methyladenosine-3'-phosphate
  modified_base 4: mod_base = OTHER; note = 2'-O-methyladenosine-3'-phosphate
  modified_base 5: mod_base = OTHER; note = 2'-O-methyluridine-3'-phosphate
  modified_base 6: mod_base = OTHER; note = 2'-fluoroadenosine-3'-phosphate
  modified_base 7: mod_base = OTHER; note = 2'-O-methyladenosine-3'-phosphate
  modified_base 8: mod_base = OTHER; note = 2'-fluoroadenosine-3'-phosphate
  modified_base 9: mod_base = OTHER; note = 2'-fluoroadenosine-3'-phosphate
  modified_base 10: mod_base = OTHER; note = 2'-O-methyladenosine-3'-phosphate
  modified_base 11: mod_base = OTHER; note = 2'-O-methyluridine-3'-phosphate
  modified_base 12: mod_base = OTHER; note = 2'-fluoroguanosine-3'-phosphate
  modified_base 13: mod_base = OTHER; note = 2'-O-methylcytidine-3'-phosphate
  modified_base 14: mod_base = OTHER; note = 2'-fluorouridine-3'-phosphate
  modified_base 15: mod_base = OTHER; note = 2'-O-methyladenosine-3'-phosphate
  modified_base 16: mod_base = OTHER; note = 2'-O-methylcytidine-3'-phosphate
  modified_base 17: mod_base = OTHER; note = 2'-O-methyladenosine-3'-phosphate
  modified_base 18: mod_base = OTHER; note = 2'-O-methyladenosine-3'-phosphate
  modified_base 19: mod_base = OTHER; note = 2'-O-methyladenosine-3'-phosphorothioate
  modified_base 20: mod_base = OTHER; note = 2'-O-methyladenosine-3'-phosphorothioate
  modified_base 21: mod_base = OTHER; note = 2'-O-methylcytidine
ttaataaaaatgctacaaaac

SEQ ID NO: 1628 - RNA, 19 nt, synthetic construct
  source 1..19: mol_type = other RNA
  modified_base 1: mod_base = OTHER; note = 2'-O-methyluridine-3'-phosphorothioate
  modified_base 2: mod_base = OTHER; note = 2'-O-methyluridine-3'-phosphorothioate
  modified_base 3: mod_base = OTHER; note = 2'-O-methyluridine-3'-phosphate
  modified_base 4: mod_base = OTHER; note = 2'-O-methylguanosine-3'-phosphate
  modified_base 5: mod_base = OTHER; note = 2'-fluorouridine-3'-phosphate
  modified_base 6: mod_base = OTHER; note = 2'-O-methyladenosine-3'-phosphate
  modified_base 7: mod_base = OTHER; note = 2'-fluoroguanosine-3'-phosphate
  modified_base 8: mod_base = OTHER; note = 2'-fluorocytidine-3'-phosphate
  modified_base 9: mod_base = OTHER; note = 2'-fluoroadenosine-3'-phosphate
  modified_base 10: mod_base = OTHER; note = 2'-O-methyluridine-3'-phosphate
  modified_base 11: mod_base = OTHER; note = 2'-O-methyluridine-3'-phosphate
  modified_base 12: mod_base = OTHER; note = 2'-O-methyluridine-3'-phosphate
  modified_base 13: mod_base = OTHER; note = 2'-O-methyluridine-3'-phosphate
  modified_base 14: mod_base = OTHER; note = 2'-O-methyluridine-3'-phosphate
  modified_base 15: mod_base = OTHER; note = 2'-O-methyladenosine-3'-phosphate
  modified_base 16: mod_base = OTHER; note = 2'-O-methyluridine-3'-phosphate
  modified_base 17: mod_base = OTHER; note = 2'-O-methyluridine-3'-phosphate
  modified_base 18: mod_base = OTHER; note = 2'-O-methyladenosine-3'-phosphate
  modified_base 19: mod_base = OTHER; note = 2'-O-methyladenosine
tttgtagcatttttattaa

SEQ ID NO: 1629 - RNA, 21 nt, synthetic construct
  source 1..21: mol_type = other RNA
  modified_base 1: mod_base = OTHER; note = 2'-O-methyluridine-3'-phosphorothioate
  modified_base 2: mod_base = OTHER; note = 2'-fluorouridine-3'-phosphorothioate
  modified_base 3: mod_base = OTHER; note = 2'-O-methyladenosine-3'-phosphate
  modified_base 4: mod_base = OTHER; note = 2'-O-methyladenosine-3'-phosphate
  modified_base 5: mod_base = OTHER; note = 2'-O-methyluridine-3'-phosphate
  modified_base 6: mod_base = OTHER; note = 2'-fluoroadenosine-3'-phosphate
  modified_base 7: mod_base = OTHER; note = 2'-O-methyladenosine-3'-phosphate
  modified_base 8: mod_base = OTHER; note = 2'-O-methyladenosine-3'-phosphate
  modified_base 9: mod_base = OTHER; note = 2'-O-methyladenosine-3'-phosphate
  modified_base 10: mod_base = OTHER; note = 2'-O-methyladenosine-3'-phosphate
  modified_base 11: mod_base = OTHER; note = 2'-O-methyluridine-3'-phosphate
  modified_base 12: mod_base = OTHER; note = 2'-fluoroguanosine-3'-phosphate
  modified_base 13: mod_base = OTHER; note = 2'-O-methylcytidine-3'-phosphate
  modified_base 14: mod_base = OTHER; note = 2'-fluorouridine-3'-phosphate
  modified_base 15: mod_base = OTHER; note = 2'-O-methyladenosine-3'-phosphate
  modified_base 16: mod_base = OTHER; note = 2'-O-methylcytidine-3'-phosphate
  modified_base 17: mod_base = OTHER; note = 2'-O-methyladenosine-3'-phosphate
  modified_base 18: mod_base = OTHER; note = 2'-O-methyladenosine-3'-phosphate
  modified_base 19: mod_base = OTHER; note = 2'-O-methyladenosine-3'-phosphorothioate
  modified_base 20: mod_base = OTHER; note = 2'-O-methyladenosine-3'-phosphorothioate
  modified_base 21: mod_base = OTHER; note = 2'-O-methylcytidine
ttaataaaaatgctacaaaac

SEQ ID NO: 1630 - RNA, 21 nt, synthetic construct
  source 1..21: mol_type = other RNA
  modified_base 1: mod_base = OTHER; note = 2'-O-methylguanosine-3'-phosphorothioate
  modified_base 2: mod_base = OTHER; note = 2'-O-methyluridine-3'-phosphorothioate
  modified_base 3: mod_base = OTHER; note = 2'-O-methyluridine-3'-phosphate
  modified_base 4: mod_base = OTHER; note = 2'-O-methyluridine-3'-phosphate
  modified_base 5: mod_base = OTHER; note = 2'-O-methyluridine-3'-phosphate
  modified_base 6: mod_base = OTHER; note = 2'-O-methylguanosine-3'-phosphate
  modified_base 7: mod_base = OTHER; note = 2'-O-methyluridine-3'-phosphate
  modified_base 8: mod_base = OTHER; note = 2'-O-methyladenosine-3'-phosphate
  modified_base 9: mod_base = OTHER; note = 2'-fluoroguanosine-3'-phosphate
  modified_base 10: mod_base = OTHER; note = 2'-fluorocytidine-3'-phosphate
  modified_base 11: mod_base = OTHER; note = 2'-fluoroadenosine-3'-phosphate
  modified_base 12: mod_base = OTHER; note = 2'-O-methyluridine-3'-phosphate
  modified_base 13: mod_base = OTHER; note = 2'-O-methyluridine-3'-phosphate
  modified_base 14: mod_base = OTHER; note = 2'-O-methyluridine-3'-phosphate
  modified_base 15: mod_base = OTHER; note = 2'-O-methyluridine-3'-phosphate
  modified_base 16: mod_base = OTHER; note = 2'-O-methyluridine-3'-phosphate
  modified_base 17: mod_base = OTHER; note = 2'-O-methyladenosine-3'-phosphate
  modified_base 18: mod_base = OTHER; note = 2'-O-methyluridine-3'-phosphate
  modified_base 19: mod_base = OTHER; note = 2'-O-methyluridine-3'-phosphate
  modified_base 20: mod_base = OTHER; note = 2'-O-methyladenosine-3'-phosphate
  modified_base 21: mod_base = OTHER; note = 2'-O-methyladenosine
gttttgtagcatttttattaa

SEQ ID NO: 1631 - RNA, 23 nt, synthetic construct
  source 1..23: mol_type = other RNA
  modified_base 1: mod_base = OTHER; note = 2'-O-methyluridine-3'-phosphorothioate
  modified_base 2: mod_base = OTHER; note = 2'-fluorouridine-3'-phosphorothioate
  modified_base 3: mod_base = OTHER; note = 2'-O-methyladenosine-3'-phosphate
  modified_base 4: mod_base = OTHER; note = 2'-O-methyladenosine-3'-phosphate
  modified_base 5: mod_base = OTHER; note = 2'-O-methyluridine-3'-phosphate
  modified_base 6: mod_base = OTHER; note = 2'-fluoroadenosine-3'-phosphate
  modified_base 7: mod_base = OTHER; note = 2'-O-methyladenosine-3'-phosphate
  modified_base 8: mod_base = OTHER; note = 2'-O-methyladenosine-3'-phosphate
  modified_base 9: mod_base = OTHER; note = 2'-O-methyladenosine-3'-phosphate
  modified_base 10: mod_base = OTHER; note = 2'-O-methyladenosine-3'-phosphate
  modified_base 11: mod_base = OTHER; note = 2'-O-methyluridine-3'-phosphate
  modified_base 12: mod_base = OTHER; note = 2'-fluoroguanosine-3'-phosphate
  modified_base 13: mod_base = OTHER; note = 2'-O-methylcytidine-3'-phosphate
  modified_base 14: mod_base = OTHER; note = 2'-fluorouridine-3'-phosphate
  modified_base 15: mod_base = OTHER; note = 2'-O-methyladenosine-3'-phosphate
  modified_base 16: mod_base = OTHER; note = 2'-O-methylcytidine-3'-phosphate
  modified_base 17: mod_base = OTHER; note = 2'-O-methyladenosine-3'-phosphate
  modified_base 18: mod_base = OTHER; note = 2'-O-methyladenosine-3'-phosphate
  modified_base 19: mod_base = OTHER; note = 2'-O-methyladenosine-3'-phosphate
  modified_base 20: mod_base = OTHER; note = 2'-O-methyladenosine-3'-phosphate
  modified_base 21: mod_base = OTHER; note = 2'-O-methylcytidine-3'-phosphorothioate
  modified_base 22: mod_base = OTHER; note = 2'-O-methylcytidine-3'-phosphorothioate
  modified_base 23: mod_base = OTHER; note = 2'-O-methylcytidine
ttaataaaaatgctacaaaaccc

SEQ ID NO: 1632 - RNA, 21 nt, synthetic construct
  source 1..21: mol_type = other RNA
  modified_base 1: mod_base = OTHER; note = 2'-O-methylguanosine-3'-phosphorothioate
  modified_base 2: mod_base = OTHER; note = 2'-O-methyluridine-3'-phosphorothioate
  modified_base 3: mod_base = OTHER; note = 2'-O-methyluridine-3'-phosphate
  modified_base 4: mod_base = OTHER; note = 2'-O-methyluridine-3'-phosphate
  modified_base 5: mod_base = OTHER; note = 2'-O-methyluridine-3'-phosphate
  modified_base 6: mod_base = OTHER; note = 2'-O-methylguanosine-3'-phosphate
  modified_base 7: mod_base = OTHER; note = 2'-fluorouridine-3'-phosphate
  modified_base 8: mod_base = OTHER; note = 2'-O-methyladenosine-3'-phosphate
  modified_base 9: mod_base = OTHER; note = 2'-fluoroguanosine-3'-phosphate
  modified_base 10: mod_base = OTHER; note = 2'-fluorocytidine-3'-phosphate
  modified_base 11: mod_base = OTHER; note = 2'-fluoroadenosine-3'-phosphate
  modified_base 12: mod_base = OTHER; note = 2'-O-methyluridine-3'-phosphate
  modified_base 13: mod_base = OTHER; note = 2'-O-methyluridine-3'-phosphate
  modified_base 14: mod_base = OTHER; note = 2'-O-methyluridine-3'-phosphate
  modified_base 15: mod_base = OTHER; note = 2'-O-methyluridine-3'-phosphate
  modified_base 16: mod_base = OTHER; note = 2'-O-methyluridine-3'-phosphate
  modified_base 17: mod_base = OTHER; note = 2'-O-methyladenosine-3'-phosphate
  modified_base 18: mod_base = OTHER; note = 2'-O-methyluridine-3'-phosphate
  modified_base 19: mod_base = OTHER; note = 2'-O-methyluridine-3'-phosphate
  modified_base 20: mod_base = OTHER; note = 2'-O-methyladenosine-3'-phosphate
  modified_base 21: mod_base = OTHER; note = 2'-O-methyladenosine
gttttgtagcatttttattaa

SEQ ID NO: 1633 - RNA, 23 nt, synthetic construct
  source 1..23: mol_type = other RNA
  modified_base 1: mod_base = OTHER; note = 2'-O-methyluridine-3'-phosphorothioate
  modified_base 2: mod_base = OTHER; note = 2'-fluorouridine-3'-phosphorothioate
  modified_base 3: mod_base = OTHER; note = 2'-O-methyladenosine-3'-phosphate
  modified_base 4: mod_base = OTHER; note = 2'-O-methyladenosine-3'-phosphate
  modified_base 5: mod_base = OTHER; note = 2'-O-methyluridine-3'-phosphate
  modified_base 6: mod_base = OTHER; note = 2'-fluoroadenosine-3'-phosphate
  modified_base 7: mod_base = OTHER; note = 2'-O-methyladenosine-3'-phosphate
  modified_base 8: mod_base = OTHER; note = 2'-fluoroadenosine-3'-phosphate
  modified_base 9: mod_base = OTHER; note = 2'-fluoroadenosine-3'-phosphate
  modified_base 10: mod_base = OTHER; note = 2'-O-methyladenosine-3'-phosphate
  modified_base 11: mod_base = OTHER; note = 2'-O-methyluridine-3'-phosphate
  modified_base 12: mod_base = OTHER; note = 2'-fluoroguanosine-3'-phosphate
  modified_base 13: mod_base = OTHER; note = 2'-O-methylcytidine-3'-phosphate
  modified_base 14: mod_base = OTHER; note = 2'-fluorouridine-3'-phosphate
  modified_base 15: mod_base = OTHER; note = 2'-O-methyladenosine-3'-phosphate
  modified_base 16: mod_base = OTHER; note = 2'-O-methylcytidine-3'-phosphate
  modified_base 17: mod_base = OTHER; note = 2'-O-methyladenosine-3'-phosphate
  modified_base 18: mod_base = OTHER; note = 2'-O-methyladenosine-3'-phosphate
  modified_base 19: mod_base = OTHER; note = 2'-O-methyladenosine-3'-phosphate
  modified_base 20: mod_base = OTHER; note = 2'-O-methyladenosine-3'-phosphate
  modified_base 21: mod_base = OTHER; note = 2'-O-methylcytidine-3'-phosphorothioate
  modified_base 22: mod_base = OTHER; note = 2'-O-methylcytidine-3'-phosphorothioate
  modified_base 23: mod_base = OTHER; note = 2'-O-methylcytidine
ttaataaaaatgctacaaaaccc

SEQ ID NO: 1634 - RNA, 21 nt, synthetic construct
  source 1..21: mol_type = other RNA
  modified_base 1: mod_base = OTHER; note = 2'-O-methylguanosine-3'-phosphorothioate
  modified_base 2: mod_base = OTHER; note = 2'-O-methyluridine-3'-phosphorothioate
  modified_base 3: mod_base = OTHER; note = 2'-O-methyluridine-3'-phosphate
  modified_base 4: mod_base = OTHER; note = 2'-O-methyluridine-3'-phosphate
  modified_base 5: mod_base = OTHER; note = 2'-O-methyluridine-3'-phosphate
  modified_base 6: mod_base = OTHER; note = 2'-O-methylguanosine-3'-phosphate
  modified_base 7: mod_base = OTHER; note = 2'-fluorouridine-3'-phosphate
  modified_base 8: mod_base = OTHER; note = 2'-O-methyladenosine-3'-phosphate
  modified_base 9: mod_base = OTHER; note = 2'-fluoroguanosine-3'-phosphate
  modified_base 10: mod_base = OTHER; note = 2'-fluorocytidine-3'-phosphate
  modified_base 11: mod_base = OTHER; note = 2'-fluoroadenosine-3'-phosphate
  modified_base 12: mod_base = OTHER; note = 2'-O-methyluridine-3'-phosphate
  modified_base 13: mod_base = OTHER; note = 2'-O-methyluridine-3'-phosphate
  modified_base 14: mod_base = OTHER; note = 2'-O-methyluridine-3'-phosphate
  modified_base 15: mod_base = OTHER; note = 2'-O-methyluridine-3'-phosphate
  modified_base 16: mod_base = OTHER; note = 2'-O-methyluridine-3'-phosphate
  modified_base 17: mod_base = OTHER; note = 2'-O-methyladenosine-3'-phosphate
  modified_base 18: mod_base = OTHER; note = 2'-O-methyluridine-3'-phosphate
  modified_base 19: mod_base = OTHER; note = 2'-O-methyluridine-3'-phosphate
  modified_base 20: mod_base = OTHER; note = 2'-O-methyladenosine-3'-phosphate
  modified_base 21: mod_base = OTHER; note = 2'-O-methyladenosine
gttttgtagcatttttattaa

SEQ ID NO: 1635 - RNA, 23 nt, synthetic construct
  source 1..23: mol_type = other RNA
  modified_base 1: mod_base = OTHER; note = 2'-O-methyluridine-3'-phosphorothioate
  modified_base 2: mod_base = OTHER; note = 2'-fluorouridine-3'-phosphorothioate
  modified_base 3: mod_base = OTHER; note = 2'-O-methyladenosine-3'-phosphate
  modified_base 4: mod_base = OTHER; note = 2'-O-methyladenosine-3'-phosphate
  modified_base 5: mod_base = OTHER; note = 2'-O-methyluridine-3'-phosphate
  modified_base 6: mod_base = OTHER; note = 2'-fluoroadenosine-3'-phosphate
  modified_base 7: mod_base = OTHER; note = 2'-O-methyladenosine-3'-phosphate
  modified_base 8: mod_base = OTHER; note = 2'-O-methyladenosine-3'-phosphate
  modified_base 9: mod_base = OTHER; note = 2'-O-methyladenosine-3'-phosphate
  modified_base 10: mod_base = OTHER; note = 2'-O-methyladenosine-3'-phosphate
  modified_base 11: mod_base = OTHER; note = 2'-O-methyluridine-3'-phosphate
  modified_base 12: mod_base = OTHER; note = 2'-fluoroguanosine-3'-phosphate
  modified_base 13: mod_base = OTHER; note = 2'-O-methylcytidine-3'-phosphate
  modified_base 14: mod_base = OTHER; note = 2'-fluorouridine-3'-phosphate
  modified_base 15: mod_base = OTHER; note = 2'-O-methyladenosine-3'-phosphate
  modified_base 16: mod_base = OTHER; note = 2'-O-methylcytidine-3'-phosphate
  modified_base 17: mod_base = OTHER; note = 2'-O-methyladenosine-3'-phosphate
  modified_base 18: mod_base = OTHER; note = 2'-O-methyladenosine-3'-phosphate
  modified_base 19: mod_base = OTHER; note = 2'-O-methyladenosine-3'-phosphate
  modified_base 20: mod_base = OTHER; note = 2'-O-methyladenosine-3'-phosphate
  modified_base 21: mod_base = OTHER; note = 2'-O-methylcytidine-3'-phosphorothioate
  modified_base 22: mod_base = OTHER; note = 2'-O-methylcytidine-3'-phosphorothioate
  modified_base 23: mod_base = OTHER; note = 2'-O-methylcytidine
ttaataaaaatgctacaaaaccc

SEQ ID NO: 1636 - RNA, 19 nt, synthetic construct
  source 1..19: mol_type = other RNA
  modified_base 1: mod_base = OTHER; note = 2'-O-methyluridine-3'-phosphate
  modified_base 2: mod_base = OTHER; note = 2'-O-methyluridine-3'-phosphate
  modified_base 3: mod_base = OTHER; note = 2'-O-methyluridine-3'-phosphate
  modified_base 4: mod_base = OTHER; note = 2'-O-methylguanosine-3'-phosphate
  modified_base 5: mod_base = OTHER; note = 2'-O-methyluridine-3'-phosphate
  modified_base 6: mod_base = OTHER; note = 2'-O-methyladenosine-3'-phosphate
  modified_base 7: mod_base = OTHER; note = 2'-fluoroguanosine-3'-phosphate
  modified_base 8: mod_base = OTHER; note = 2'-fluorocytidine-3'-phosphate
  modified_base 9: mod_base = OTHER; note = 2'-fluoroadenosine-3'-phosphate
  modified_base 10: mod_base = OTHER; note = 2'-O-methyluridine-3'-phosphate
  modified_base 11: mod_base = OTHER; note = 2'-O-methyluridine-3'-phosphate
  modified_base 12: mod_base = OTHER; note = 2'-O-methyluridine-3'-phosphate
  modified_base 13: mod_base = OTHER; note = 2'-O-methyluridine-3'-phosphate
  modified_base 14: mod_base = OTHER; note = 2'-O-methyluridine-3'-phosphate
  modified_base 15: mod_base = OTHER; note = 2'-O-methyladenosine-3'-phosphate
  modified_base 16: mod_base = OTHER; note = 2'-O-methyluridine-3'-phosphate
  modified_base 17: mod_base = OTHER; note = 2'-O-methyluridine-3'-phosphate
  modified_base 18: mod_base = OTHER; note = 2'-O-methyladenosine-3'-phosphate
  modified_base 19: mod_base = OTHER; note = 2'-O-methyladenosine
tttgtagcatttttattaa

SEQ ID NO: 1637 - RNA, 21 nt, synthetic construct
  source 1..21: mol_type = other RNA
  modified_base 1: mod_base = OTHER; note = 5'-phosphate-2'-O-methyluridine-3'-phosphate
  modified_base 2: mod_base = OTHER; note = 2'-fluorouridine-3'-phosphate
  modified_base 3: mod_base = OTHER; note = 2'-O-methyladenosine-3'-phosphate
  modified_base 4: mod_base = OTHER; note = 2'-O-methyladenosine-3'-phosphate
  modified_base 5: mod_base = OTHER; note = 2'-O-methyluridine-3'-phosphate
  modified_base 6: mod_base = OTHER; note = 2'-fluoroadenosine-3'-phosphate
  modified_base 7: mod_base = OTHER; note = 2'-O-methyladenosine-3'-phosphate
  modified_base 8: mod_base = OTHER; note = 2'-O-methyladenosine-3'-phosphate
  modified_base 9: mod_base = OTHER; note = 2'-O-methyladenosine-3'-phosphate
  modified_base 10: mod_base = OTHER; note = 2'-O-methyladenosine-3'-phosphate
  modified_base 11: mod_base = OTHER; note = 2'-O-methyluridine-3'-phosphate
  modified_base 12: mod_base = OTHER; note = 2'-fluoroguanosine-3'-phosphate
  modified_base 13: mod_base = OTHER; note = 2'-O-methylcytidine-3'-phosphate
  modified_base 14: mod_base = OTHER; note = 2'-fluorouridine-3'-phosphate
  modified_base 15: mod_base = OTHER; note = 2'-O-methyladenosine-3'-phosphate
  modified_base 16: mod_base = OTHER; note = 2'-O-methylcytidine-3'-phosphate
  modified_base 17: mod_base = OTHER; note = 2'-O-methyladenosine-3'-phosphate
  modified_base 18: mod_base = OTHER; note = 2'-O-methyladenosine-3'-phosphate
  modified_base 19: mod_base = OTHER; note = 2'-O-methyladenosine-3'-phosphate
  modified_base 20: mod_base = OTHER; note = 2'-O-methyladenosine-3'-phosphate
  modified_base 21: mod_base = OTHER; note = 2'-O-methylcytidine
ttaataaaaatgctacaaaac

SEQ ID NO: 1638 - RNA, 19 nt, synthetic construct
  source 1..19: mol_type = other RNA
  modified_base 1: mod_base = OTHER; note = 2'-O-methyluridine-3'-phosphate
  modified_base 2: mod_base = OTHER; note = 2'-O-methyluridine-3'-phosphate
  modified_base 3: mod_base = OTHER; note = 2'-O-methyluridine-3'-phosphate
  modified_base 4: mod_base = OTHER; note = 2'-O-methylguanosine-3'-phosphate
  modified_base 5: mod_base = OTHER; note = 2'-fluorouridine-3'-phosphate
  modified_base 6: mod_base = OTHER; note = 2'-O-methyladenosine-3'-phosphate
  modified_base 7: mod_base = OTHER; note = 2'-fluoroguanosine-3'-phosphate
  modified_base 8: mod_base = OTHER; note = 2'-fluorocytidine-3'-phosphate
  modified_base 9: mod_base = OTHER; note = 2'-fluoroadenosine-3'-phosphate
  modified_base 10: mod_base = OTHER; note = 2'-O-methyluridine-3'-phosphate
  modified_base 11: mod_base = OTHER; note = 2'-O-methyluridine-3'-phosphate
  modified_base 12: mod_base = OTHER; note = 2'-O-methyluridine-3'-phosphate
  modified_base 13: mod_base = OTHER; note = 2'-O-methyluridine-3'-phosphate
  modified_base 14: mod_base = OTHER; note = 2'-O-methyluridine-3'-phosphate
  modified_base 15: mod_base = OTHER; note = 2'-O-methyladenosine-3'-phosphate
  modified_base 16: mod_base = OTHER; note = 2'-O-methyluridine-3'-phosphate
  modified_base 17: mod_base = OTHER; note = 2'-O-methyluridine-3'-phosphate
  modified_base 18: mod_base = OTHER; note = 2'-O-methyladenosine-3'-phosphate
  modified_base 19: mod_base = OTHER; note = 2'-O-methyladenosine
tttgtagcatttttattaa

SEQ ID NO: 1639 - RNA, 21 nt, synthetic construct
  source 1..21: mol_type = other RNA
  modified_base 1: mod_base = OTHER; note = 5'-phosphate-2'-O-methyluridine-3'-phosphate
  modified_base 2: mod_base = OTHER; note = 2'-fluorouridine-3'-phosphate
  modified_base 3: mod_base = OTHER; note = 2'-O-methyladenosine-3'-phosphate
  modified_base 4: mod_base = OTHER; note = 2'-O-methyladenosine-3'-phosphate
  modified_base 5: mod_base = OTHER; note = 2'-O-methyluridine-3'-phosphate
  modified_base 6: mod_base = OTHER; note = 2'-fluoroadenosine-3'-phosphate
  modified_base 7: mod_base = OTHER; note = 2'-O-methyladenosine-3'-phosphate
  modified_base 8: mod_base = OTHER; note = 2'-fluoroadenosine-3'-phosphate
  modified_base 9: mod_base = OTHER; note = 2'-fluoroadenosine-3'-phosphate
  modified_base 10: mod_base = OTHER; note = 2'-O-methyladenosine-3'-phosphate
  modified_base 11: mod_base = OTHER; note = 2'-O-methyluridine-3'-phosphate
  modified_base 12: mod_base = OTHER; note = 2'-fluoroguanosine-3'-phosphate
  modified_base 13: mod_base = OTHER; note = 2'-O-methylcytidine-3'-phosphate
  modified_base 14: mod_base = OTHER; note = 2'-fluorouridine-3'-phosphate
  modified_base 15: mod_base = OTHER; note = 2'-O-methyladenosine-3'-phosphate
  modified_base 16: mod_base = OTHER; note = 2'-O-methylcytidine-3'-phosphate
  modified_base 17: mod_base = OTHER; note = 2'-O-methyladenosine-3'-phosphate
  modified_base 18: mod_base = OTHER; note = 2'-O-methyladenosine-3'-phosphate
  modified_base 19: mod_base = OTHER; note = 2'-O-methyladenosine-3'-phosphate
  modified_base 20: mod_base = OTHER; note = 2'-O-methyladenosine-3'-phosphate
  modified_base 21: mod_base = OTHER; note = 2'-O-methylcytidine
ttaataaaaatgctacaaaac

SEQ ID NO: 1640 - RNA, 19 nt, synthetic construct
  source 1..19: mol_type = other RNA
  modified_base 1: mod_base = OTHER; note = 2'-O-methyluridine-3'-phosphate
  modified_base 2: mod_base = OTHER; note = 2'-O-methyluridine-3'-phosphate
  modified_base 3: mod_base = OTHER; note = 2'-O-methyluridine-3'-phosphate
  modified_base 4: mod_base = OTHER; note = 2'-O-methylguanosine-3'-phosphate
  modified_base 5: mod_base = OTHER; note = 2'-fluorouridine-3'-phosphate
  modified_base 6: mod_base = OTHER; note = 2'-O-methyladenosine-3'-phosphate
  modified_base 7: mod_base = OTHER; note = 2'-fluoroguanosine-3'-phosphate
  modified_base 8: mod_base = OTHER; note = 2'-fluorocytidine-3'-phosphate
  modified_base 9: mod_base = OTHER; note = 2'-fluoroadenosine-3'-phosphate
  modified_base 10: mod_base = OTHER; note = 2'-O-methyluridine-3'-phosphate
  modified_base 11: mod_base = OTHER; note = 2'-O-methyluridine-3'-phosphate
  modified_base 12: mod_base = OTHER; note = 2'-O-methyluridine-3'-phosphate
  modified_base 13: mod_base = OTHER; note = 2'-O-methyluridine-3'-phosphate
  modified_base 14: mod_base = OTHER; note = 2'-O-methyluridine-3'-phosphate
  modified_base 15: mod_base = OTHER; note = 2'-O-methyladenosine-3'-phosphate
  modified_base 16: mod_base = OTHER; note = 2'-O-methyluridine-3'-phosphate
  modified_base 17: mod_base = OTHER; note = 2'-O-methyluridine-3'-phosphate
  modified_base 18: mod_base = OTHER; note = 2'-O-methyladenosine-3'-phosphate
  modified_base 19: mod_base = OTHER; note = 2'-O-methyladenosine-3'-phosphate
tttgtagcatttttattaa

SEQ ID NO: 1641 - RNA, 21 nt, synthetic construct
  source 1..21: mol_type = other RNA
  modified_base 1: mod_base = OTHER; note = 5'-phosphate-2'-O-methyluridine-3'-phosphate
  modified_base 2: mod_base = OTHER; note = 2'-fluorouridine-3'-phosphate
  modified_base 3: mod_base = OTHER; note = 2'-O-methyladenosine-3'-phosphate
  modified_base 4: mod_base = OTHER; note = 2'-O-methyladenosine-3'-phosphate
  modified_base 5: mod_base = OTHER; note = 2'-O-methyluridine-3'-phosphate
  modified_base 6: mod_base = OTHER; note = 2'-fluoroadenosine-3'-phosphate
  modified_base 7: mod_base = OTHER; note = 2'-O-methyladenosine-3'-phosphate
  modified_base 8: mod_base = OTHER; note = 2'-O-methyladenosine-3'-phosphate
  modified_base 9: mod_base = OTHER; note = 2'-O-methyladenosine-3'-phosphate
  modified_base 10: mod_base = OTHER; note = 2'-O-methyladenosine-3'-phosphate
  modified_base 11: mod_base = OTHER; note = 2'-O-methyluridine-3'-phosphate
  modified_base 12: mod_base = OTHER; note = 2'-fluoroguanosine-3'-phosphate
  modified_base 13: mod_base = OTHER; note = 2'-O-methylcytidine-3'-phosphate
  modified_base 14: mod_base = OTHER; note = 2'-fluorouridine-3'-phosphate
  modified_base 15: mod_base = OTHER; note = 2'-O-methyladenosine-3'-phosphate
  modified_base 16: mod_base = OTHER; note = 2'-O-methylcytidine-3'-phosphate
  modified_base 17: mod_base = OTHER; note = 2'-O-methyladenosine-3'-phosphate
  modified_base 18: mod_base = OTHER; note = 2'-O-methyladenosine-3'-phosphate
  modified_base 19: mod_base = OTHER; note = 2'-O-methyladenosine-3'-phosphate
  modified_base 20: mod_base = OTHER; note = 2'-O-methyladenosine-3'-phosphate
  modified_base 21: mod_base = OTHER; note = 2'-O-methylcytidine
ttaataaaaatgctacaaaac

SEQ ID NO: 1642 - RNA, 21 nt, synthetic construct
  source 1..21: mol_type = other RNA
  modified_base 1: mod_base = OTHER; note = 2'-O-methylguanosine-3'-phosphate
  modified_base 2: mod_base = OTHER; note = 2'-O-methyluridine-3'-phosphate
  modified_base 3: mod_base = OTHER; note = 2'-O-methyluridine-3'-phosphate
  modified_base 4: mod_base = OTHER; note = 2'-O-methyluridine-3'-phosphate
  modified_base 5: mod_base = OTHER; note = 2'-O-methyluridine-3'-phosphate
  modified_base 6: mod_base = OTHER; note = 2'-O-methylguanosine-3'-phosphate
  modified_base 7: mod_base = OTHER; note = 2'-O-methyluridine-3'-phosphate
  modified_base 8: mod_base = OTHER; note = 2'-O-methyladenosine-3'-phosphate
  modified_base 9: mod_base = OTHER; note = 2'-fluoroguanosine-3'-phosphate
  modified_base 10: mod_base = OTHER; note = 2'-fluorocytidine-3'-phosphate
  modified_base 11: mod_base = OTHER; note = 2'-fluoroadenosine-3'-phosphate
  modified_base 12: mod_base = OTHER; note = 2'-O-methyluridine-3'-phosphate
  modified_base 13: mod_base = OTHER; note = 2'-O-methyluridine-3'-phosphate
  modified_base 14: mod_base = OTHER; note = 2'-O-methyluridine-3'-phosphate
  modified_base 15: mod_base = OTHER; note = 2'-O-methyluridine-3'-phosphate
  modified_base 16: mod_base = OTHER; note = 2'-O-methyluridine-3'-phosphate
  modified_base 17: mod_base = OTHER; note = 2'-O-methyladenosine-3'-phosphate
  modified_base 18: mod_base = OTHER; note = 2'-O-methyluridine-3'-phosphate
  modified_base 19: mod_base = OTHER; note = 2'-O-methyluridine-3'-phosphate
  modified_base 20: mod_base = OTHER; note = 2'-O-methyladenosine-3'-phosphate
  modified_base 21: mod_base = OTHER; note = 2'-O-methyladenosine
gttttgtagcatttttattaa

SEQ ID NO: 1643 - RNA, 23 nt, synthetic construct
  source 1..23: mol_type = other RNA
  modified_base 1: mod_base = OTHER; note = 5'-phosphate-2'-O-methyluridine-3'-phosphate
  modified_base 2: mod_base = OTHER; note = 2'-fluorouridine-3'-phosphate
  modified_base 3: mod_base = OTHER; note = 2'-O-methyladenosine-3'-phosphate
  modified_base 4: mod_base = OTHER; note = 2'-O-methyladenosine-3'-phosphate
  modified_base 5: mod_base = OTHER; note = 2'-O-methyluridine-3'-phosphate
  modified_base 6: mod_base = OTHER; note = 2'-fluoroadenosine-3'-phosphate
  modified_base 7: mod_base = OTHER; note = 2'-O-methyladenosine-3'-phosphate
  modified_base 8: mod_base = OTHER; note = 2'-O-methyladenosine-3'-phosphate
  modified_base 9: mod_base = OTHER; note = 2'-O-methyladenosine-3'-phosphate
  modified_base 10: mod_base = OTHER; note = 2'-O-methyladenosine-3'-phosphate
  modified_base 11: mod_base = OTHER; note = 2'-O-methyluridine-3'-phosphate
  modified_base 12: mod_base = OTHER; note = 2'-fluoroguanosine-3'-phosphate
  modified_base 13: mod_base = OTHER; note = 2'-O-methylcytidine-3'-phosphate
  modified_base 14: mod_base = OTHER; note = 2'-fluorouridine-3'-phosphate
  modified_base 15: mod_base = OTHER; note = 2'-O-methyladenosine-3'-phosphate
  modified_base 16: mod_base = OTHER; note = 2'-O-methylcytidine-3'-phosphate
  modified_base 17: mod_base = OTHER; note = 2'-O-methyladenosine-3'-phosphate
  modified_base 18: mod_base = OTHER; note = 2'-O-methyladenosine-3'-phosphate
  modified_base 19: mod_base = OTHER; note = 2'-O-methyladenosine-3'-phosphate
  modified_base 20: mod_base = OTHER; note = 2'-O-methyladenosine-3'-phosphate
  modified_base 21: mod_base = OTHER; note = 2'-O-methylcytidine-3'-phosphate
  modified_base 22: mod_base = OTHER; note = 2'-O-methylcytidine-3'-phosphate
  modified_base 23: mod_base = OTHER; note = 2'-O-methylcytidine
ttaataaaaatgctacaaaaccc

SEQ ID NO: 1644 - RNA, 21 nt, synthetic construct
  source 1..21: mol_type = other RNA
  modified_base 1: mod_base = OTHER; note = 2'-O-methylguanosine-3'-phosphate
  modified_base 2: mod_base = OTHER; note = 2'-O-methyluridine-3'-phosphate
  modified_base 3: mod_base = OTHER; note = 2'-O-methyluridine-3'-phosphate
  modified_base 4: mod_base = OTHER; note = 2'-O-methyluridine-3'-phosphate
  modified_base 5: mod_base = OTHER; note = 2'-O-methyluridine-3'-phosphate
  modified_base 6: mod_base = OTHER; note = 2'-O-methylguanosine-3'-phosphate
  modified_base 7: mod_base = OTHER; note = 2'-fluorouridine-3'-phosphate
  modified_base 8: mod_base = OTHER; note = 2'-O-methyladenosine-3'-phosphate
  modified_base 9: mod_base = OTHER; note = 2'-fluoroguanosine-3'-phosphate
  modified_base 10: mod_base = OTHER; note = 2'-fluorocytidine-3'-phosphate
  modified_base 11: mod_base = OTHER; note = 2'-fluoroadenosine-3'-phosphate
  modified_base 12: mod_base = OTHER; note = 2'-O-methyluridine-3'-phosphate
  modified_base 13: mod_base = OTHER; note = 2'-O-methyluridine-3'-phosphate
  modified_base 14: mod_base = OTHER; note = 2'-O-methyluridine-3'-phosphate
  modified_base 15: mod_base = OTHER; note = 2'-O-methyluridine-3'-phosphate
  modified_base 16: mod_base = OTHER; note = 2'-O-methyluridine-3'-phosphate
  modified_base 17: mod_base = OTHER; note = 2'-O-methyladenosine-3'-phosphate
  modified_base 18: mod_base = OTHER; note = 2'-O-methyluridine-3'-phosphate
  modified_base 19: mod_base = OTHER; note = 2'-O-methyluridine-3'-phosphate
  modified_base 20: mod_base = OTHER; note = 2'-O-methyladenosine-3'-phosphate
  modified_base 21: mod_base = OTHER; note = 2'-O-methyladenosine
gttttgtagcatttttattaa

SEQ ID NO: 1645 - RNA, 23 nt, synthetic construct
  source 1..23: mol_type = other RNA
  modified_base 1: mod_base = OTHER; note = 5'-phosphate-2'-O-methyluridine-3'-phosphate
  modified_base 2: mod_base = OTHER; note = 2'-fluorouridine-3'-phosphate
  modified_base 3: mod_base = OTHER; note = 2'-O-methyladenosine-3'-phosphate
  modified_base 4: mod_base = OTHER; note = 2'-O-methyladenosine-3'-phosphate
  modified_base 5: mod_base = OTHER; note = 2'-O-methyluridine-3'-phosphate
  modified_base 6: mod_base = OTHER; note = 2'-fluoroadenosine-3'-phosphate
  modified_base 7: mod_base = OTHER; note = 2'-O-methyladenosine-3'-phosphate
  modified_base 8: mod_base = OTHER; note = 2'-fluoroadenosine-3'-phosphate
  modified_base 9: mod_base = OTHER; note = 2'-fluoroadenosine-3'-phosphate
  modified_base 10: mod_base = OTHER; note = 2'-O-methyladenosine-3'-phosphate
  modified_base 11: mod_base = OTHER; note = 2'-O-methyluridine-3'-phosphate
  modified_base 12: mod_base = OTHER; note = 2'-fluoroguanosine-3'-phosphate
  modified_base 13: mod_base = OTHER; note = 2'-O-methylcytidine-3'-phosphate
  modified_base 14: mod_base = OTHER; note = 2'-fluorouridine-3'-phosphate
  modified_base 15: mod_base = OTHER; note = 2'-O-methyladenosine-3'-phosphate
  modified_base 16: mod_base = OTHER; note = 2'-O-methylcytidine-3'-phosphate
  modified_base 17: mod_base = OTHER; note = 2'-O-methyladenosine-3'-phosphate
  modified_base 18: mod_base = OTHER; note = 2'-O-methyladenosine-3'-phosphate
  modified_base 19: mod_base = OTHER; note = 2'-O-methyladenosine-3'-phosphate
  modified_base 20: mod_base = OTHER; note = 2'-O-methyladenosine-3'-phosphate
  modified_base 21: mod_base = OTHER; note = 2'-O-methylcytidine-3'-phosphate
  modified_base 22: mod_base = OTHER; note = 2'-O-methylcytidine-3'-phosphate
  modified_base 23: mod_base = OTHER; note = 2'-O-methylcytidine
ttaataaaaatgctacaaaaccc

SEQ ID NO: 1646 - RNA, 21 nt, synthetic construct
  source 1..21: mol_type = other RNA
  modified_base 1: mod_base = OTHER; note = 2'-O-methylguanosine-3'-phosphate
  modified_base 2: mod_base = OTHER; note = 2'-O-methyluridine-3'-phosphate
  modified_base 3: mod_base = OTHER; note = 2'-O-methyluridine-3'-phosphate
  modified_base 4: mod_base = OTHER; note = 2'-O-methyluridine-3'-phosphate
  modified_base 5: mod_base = OTHER; note = 2'-O-methyluridine-3'-phosphate
  modified_base 6: mod_base = OTHER; note = 2'-O-methylguanosine-3'-phosphate
  modified_base 7: mod_base = OTHER; note = 2'-fluorouridine-3'-phosphate
  modified_base 8: mod_base = OTHER; note = 2'-O-methyladenosine-3'-phosphate
  modified_base 9: mod_base = OTHER; note = 2'-fluoroguanosine-3'-phosphate
  modified_base 10: mod_base = OTHER; note = 2'-fluorocytidine-3'-phosphate
  modified_base 11: mod_base = OTHER; note = 2'-fluoroadenosine-3'-phosphate
  modified_base 12: mod_base = OTHER; note = 2'-O-methyluridine-3'-phosphate
  modified_base 13: mod_base = OTHER; note = 2'-O-methyluridine-3'-phosphate
  modified_base 14: mod_base = OTHER; note = 2'-O-methyluridine-3'-phosphate
  modified_base 15: mod_base = OTHER; note = 2'-O-methyluridine-3'-phosphate
  modified_base 16: mod_base = OTHER; note = 2'-O-methyluridine-3'-phosphate
  modified_base 17: mod_base = OTHER; note = 2'-O-methyladenosine-3'-phosphate
  modified_base 18: mod_base = OTHER; note = 2'-O-methyluridine-3'-phosphate
  modified_base 19: mod_base = OTHER; note = 2'-O-methyluridine-3'-phosphate
  modified_base 20: mod_base = OTHER; note = 2'-O-methyladenosine-3'-phosphate
  modified_base 21: mod_base = OTHER; note = 2'-O-methyladenosine
gttttgtagcatttttattaa

SEQ ID NO: 1647 - RNA, 23 nt, synthetic construct
  source 1..23: mol_type = other RNA
  modified_base 1: mod_base = OTHER; note = 5'-phosphate-2'-O-methyluridine-3'-phosphate
  modified_base 2: mod_base = OTHER; note = 2'-fluorouridine-3'-phosphate
  modified_base 3: mod_base = OTHER; note = 2'-O-methyladenosine-3'-phosphate
  modified_base 4: mod_base = OTHER; note = 2'-O-methyladenosine-3'-phosphate
  modified_base 5: mod_base = OTHER; note = 2'-O-methyluridine-3'-phosphate
  modified_base 6: mod_base = OTHER; note = 2'-fluoroadenosine-3'-phosphate
  modified_base 7: mod_base = OTHER; note = 2'-O-methyladenosine-3'-phosphate
  modified_base 8: mod_base = OTHER; note = 2'-O-methyladenosine-3'-phosphate
  modified_base 9: mod_base = OTHER; note = 2'-O-methyladenosine-3'-phosphate
  modified_base 10: mod_base = OTHER; note = 2'-O-methyladenosine-3'-phosphate
  modified_base 11: mod_base = OTHER; note = 2'-O-methyluridine-3'-phosphate
  modified_base 12: mod_base = OTHER; note = 2'-fluoroguanosine-3'-phosphate
  modified_base 13: mod_base = OTHER; note = 2'-O-methylcytidine-3'-phosphate
  modified_base 14: mod_base = OTHER; note = 2'-fluorouridine-3'-phosphate
  modified_base 15: mod_base = OTHER; note = 2'-O-methyladenosine-3'-phosphate
  modified_base 16: mod_base = OTHER; note = 2'-O-methylcytidine-3'-phosphate
  modified_base 17: mod_base = OTHER; note = 2'-O-methyladenosine-3'-phosphate
  modified_base 18: mod_base = OTHER; note = 2'-O-methyladenosine-3'-phosphate
  modified_base 19: mod_base = OTHER; note = 2'-O-methyladenosine-3'-phosphate
  modified_base 20: mod_base = OTHER; note = 2'-O-methyladenosine-3'-phosphate
  modified_base 21: mod_base = OTHER; note = 2'-O-methylcytidine-3'-phosphate
  modified_base 22: mod_base = OTHER; note = 2'-O-methylcytidine-3'-phosphate
  modified_base 23: mod_base = OTHER; note = 2'-O-methylcytidine
ttaataaaaatgctacaaaaccc

SEQ ID NO: 1648 - RNA, 19 nt, synthetic construct
  source 1..19: mol_type = other RNA
  modified_base 1: mod_base = OTHER; note = 2'-O-methyluridine-3'-phosphorothioate
  modified_base 2: mod_base = OTHER; note = 2'-O-methyluridine-3'-phosphorothioate
  modified_base 3: mod_base = OTHER; note = 2'-O-methyluridine-3'-phosphate
  modified_base 4: mod_base = OTHER; note = 2'-O-methylguanosine-3'-phosphate
  modified_base 5: mod_base = OTHER; note = 2'-O-methyluridine-3'-phosphate
  modified_base 6: mod_base = OTHER; note = 2'-O-methyladenosine-3'-phosphate
  modified_base 7: mod_base = OTHER; note = 2'-fluoroguanosine-3'-phosphate
  modified_base 8: mod_base = OTHER; note = 2'-fluorocytidine-3'-phosphate
  modified_base 9: mod_base = OTHER; note = 2'-fluoroadenosine-3'-phosphate
  modified_base 10: mod_base = OTHER; note = 2'-O-methyluridine-3'-phosphate
  modified_base 11: mod_base = OTHER; note = 2'-O-methyluridine-3'-phosphate
  modified_base 12: mod_base = OTHER; note = 2'-O-methyluridine-3'-phosphate
  modified_base 13: mod_base = OTHER; note = 2'-O-methyluridine-3'-phosphate
  modified_base 14: mod_base = OTHER; note = 2'-O-methyluridine-3'-phosphate
  modified_base 15: mod_base = OTHER; note = 2'-O-methyladenosine-3'-phosphate
  modified_base 16: mod_base = OTHER; note = 2'-O-methyluridine-3'-phosphate
  modified_base 17: mod_base = OTHER; note = 2'-O-methyluridine-3'-phosphate
  modified_base 18: mod_base = OTHER; note = 2'-O-methyladenosine-3'-phosphate
  modified_base 19: mod_base = OTHER; note = 2'-O-methyladenosine
tttgtagcatttttattaa

SEQ ID NO: 1649 - RNA, 21 nt, synthetic construct
  source 1..21: mol_type = other RNA
  modified_base 1: mod_base = OTHER; note = 5'-phosphate-2'-O-methyluridine-3'-phosphorothioate
  modified_base 2: mod_base = OTHER; note = 2'-fluorouridine-3'-phosphorothioate
  modified_base 3: mod_base = OTHER; note = 2'-O-methyladenosine-3'-phosphate
  modified_base 4: mod_base = OTHER; note = 2'-O-methyladenosine-3'-phosphate
  modified_base 5: mod_base = OTHER; note = 2'-O-methyluridine-3'-phosphate
  modified_base 6: mod_base = OTHER; note = 2'-fluoroadenosine-3'-phosphate
  modified_base 7: mod_base = OTHER; note = 2'-O-methyladenosine-3'-phosphate
  modified_base 8: mod_base = OTHER; note = 2'-O-methyladenosine-3'-phosphate
  modified_base 9: mod_base = OTHER; note = 2'-O-methyladenosine-3'-phosphate
  modified_base 10: mod_base = OTHER; note = 2'-O-methyladenosine-3'-phosphate
  modified_base 11: mod_base = OTHER; note = 2'-O-methyluridine-3'-phosphate
  modified_base 12: mod_base = OTHER; note = 2'-fluoroguanosine-3'-phosphate
  modified_base 13: mod_base = OTHER; note = 2'-O-methylcytidine-3'-phosphate
  modified_base 14: mod_base = OTHER; note = 2'-fluorouridine-3'-phosphate
  modified_base 15: mod_base = OTHER; note = 2'-O-methyladenosine-3'-phosphate
  modified_base 16: mod_base = OTHER; note = 2'-O-methylcytidine-3'-phosphate
  modified_base 17: mod_base = OTHER; note = 2'-O-methyladenosine-3'-phosphate
  modified_base 18: mod_base = OTHER; note = 2'-O-methyladenosine-3'-phosphate
  modified_base 19: mod_base = OTHER; note = 2'-O-methyladenosine-3'-phosphorothioate
  modified_base 20: mod_base = OTHER; note = 2'-O-methyladenosine-3'-phosphorothioate
  modified_base 21: mod_base = OTHER; note = 2'-O-methylcytidine
ttaataaaaatgctacaaaac

SEQ ID NO: 1650 - RNA, 19 nt, synthetic construct
  source 1..19: mol_type = other RNA
  modified_base 1: mod_base = OTHER; note = 2'-O-methyluridine-3'-phosphorothioate
  modified_base 2: mod_base = OTHER; note = 2'-O-methyluridine-3'-phosphorothioate
  modified_base 3: mod_base = OTHER; note = 2'-O-methyluridine-3'-phosphate
  modified_base 4: mod_base = OTHER; note = 2'-O-methylguanosine-3'-phosphate
  modified_base 5: mod_base = OTHER; note = 2'-fluorouridine-3'-phosphate
  modified_base 6: mod_base = OTHER; note = 2'-O-methyladenosine-3'-phosphate
  modified_base 7: mod_base = OTHER; note = 2'-fluoroguanosine-3'-phosphate
  modified_base 8: mod_base = OTHER; note = 2'-fluorocytidine-3'-phosphate
  modified_base 9: mod_base = OTHER; note = 2'-fluoroadenosine-3'-phosphate
  modified_base 10: mod_base = OTHER; note = 2'-O-methyluridine-3'-phosphate
  modified_base 11: mod_base = OTHER; note = 2'-O-methyluridine-3'-phosphate
  modified_base 12: mod_base = OTHER; note = 2'-O-methyluridine-3'-phosphate
  modified_base 13: mod_base = OTHER; note = 2'-O-methyluridine-3'-phosphate
  modified_base 14: mod_base = OTHER; note = 2'-O-methyluridine-3'-phosphate
  modified_base 15: mod_base = OTHER; note = 2'-O-methyladenosine-3'-phosphate
  modified_base 16: mod_base = OTHER; note = 2'-O-methyluridine-3'-phosphate
  modified_base 17: mod_base = OTHER; note = 2'-O-methyluridine-3'-phosphate
  modified_base 18: mod_base = OTHER; note = 2'-O-methyladenosine-3'-phosphate
  modified_base 19: mod_base = OTHER; note = 2'-O-methyladenosine
tttgtagcatttttattaa

SEQ ID NO: 1651 - RNA, 21 nt, synthetic construct
  source 1..21: mol_type = other RNA
  modified_base 1: mod_base = OTHER; note = 5'-phosphate-2'-O-methyluridine-3'-phosphorothioate
  modified_base 2: mod_base = OTHER; note = 2'-fluorouridine-3'-phosphorothioate
  modified_base 3: mod_base = OTHER; note = 2'-O-methyladenosine-3'-phosphate
  modified_base 4: mod_base = OTHER; note = 2'-O-methyladenosine-3'-phosphate
  modified_base 5: mod_base = OTHER; note = 2'-O-methyluridine-3'-phosphate
  modified_base 6: mod_base = OTHER; note = 2'-fluoroadenosine-3'-phosphate
  modified_base 7: mod_base = OTHER; note = 2'-O-methyladenosine-3'-phosphate
  modified_base 8: mod_base = OTHER; note = 2'-fluoroadenosine-3'-phosphate
  modified_base 9: mod_base = OTHER; note = 2'-fluoroadenosine-3'-phosphate
  modified_base 10: mod_base = OTHER; note = 2'-O-methyladenosine-3'-phosphate
  modified_base 11: mod_base = OTHER; note = 2'-O-methyluridine-3'-phosphate
  modified_base 12: mod_base = OTHER; note = 2'-fluoroguanosine-3'-phosphate
  modified_base 13: mod_base = OTHER; note = 2'-O-methylcytidine-3'-phosphate
  modified_base 14: mod_base = OTHER; note = 2'-fluorouridine-3'-phosphate
  modified_base 15: mod_base = OTHER; note = 2'-O-methyladenosine-3'-phosphate
  modified_base 16: mod_base = OTHER; note = 2'-O-methylcytidine-3'-phosphate
  modified_base 17: mod_base = OTHER; note = 2'-O-methyladenosine-3'-phosphate
  modified_base 18: mod_base = OTHER; note = 2'-O-methyladenosine-3'-phosphate
  modified_base 19: mod_base = OTHER; note = 2'-O-methyladenosine-3'-phosphorothioate
  modified_base 20: mod_base = OTHER; note = 2'-O-methyladenosine-3'-phosphorothioate
  modified_base 21: mod_base = OTHER; note = 2'-O-methylcytidine
ttaataaaaatgctacaaaac

SEQ ID NO: 1652 - RNA, 19 nt, synthetic construct
  source 1..19: mol_type = other RNA
  modified_base 1: mod_base = OTHER; note = 2'-O-methyluridine-3'-phosphorothioate
  modified_base 2: mod_base = OTHER; note = 2'-O-methyluridine-3'-phosphorothioate
  modified_base 3: mod_base = OTHER; note = 2'-O-methyluridine-3'-phosphate
  modified_base 4: mod_base = OTHER; note = 2'-O-methylguanosine-3'-phosphate
  modified_base 5: mod_base = OTHER; note = 2'-fluorouridine-3'-phosphate
  modified_base 6: mod_base = OTHER; note = 2'-O-methyladenosine-3'-phosphate
  modified_base 7: mod_base = OTHER; note = 2'-fluoroguanosine-3'-phosphate
  modified_base 8: mod_base = OTHER; note = 2'-fluorocytidine-3'-phosphate
  modified_base 9: mod_base = OTHER; note = 2'-fluoroadenosine-3'-phosphate
  modified_base 10: mod_base = OTHER; note = 2'-O-methyluridine-3'-phosphate
  modified_base 11: mod_base = OTHER; note = 2'-O-methyluridine-3'-phosphate
  modified_base 12: mod_base = OTHER; note = 2'-O-methyluridine-3'-phosphate
  modified_base 13: mod_base = OTHER; note = 2'-O-methyluridine-3'-phosphate
  modified_base 14: mod_base = OTHER; note = 2'-O-methyluridine-3'-phosphate
  modified_base 15: mod_base = OTHER; note = 2'-O-methyladenosine-3'-phosphate
  modified_base 16: mod_base = OTHER; note = 2'-O-methyluridine-3'-phosphate
  modified_base 17: mod_base = OTHER; note = 2'-O-methyluridine-3'-phosphate
  modified_base 18: mod_base = OTHER; note = 2'-O-methyladenosine-3'-phosphate
  modified_base 19: mod_base = OTHER; note = 2'-O-methyladenosine
tttgtagcatttttattaa

SEQ ID NO: 1653 - RNA, 21 nt, synthetic construct
  source 1..21: mol_type = other RNA
  modified_base 1: mod_base = OTHER; note = 5'-phosphate-2'-O-methyluridine-3'-phosphorothioate
  modified_base 2: mod_base = OTHER; note = 2'-fluorouridine-3'-phosphorothioate
  modified_base 3: mod_base = OTHER; note = 2'-O-methyladenosine-3'-phosphate
  modified_base 4: mod_base = OTHER; note = 2'-O-methyladenosine-3'-phosphate
  modified_base 5: mod_base = OTHER; note = 2'-O-methyluridine-3'-phosphate
  modified_base 6: mod_base = OTHER; note = 2'-fluoroadenosine-3'-phosphate
  modified_base 7: mod_base = OTHER; note = 2'-O-methyladenosine-3'-phosphate
  modified_base 8: mod_base = OTHER; note = 2'-O-methyladenosine-3'-phosphate
  modified_base 9: mod_base = OTHER; note = 2'-O-methyladenosine-3'-phosphate
  modified_base 10: mod_base = OTHER; note = 2'-O-methyladenosine-3'-phosphate
  modified_base 11: mod_base = OTHER; note = 2'-O-methyluridine-3'-phosphate
  modified_base 12: mod_base = OTHER; note = 2'-fluoroguanosine-3'-phosphate
  modified_base 13: mod_base = OTHER; note = 2'-O-methylcytidine-3'-phosphate
  modified_base 14: mod_base = OTHER; note = 2'-fluorouridine-3'-phosphate
  modified_base 15: mod_base = OTHER; note = 2'-O-methyladenosine-3'-phosphate
  modified_base 16: mod_base = OTHER; note = 2'-O-methylcytidine-3'-phosphate
  modified_base 17: mod_base = OTHER; note = 2'-O-methyladenosine-3'-phosphate
  modified_base 18: mod_base = OTHER; note = 2'-O-methyladenosine-3'-phosphate
  modified_base 19: mod_base = OTHER; note = 2'-O-methyladenosine-3'-phosphorothioate
  modified_base 20: mod_base = OTHER; note = 2'-O-methyladenosine-3'-phosphorothioate
  modified_base 21: mod_base = OTHER; note = 2'-O-methylcytidine
ttaataaaaatgctacaaaac

SEQ ID NO: 1654 - RNA, 21 nt, synthetic construct
  source 1..21: mol_type = other RNA
  modified_base 1: mod_base = OTHER; note = 2'-O-methylguanosine-3'-phosphorothioate
  modified_base 2: mod_base = OTHER; note = 2'-O-methyluridine-3'-phosphorothioate
  modified_base 3: mod_base = OTHER; note = 2'-O-methyluridine-3'-phosphate
  modified_base 4: mod_base = OTHER; note = 2'-O-methyluridine-3'-phosphate
  modified_base 5: mod_base = OTHER; note = 2'-O-methyluridine-3'-phosphate
  modified_base 6: mod_base = OTHER; note = 2'-O-methylguanosine-3'-phosphate
  modified_base 7: mod_base = OTHER; note = 2'-O-methyluridine-3'-phosphate
  modified_base 8: mod_base = OTHER; note = 2'-O-methyladenosine-3'-phosphate
  modified_base 9: mod_base = OTHER; note = 2'-fluoroguanosine-3'-phosphate
  modified_base 10: mod_base = OTHER; note = 2'-fluorocytidine-3'-phosphate
  modified_base 11: mod_base = OTHER; note = 2'-fluoroadenosine-3'-phosphate
  modified_base 12: mod_base = OTHER; note = 2'-O-methyluridine-3'-phosphate
  modified_base 13: mod_base = OTHER; note = 2'-O-methyluridine-3'-phosphate
  modified_base 14: mod_base = OTHER; note = 2'-O-methyluridine-3'-phosphate
  modified_base 15: mod_base = OTHER; note = 2'-O-methyluridine-3'-phosphate
  modified_base 16: mod_base = OTHER; note = 2'-O-methyluridine-3'-phosphate
  modified_base 17: mod_base = OTHER; note = 2'-O-methyladenosine-3'-phosphate
  modified_base 18: mod_base = OTHER; note = 2'-O-methyluridine-3'-phosphate
  modified_base 19: mod_base = OTHER; note = 2'-O-methyluridine-3'-phosphate
  modified_base 20: mod_base = OTHER; note = 2'-O-methyladenosine-3'-phosphate
  modified_base 21: mod_base = OTHER; note = 2'-O-methyladenosine
gttttgtagcatttttattaa

SEQ ID NO: 1655 - RNA, 23 nt, synthetic construct
  source 1..23: mol_type = other RNA
  modified_base 1: mod_base = OTHER; note = 5'-phosphate-2'-O-methyluridine-3'-phosphorothioate
  modified_base 2: mod_base = OTHER; note = 2'-fluorouridine-3'-phosphorothioate
  modified_base 3: mod_base = OTHER; note = 2'-O-methyladenosine-3'-phosphate
  modified_base 4: mod_base = OTHER; note = 2'-O-methyladenosine-3'-phosphate
  modified_base 5: mod_base = OTHER; note = 2'-O-methyluridine-3'-phosphate
  modified_base 6: mod_base = OTHER; note = 2'-fluoroadenosine-3'-phosphate
  modified_base 7: mod_base = OTHER; note = 2'-O-methyladenosine-3'-phosphate
  modified_base 8: mod_base = OTHER; note = 2'-O-methyladenosine-3'-phosphate
  modified_base 9: mod_base = OTHER; note = 2'-O-methyladenosine-3'-phosphate
  modified_base 10: mod_base = OTHER; note = 2'-O-methyladenosine-3'-phosphate
  modified_base 11: mod_base = OTHER; note = 2'-O-methyluridine-3'-phosphate
  modified_base 12: mod_base = OTHER; note = 2'-fluoroguanosine-3'-phosphate
  modified_base 13: mod_base = OTHER; note = 2'-O-methylcytidine-3'-phosphate
  modified_base 14: mod_base = OTHER; note = 2'-fluorouridine-3'-phosphate
  modified_base 15: mod_base = OTHER; note = 2'-O-methyladenosine-3'-phosphate
  modified_base 16: mod_base = OTHER; note = 2'-O-methylcytidine-3'-phosphate
  modified_base 17: mod_base = OTHER; note = 2'-O-methyladenosine-3'-phosphate
  modified_base 18: mod_base = OTHER; note = 2'-O-methyladenosine-3'-phosphate
  modified_base 19: mod_base = OTHER; note = 2'-O-methyladenosine-3'-phosphate
  modified_base 20: mod_base = OTHER; note = 2'-O-methyladenosine-3'-phosphate
  modified_base 21: mod_base = OTHER; note = 2'-O-methylcytidine-3'-phosphorothioate
  modified_base 22: mod_base = OTHER; note = 2'-O-methylcytidine-3'-phosphorothioate
  modified_base 23: mod_base = OTHER; note = 2'-O-methylcytidine
ttaataaaaatgctacaaaaccc

SEQ ID NO: 1656 - RNA, 21 nt, synthetic construct
  source 1..21: mol_type = other RNA
  modified_base 1: mod_base = OTHER; note = 2'-O-methylguanosine-3'-phosphorothioate
  modified_base 2: mod_base = OTHER; note = 2'-O-methyluridine-3'-phosphorothioate
  modified_base 3: mod_base = OTHER; note = 2'-O-methyluridine-3'-phosphate
  modified_base 4: mod_base = OTHER; note = 2'-O-methyluridine-3'-phosphate
  modified_base 5: mod_base = OTHER; note = 2'-O-methyluridine-3'-phosphate
  modified_base 6: mod_base = OTHER; note = 2'-O-methylguanosine-3'-phosphate
  modified_base 7: mod_base = OTHER; note = 2'-fluorouridine-3'-phosphate
  modified_base 8: mod_base = OTHER; note = 2'-O-methyladenosine-3'-phosphate
  modified_base 9: mod_base = OTHER; note = 2'-fluoroguanosine-3'-phosphate
  modified_base 10: mod_base = OTHER; note = 2'-fluorocytidine-3'-phosphate
  modified_base 11: mod_base = OTHER; note = 2'-fluoroadenosine-3'-phosphate
  modified_base 12: mod_base = OTHER; note = 2'-O-methyluridine-3'-phosphate
  modified_base 13: mod_base = OTHER; note = 2'-O-methyluridine-3'-phosphate
  modified_base 14: mod_base = OTHER; note = 2'-O-methyluridine-3'-phosphate
  modified_base 15: mod_base = OTHER; note = 2'-O-methyluridine-3'-phosphate
  modified_base 16: mod_base = OTHER; note = 2'-O-methyluridine-3'-phosphate
  modified_base 17: mod_base = OTHER; note = 2'-O-methyladenosine-3'-phosphate
  modified_base 18: mod_base = OTHER; note = 2'-O-methyluridine-3'-phosphate
  modified_base 19: mod_base = OTHER; note = 2'-O-methyluridine-3'-phosphate
  modified_base 20: mod_base = OTHER; note = 2'-O-methyladenosine-3'-phosphate
  modified_base 21: mod_base = OTHER; note = 2'-O-methyladenosine
gttttgtagcatttttattaa

SEQ ID NO: 1657 - RNA, 23 nt, synthetic construct
  source 1..23: mol_type = other RNA
  modified_base 1: mod_base = OTHER; note = 5'-phosphate-2'-O-methyluridine-3'-phosphorothioate
  modified_base 2: mod_base = OTHER; note = 2'-fluorouridine-3'-phosphorothioate
  modified_base 3: mod_base = OTHER; note = 2'-O-methyladenosine-3'-phosphate
  modified_base 4: mod_base = OTHER; note = 2'-O-methyladenosine-3'-phosphate
  modified_base 5: mod_base = OTHER; note = 2'-O-methyluridine-3'-phosphate
  modified_base 6: mod_base = OTHER; note = 2'-fluoroadenosine-3'-phosphate
  modified_base 7: mod_base = OTHER; note = 2'-O-methyladenosine-3'-phosphate
  modified_base 8: mod_base = OTHER; note = 2'-fluoroadenosine-3'-phosphate
  modified_base 9: mod_base = OTHER; note = 2'-fluoroadenosine-3'-phosphate
  modified_base 10: mod_base = OTHER; note = 2'-O-methyladenosine-3'-phosphate
  modified_base 11: mod_base = OTHER; note = 2'-O-methyluridine-3'-phosphate
  modified_base 12: mod_base = OTHER; note = 2'-fluoroguanosine-3'-phosphate
  modified_base 13: mod_base = OTHER; note = 2'-O-methylcytidine-3'-phosphate
  modified_base 14: mod_base = OTHER; note = 2'-fluorouridine-3'-phosphate
  modified_base 15: mod_base = OTHER; note = 2'-O-methyladenosine-3'-phosphate
  modified_base 16: mod_base = OTHER; note = 2'-O-methylcytidine-3'-phosphate
  modified_base 17: mod_base = OTHER; note = 2'-O-methyladenosine-3'-phosphate
  modified_base 18: mod_base = OTHER; note = 2'-O-methyladenosine-3'-phosphate
  modified_base 19: mod_base = OTHER; note = 2'-O-methyladenosine-3'-phosphate
  modified_base 20: mod_base = OTHER; note = 2'-O-methyladenosine-3'-phosphate
  modified_base 21: mod_base = OTHER; note = 2'-O-methylcytidine-3'-phosphorothioate
  modified_base 22: mod_base = OTHER; note = 2'-O-methylcytidine-3'-phosphorothioate
  modified_base 23: mod_base = OTHER; note = 2'-O-methylcytidine
ttaataaaaatgctacaaaaccc

SEQ ID NO: 1658 - RNA, 19 nt, synthetic construct
  source 1..19: mol_type = other RNA
gcctggagtttattcggaa

SEQ ID NO: 1659 - RNA, 21 nt, synthetic construct
  source 1..21: mol_type = other RNA
ttccgaataaactccaggcct

SEQ ID NO: 1660 - RNA, 21 nt, synthetic construct
  source 1..21: mol_type = other RNA
aggcctggagtttattcggaa

SEQ ID NO: 1661 - RNA, 23 nt, synthetic construct
  source 1..23: mol_type = other RNA
ttccgaataaactccaggcctat

SEQ ID NO: 1662 - RNA, 19 nt, synthetic construct
  source 1..19: mol_type = other RNA
  modified_base 1: mod_base = OTHER; note = 2'-O-methylguanosine-3'-phosphate
  modified_base 2: mod_base = OTHER; note = 2'-O-methylcytidine-3'-phosphate
  modified_base 3: mod_base = OTHER; note = 2'-O-methylcytidine-3'-phosphate
  modified_base 4: mod_base = OTHER; note = 2'-O-methyluridine-3'-phosphate
  modified_base 5: mod_base = OTHER; note = 2'-O-methylguanosine-3'-phosphate
  modified_base 6: mod_base = OTHER; note = 2'-O-methylguanosine-3'-phosphate
  modified_base 7: mod_base = OTHER; note = 2'-fluoroadenosine-3'-phosphate
  modified_base 8: mod_base = OTHER; note = 2'-fluoroguanosine-3'-phosphate
  modified_base 9: mod_base = OTHER; note = 2'-fluorouridine-3'-phosphate
  modified_base 10: mod_base = OTHER; note = 2'-O-methyluridine-3'-phosphate
  modified_base 11: mod_base = OTHER; note = 2'-O-methyluridine-3'-phosphate
  modified_base 12: mod_base = OTHER; note = 2'-O-methyladenosine-3'-phosphate
  modified_base 13: mod_base = OTHER; note = 2'-O-methyluridine-3'-phosphate
  modified_base 14: mod_base = OTHER; note = 2'-O-methyluridine-3'-phosphate
  modified_base 15: mod_base = OTHER; note = 2'-O-methylcytidine-3'-phosphate
  modified_base 16: mod_base = OTHER; note = 2'-O-methylguanosine-3'-phosphate
  modified_base 17: mod_base = OTHER; note = 2'-O-methylguanosine-3'-phosphate
  modified_base 18: mod_base = OTHER; note = 2'-O-methyladenosine-3'-phosphate
  modified_base 19: mod_base = OTHER; note = 2'-O-methyladenosine
gcctggagtttattcggaa

SEQ ID NO: 1663 - RNA, 21 nt, synthetic construct
  source 1..21: mol_type = other RNA
  modified_base 1: mod_base = OTHER; note = 2'-O-methyluridine-3'-phosphate
  modified_base 2: mod_base = OTHER; note = 2'-fluorouridine-3'-phosphate
  modified_base 3: mod_base = OTHER; note = 2'-O-methylcytidine-3'-phosphate
  modified_base 4: mod_base = OTHER; note = 2'-O-methylcytidine-3'-phosphate
  modified_base 5: mod_base = OTHER; note = 2'-O-methylguanosine-3'-phosphate
  modified_base 6: mod_base = OTHER; note = 2'-fluoroadenosine-3'-phosphate
  modified_base 7: mod_base = OTHER; note = 2'-O-methyladenosine-3'-phosphate
  modified_base 8: mod_base = OTHER; note = 2'-O-methyluridine-3'-phosphate
  modified_base 9: mod_base = OTHER; note = 2'-O-methyladenosine-3'-phosphate
  modified_base 10: mod_base = OTHER; note = 2'-O-methyladenosine-3'-phosphate
  modified_base 11: mod_base = OTHER; note = 2'-O-methyladenosine-3'-phosphate
  modified_base 12: mod_base = OTHER; note = 2'-O-methylcytidine-3'-phosphate
  modified_base 13: mod_base = OTHER; note = 2'-O-methyluridine-3'-phosphate
  modified_base 14: mod_base = OTHER; note = 2'-fluorocytidine-3'-phosphate
  modified_base 15: mod_base = OTHER; note = 2'-O-methylcytidine-3'-phosphate
  modified_base 16: mod_base = OTHER; note = 2'-fluoroadenosine-3'-phosphate
  modified_base 17: mod_base = OTHER; note = 2'-O-methylguanosine-3'-phosphate
  modified_base 18: mod_base = OTHER; note = 2'-O-methylguanosine-3'-phosphate
  modified_base 19: mod_base = OTHER; note = 2'-O-methylcytidine-3'-phosphate
  modified_base 20: mod_base = OTHER; note = 2'-O-methylcytidine-3'-phosphate
  modified_base 21: mod_base = OTHER; note = 2'-O-methyluridine
ttccgaataaactccaggcct

SEQ ID NO: 1664 - RNA, 19 nt, synthetic construct
  source 1..19: mol_type = other RNA
  modified_base 1: mod_base = OTHER; note = 2'-O-methylguanosine-3'-phosphate
  modified_base 2: mod_base = OTHER; note = 2'-O-methylcytidine-3'-phosphate
  modified_base 3: mod_base = OTHER; note = 2'-O-methylcytidine-3'-phosphate
  modified_base 4: mod_base = OTHER; note = 2'-O-methyluridine-3'-phosphate
  modified_base 5: mod_base = OTHER; note = 2'-fluoroguanosine-3'-phosphate
  modified_base 6: mod_base = OTHER; note = 2'-O-methylguanosine-3'-phosphate
  modified_base 7: mod_base = OTHER; note = 2'-fluoroadenosine-3'-phosphate
  modified_base 8: mod_base = OTHER; note = 2'-fluoroguanosine-3'-phosphate
  modified_base 9: mod_base = OTHER; note = 2'-fluorouridine-3'-phosphate
  modified_base 10: mod_base = OTHER; note = 2'-O-methyluridine-3'-phosphate
  modified_base 11: mod_base = OTHER; note = 2'-O-methyluridine-3'-phosphate
  modified_base 12: mod_base = OTHER; note = 2'-O-methyladenosine-3'-phosphate
  modified_base 13: mod_base = OTHER; note = 2'-O-methyluridine-3'-phosphate
  modified_base 14: mod_base = OTHER; note = 2'-O-methyluridine-3'-phosphate
  modified_base 15: mod_base = OTHER; note = 2'-O-methylcytidine-3'-phosphate
  modified_base 16: mod_base = OTHER; note = 2'-O-methylguanosine-3'-phosphate
  modified_base 17: mod_base = OTHER; note = 2'-O-methylguanosine-3'-phosphate
  modified_base 18: mod_base = OTHER; note = 2'-O-methyladenosine-3'-phosphate
  modified_base 19: mod_base = OTHER; note = 2'-O-methyladenosine
gcctggagtttattcggaa

SEQ ID NO: 1665 - RNA, 21 nt, synthetic construct
  source 1..21: mol_type = other RNA
  modified_base 1: mod_base = OTHER; note = 2'-O-methyluridine-3'-phosphate
  modified_base 2: mod_base = OTHER; note = 2'-fluorouridine-3'-phosphate
  modified_base 3: mod_base = OTHER; note = 2'-O-methylcytidine-3'-phosphate
  modified_base 4: mod_base = OTHER; note = 2'-O-methylcytidine-3'-phosphate
  modified_base 5: mod_base = OTHER; note = 2'-O-methylguanosine-3'-phosphate
  modified_base 6: mod_base = OTHER; note = 2'-fluoroadenosine-3'-phosphate
  modified_base 7: mod_base = OTHER; note = 2'-O-methyladenosine-3'-phosphate
  modified_base 8: mod_base = OTHER; note = 2'-fluorouridine-3'-phosphate
  modified_base 9: mod_base = OTHER; note = 2'-fluoroadenosine-3'-phosphate
  modified_base 10: mod_base = OTHER; note = 2'-O-methyladenosine-3'-phosphate
  modified_base 11: mod_base = OTHER; note = 2'-O-methyladenosine-3'-phosphate
  modified_base 12: mod_base = OTHER; note = 2'-O-methylcytidine-3'-phosphate
  modified_base 13: mod_base = OTHER; note = 2'-O-methyluridine-3'-phosphate
  modified_base 14: mod_base = OTHER; note = 2'-fluorocytidine-3'-phosphate
  modified_base 15: mod_base = OTHER; note = 2'-O-methylcytidine-3'-phosphate
  modified_base 16: mod_base = OTHER; note = 2'-fluoroadenosine-3'-phosphate
  modified_base 17: mod_base = OTHER; note = 2'-O-methylguanosine-3'-phosphate
  modified_base 18: mod_base = OTHER; note = 2'-O-methylguanosine-3'-phosphate
  modified_base 19: mod_base = OTHER; note = 2'-O-methylcytidine-3'-phosphate
  modified_base 20: mod_base = OTHER; note = 2'-O-methylcytidine-3'-phosphate
  modified_base 21: mod_base = OTHER; note = 2'-O-methyluridine
ttccgaataaactccaggcct

SEQ ID NO: 1666 - RNA, 19 nt, synthetic construct
  source 1..19: mol_type = other RNA
  modified_base 1: mod_base = OTHER; note = 2'-O-methylguanosine-3'-phosphate
  modified_base 2: mod_base = OTHER; note = 2'-O-methylcytidine-3'-phosphate
  modified_base 3: mod_base = OTHER; note = 2'-O-methylcytidine-3'-phosphate
  modified_base 4: mod_base = OTHER; note = 2'-O-methyluridine-3'-phosphate
  modified_base 5: mod_base = OTHER; note = 2'-fluoroguanosine-3'-phosphate
  modified_base 6: mod_base = OTHER; note = 2'-O-methylguanosine-3'-phosphate
  modified_base 7: mod_base = OTHER; note = 2'-fluoroadenosine-3'-phosphate
  modified_base 8: mod_base = OTHER; note = 2'-fluoroguanosine-3'-phosphate
  modified_base 9: mod_base = OTHER; note = 2'-fluorouridine-3'-phosphate
  modified_base 10: mod_base = OTHER; note = 2'-O-methyluridine-3'-phosphate
  modified_base 11: mod_base = OTHER; note = 2'-O-methyluridine-3'-phosphate
  modified_base 12: mod_base = OTHER; note = 2'-O-methyladenosine-3'-phosphate
  modified_base 13: mod_base = OTHER; note = 2'-O-methyluridine-3'-phosphate
  modified_base 14: mod_base = OTHER; note = 2'-O-methyluridine-3'-phosphate
  modified_base 15: mod_base = OTHER; note = 2'-O-methylcytidine-3'-phosphate
  modified_base 16: mod_base = OTHER; note = 2'-O-methylguanosine-3'-phosphate
  modified_base 17: mod_base = OTHER; note = 2'-O-methylguanosine-3'-phosphate
  modified_base 18: mod_base = OTHER; note = 2'-O-methyladenosine-3'-phosphate
  modified_base 19: mod_base = OTHER; note = 2'-O-methyladenosine
gcctggagtttattcggaa

SEQ ID NO: 1667 - RNA, 21 nt, synthetic construct
  source 1..21: mol_type = other RNA
  modified_base 1: mod_base = OTHER; note = 2'-O-methyluridine-3'-phosphate
  modified_base 2: mod_base = OTHER; note = 2'-fluorouridine-3'-phosphate
  modified_base 3: mod_base = OTHER; note = 2'-O-methylcytidine-3'-phosphate
  modified_base 4: mod_base = OTHER; note = 2'-O-methylcytidine-3'-phosphate
  modified_base 5: mod_base = OTHER; note = 2'-O-methylguanosine-3'-phosphate
  modified_base 6: mod_base = OTHER; note = 2'-fluoroadenosine-3'-phosphate
  modified_base 7: mod_base = OTHER; note = 2'-O-methyladenosine-3'-phosphate
  modified_base 8: mod_base = OTHER; note = 2'-O-methyluridine-3'-phosphate
  modified_base 9: mod_base = OTHER; note = 2'-O-methyladenosine-3'-phosphate
  modified_base 10: mod_base = OTHER; note = 2'-O-methyladenosine-3'-phosphate
  modified_base 11: mod_base = OTHER; note = 2'-O-methyladenosine-3'-phosphate
  modified_base 12: mod_base = OTHER; note = 2'-O-methylcytidine-3'-phosphate
  modified_base 13: mod_base = OTHER; note = 2'-O-methyluridine-3'-phosphate
  modified_base 14: mod_base = OTHER; note = 2'-fluorocytidine-3'-phosphate
  modified_base 15: mod_base = OTHER; note = 2'-O-methylcytidine-3'-phosphate
  modified_base 16: mod_base = OTHER; note = 2'-fluoroadenosine-3'-phosphate
  modified_base 17: mod_base = OTHER; note = 2'-O-methylguanosine-3'-phosphate
  modified_base 18: mod_base = OTHER; note = 2'-O-methylguanosine-3'-phosphate
  modified_base 19: mod_base = OTHER; note = 2'-O-methylcytidine-3'-phosphate
  modified_base 20: mod_base = OTHER; note = 2'-O-methylcytidine-3'-phosphate
  modified_base 21: mod_base = OTHER; note = 2'-O-methyluridine
ttccgaataaactccaggcct

SEQ ID NO: 1668 - RNA, 21 nt, synthetic construct
  source 1..21: mol_type = other RNA
  modified_base 1: mod_base = OTHER; note = 2'-O-methyladenosine-3'-phosphate
  modified_base 2: mod_base = OTHER; note = 2'-O-methylguanosine-3'-phosphate
  modified_base 3: mod_base = OTHER; note = 2'-O-methylguanosine-3'-phosphate
  modified_base 4: mod_base = OTHER; note = 2'-O-methylcytidine-3'-phosphate
  modified_base 5: mod_base = OTHER; note = 2'-O-methylcytidine-3'-phosphate
  modified_base 6: mod_base = OTHER; note = 2'-O-methyluridine-3'-phosphate
  modified_base 7: mod_base = OTHER; note = 2'-O-methylguanosine-3'-phosphate
  modified_base 8: mod_base = OTHER; note = 2'-O-methylguanosine-3'-phosphate
  modified_base 9: mod_base = OTHER; note = 2'-fluoroadenosine-3'-phosphate
  modified_base 10: mod_base = OTHER; note = 2'-fluoroguanosine-3'-phosphate
  modified_base 11: mod_base = OTHER; note = 2'-fluorouridine-3'-phosphate
  modified_base 12: mod_base = OTHER; note = 2'-O-methyluridine-3'-phosphate
  modified_base 13: mod_base = OTHER; note = 2'-O-methyluridine-3'-phosphate
  modified_base 14: mod_base = OTHER; note = 2'-O-methyladenosine-3'-phosphate
  modified_base 15: mod_base = OTHER; note = 2'-O-methyluridine-3'-phosphate
  modified_base 16: mod_base = OTHER; note = 2'-O-methyluridine-3'-phosphate
  modified_base 17: mod_base = OTHER; note = 2'-O-methylcytidine-3'-phosphate
  modified_base 18: mod_base = OTHER; note = 2'-O-methylguanosine-3'-phosphate
  modified_base 19: mod_base = OTHER; note = 2'-O-methylguanosine-3'-phosphate
  modified_base 20: mod_base = OTHER; note = 2'-O-methyladenosine-3'-phosphate
  modified_base 21: mod_base = OTHER; note = 2'-O-methyladenosine
aggcctggagtttattcggaa

SEQ ID NO: 1669 - RNA, 23 nt, synthetic construct
  source 1..23: mol_type = other RNA
  modified_base 1: mod_base = OTHER; note = 2'-O-methyluridine-3'-phosphate
  modified_base 2: mod_base = OTHER; note = 2'-fluorouridine-3'-phosphate
  modified_base 3: mod_base = OTHER; note = 2'-O-methylcytidine-3'-phosphate
  modified_base 4: mod_base = OTHER; note = 2'-O-methylcytidine-3'-phosphate
  modified_base 5: mod_base = OTHER; note = 2'-O-methylguanosine-3'-phosphate
  modified_base 6: mod_base = OTHER; note = 2'-fluoroadenosine-3'-phosphate
  modified_base 7: mod_base = OTHER; note = 2'-O-methyladenosine-3'-phosphate
  modified_base 8: mod_base = OTHER; note = 2'-O-methyluridine-3'-phosphate
  modified_base 9: mod_base = OTHER; note = 2'-O-methyladenosine-3'-phosphate
  modified_base 10: mod_base = OTHER; note = 2'-O-methyladenosine-3'-phosphate
  modified_base 11: mod_base = OTHER; note = 2'-O-methyladenosine-3'-phosphate
  modified_base 12: mod_base = OTHER; note = 2'-O-methylcytidine-3'-phosphate
  modified_base 13: mod_base = OTHER; note = 2'-O-methyluridine-3'-phosphate
  modified_base 14: mod_base = OTHER; note = 2'-fluorocytidine-3'-phosphate
  modified_base 15: mod_base = OTHER; note = 2'-O-methylcytidine-3'-phosphate
  modified_base 16: mod_base = OTHER; note = 2'-fluoroadenosine-3'-phosphate
  modified_base 17: mod_base = OTHER; note = 2'-O-methylguanosine-3'-phosphate
  modified_base 18: mod_base = OTHER; note = 2'-O-methylguanosine-3'-phosphate
  modified_base 19: mod_base = OTHER; note = 2'-O-methylcytidine-3'-phosphate
  modified_base 20: mod_base = OTHER; note = 2'-O-methylcytidine-3'-phosphate
  modified_base 21: mod_base = OTHER; note = 2'-O-methyluridine-3'-phosphate
  modified_base 22: mod_base = OTHER; note = 2'-O-methyladenosine-3'-phosphate
  modified_base 23: mod_base = OTHER; note = 2'-O-methyluridine
ttccgaataaactccaggcctat

SEQ ID NO: 1670 - RNA, 21 nt, synthetic construct
  source 1..21: mol_type = other RNA
  modified_base 1: mod_base = OTHER; note = 2'-O-methyladenosine-3'-phosphate
  modified_base 2: mod_base = OTHER; note = 2'-O-methylguanosine-3'-phosphate
  modified_base 3: mod_base = OTHER; note = 2'-O-methylguanosine-3'-phosphate
  modified_base 4: mod_base = OTHER; note = 2'-O-methylcytidine-3'-phosphate
  modified_base 5: mod_base = OTHER; note = 2'-O-methylcytidine-3'-phosphate
  modified_base 6: mod_base = OTHER; note = 2'-O-methyluridine-3'-phosphate
  modified_base 7: mod_base = OTHER; note = 2'-fluoroguanosine-3'-phosphate
  modified_base 8: mod_base = OTHER; note = 2'-O-methylguanosine-3'-phosphate
  modified_base 9: mod_base = OTHER; note = 2'-fluoroadenosine-3'-phosphate
  modified_base 10: mod_base = OTHER; note = 2'-fluoroguanosine-3'-phosphate
  modified_base 11: mod_base = OTHER; note = 2'-fluorouridine-3'-phosphate
  modified_base 12: mod_base = OTHER; note = 2'-O-methyluridine-3'-phosphate
  modified_base 13: mod_base = OTHER; note = 2'-O-methyluridine-3'-phosphate
  modified_base 14: mod_base = OTHER; note = 2'-O-methyladenosine-3'-phosphate
  modified_base 15: mod_base = OTHER; note = 2'-O-methyluridine-3'-phosphate
  modified_base 16: mod_base = OTHER; note = 2'-O-methyluridine-3'-phosphate
  modified_base 17: mod_base = OTHER; note = 2'-O-methylcytidine-3'-phosphate
  modified_base 18: mod_base = OTHER; note = 2'-O-methylguanosine-3'-phosphate
  modified_base 19: mod_base = OTHER; note = 2'-O-methylguanosine-3'-phosphate
  modified_base 20: mod_base = OTHER; note = 2'-O-methyladenosine-3'-phosphate
  modified_base 21: mod_base = OTHER; note = 2'-O-methyladenosine
aggcctggagtttattcggaa

SEQ ID NO: 1671 - RNA, 23 nt, synthetic construct
  source 1..23: mol_type = other RNA
  modified_base 1: mod_base = OTHER; note = 2'-O-methyluridine-3'-phosphate
  modified_base 2: mod_base = OTHER; note = 2'-fluorouridine-3'-phosphate
  modified_base 3: mod_base = OTHER; note = 2'-O-methylcytidine-3'-phosphate
  modified_base 4: mod_base = OTHER; note = 2'-O-methylcytidine-3'-phosphate
  modified_base 5: mod_base = OTHER; note = 2'-O-methylguanosine-3'-phosphate
  modified_base 6: mod_base = OTHER; note = 2'-fluoroadenosine-3'-phosphate
  modified_base 7: mod_base = OTHER; note = 2'-O-methyladenosine-3'-phosphate
  modified_base 8: mod_base = OTHER; note = 2'-fluorouridine-3'-phosphate
  modified_base 9: mod_base = OTHER; note = 2'-fluoroadenosine-3'-phosphate
  modified_base 10: mod_base = OTHER; note = 2'-O-methyladenosine-3'-phosphate
  modified_base 11: mod_base = OTHER; note = 2'-O-methyladenosine-3'-phosphate
  modified_base 12: mod_base = OTHER; note = 2'-O-methylcytidine-3'-phosphate
  modified_base 13: mod_base = OTHER; note = 2'-O-methyluridine-3'-phosphate
  modified_base 14: mod_base = OTHER; note = 2'-fluorocytidine-3'-phosphate
  modified_base 15: mod_base = OTHER; note = 2'-O-methylcytidine-3'-phosphate
  modified_base 16: mod_base = OTHER; note = 2'-fluoroadenosine-3'-phosphate
  modified_base 17: mod_base = OTHER; note = 2'-O-methylguanosine-3'-phosphate
  modified_base 18: mod_base = OTHER; note = 2'-O-methylguanosine-3'-phosphate
  modified_base 19: mod_base = OTHER; note = 2'-O-methylcytidine-3'-phosphate
  modified_base 20: mod_base = OTHER; note = 2'-O-methylcytidine-3'-phosphate
  modified_base 21: mod_base = OTHER; note = 2'-O-methyluridine-3'-phosphate
  modified_base 22: mod_base = OTHER; note = 2'-O-methyladenosine-3'-phosphate
  modified_base 23: mod_base = OTHER; note = 2'-O-methyluridine
ttccgaataaactccaggcctat

SEQ ID NO: 1672 - RNA, 21 nt, synthetic construct
  source 1..21: mol_type = other RNA
  modified_base 1: mod_base = OTHER; note = 2'-O-methyladenosine-3'-phosphate
  modified_base 2: mod_base = OTHER; note = 2'-O-methylguanosine-3'-phosphate
  modified_base 3: mod_base = OTHER; note = 2'-O-methylguanosine-3'-phosphate
  modified_base 4: mod_base = OTHER; note = 2'-O-methylcytidine-3'-phosphate
  modified_base 5: mod_base = OTHER; note = 2'-O-methylcytidine-3'-phosphate
  modified_base 6: mod_base = OTHER; note = 2'-O-methyluridine-3'-phosphate
  modified_base 7: mod_base = OTHER; note = 2'-fluoroguanosine-3'-phosphate
  modified_base 8: mod_base = OTHER; note = 2'-O-methylguanosine-3'-phosphate
  modified_base 9: mod_base = OTHER; note = 2'-fluoroadenosine-3'-phosphate
  modified_base 10: mod_base = OTHER; note = 2'-fluoroguanosine-3'-phosphate
  modified_base 11: mod_base = OTHER; note = 2'-fluorouridine-3'-phosphate
  modified_base 12: mod_base = OTHER; note = 2'-O-methyluridine-3'-phosphate
  modified_base 13: mod_base = OTHER; note = 2'-O-methyluridine-3'-phosphate
  modified_base 14: mod_base = OTHER; note = 2'-O-methyladenosine-3'-phosphate
  modified_base 15: mod_base = OTHER; note = 2'-O-methyluridine-3'-phosphate
  modified_base 16: mod_base = OTHER; note = 2'-O-methyluridine-3'-phosphate
  modified_base 17: mod_base = OTHER; note = 2'-O-methylcytidine-3'-phosphate
  modified_base 18: mod_base = OTHER; note = 2'-O-methylguanosine-3'-phosphate
  modified_base 19: mod_base = OTHER; note = 2'-O-methylguanosine-3'-phosphate
  modified_base 20: mod_base = OTHER; note = 2'-O-methyladenosine-3'-phosphate
  modified_base 21: mod_base = OTHER; note = 2'-O-methyladenosine
aggcctggagtttattcggaa

SEQ ID NO: 1673 - RNA, 23 nt, synthetic construct
  source 1..23: mol_type = other RNA
  modified_base 1: mod_base = OTHER; note = 2'-O-methyluridine-3'-phosphate
  modified_base 2: mod_base = OTHER; note = 2'-fluorouridine-3'-phosphate
  modified_base 3: mod_base = OTHER; note = 2'-O-methylcytidine-3'-phosphate
  modified_base 4: mod_base = OTHER; note = 2'-O-methylcytidine-3'-phosphate
  modified_base 5: mod_base = OTHER; note = 2'-O-methylguanosine-3'-phosphate
  modified_base 6: mod_base = OTHER; note = 2'-fluoroadenosine-3'-phosphate
  modified_base 7: mod_base = OTHER; note = 2'-O-methyladenosine-3'-phosphate
  modified_base 8: mod_base = OTHER; note = 2'-O-methyluridine-3'-phosphate
  modified_base 9: mod_base = OTHER; note = 2'-O-methyladenosine-3'-phosphate
  modified_base 10: mod_base = OTHER; note = 2'-O-methyladenosine-3'-phosphate
  modified_base 11: mod_base = OTHER; note = 2'-O-methyladenosine-3'-phosphate
  modified_base 12: mod_base = OTHER; note = 2'-O-methylcytidine-3'-phosphate
  modified_base 13: mod_base = OTHER; note = 2'-O-methyluridine-3'-phosphate
  modified_base 14: mod_base = OTHER; note = 2'-fluorocytidine-3'-phosphate
  modified_base 15: mod_base = OTHER; note = 2'-O-methylcytidine-3'-phosphate
  modified_base 16: mod_base = OTHER; note = 2'-fluoroadenosine-3'-phosphate
  modified_base 17: mod_base = OTHER; note = 2'-O-methylguanosine-3'-phosphate
  modified_base 18: mod_base = OTHER; note = 2'-O-methylguanosine-3'-phosphate
  modified_base 19: mod_base = OTHER; note = 2'-O-methylcytidine-3'-phosphate
  modified_base 20: mod_base = OTHER; note = 2'-O-methylcytidine-3'-phosphate
  modified_base 21: mod_base = OTHER; note = 2'-O-methyluridine-3'-phosphate
  modified_base 22: mod_base = OTHER; note = 2'-O-methyladenosine-3'-phosphate
  modified_base 23: mod_base = OTHER; note = 2'-O-methyluridine
ttccgaataaactccaggcctat

SEQ ID NO: 1674 - RNA, 19 nt, synthetic construct
  source 1..19: mol_type = other RNA
  modified_base 1: mod_base = OTHER; note = 2'-O-methylguanosine-3'-phosphorothioate
  modified_base 2: mod_base = OTHER; note = 2'-O-methylcytidine-3'-phosphorothioate
  modified_base 3: mod_base = OTHER; note = 2'-O-methylcytidine-3'-phosphate
  modified_base 4: mod_base = OTHER; note = 2'-O-methyluridine-3'-phosphate
  modified_base 5: mod_base = OTHER; note = 2'-O-methylguanosine-3'-phosphate
  modified_base 6: mod_base = OTHER; note = 2'-O-methylguanosine-3'-phosphate
  modified_base 7: mod_base = OTHER; note = 2'-fluoroadenosine-3'-phosphate
  modified_base 8: mod_base = OTHER; note = 2'-fluoroguanosine-3'-phosphate
  modified_base 9: mod_base = OTHER; note = 2'-fluorouridine-3'-phosphate
  modified_base 10: mod_base = OTHER; note = 2'-O-methyluridine-3'-phosphate
  modified_base 11: mod_base = OTHER; note = 2'-O-methyluridine-3'-phosphate
  modified_base 12: mod_base = OTHER; note = 2'-O-methyladenosine-3'-phosphate
  modified_base 13: mod_base = OTHER; note = 2'-O-methyluridine-3'-phosphate
  modified_base 14: mod_base = OTHER; note = 2'-O-methyluridine-3'-phosphate
  modified_base 15: mod_base = OTHER; note = 2'-O-methylcytidine-3'-phosphate
  modified_base 16: mod_base = OTHER; note = 2'-O-methylguanosine-3'-phosphate
  modified_base 17: mod_base = OTHER; note = 2'-O-methylguanosine-3'-phosphate
  modified_base 18: mod_base = OTHER; note = 2'-O-methyladenosine-3'-phosphate
  modified_base 19: mod_base = OTHER; note = 2'-O-methyladenosine
gcctggagtttattcggaa

SEQ ID NO: 1675 - RNA, 21 nt, synthetic construct
  source 1..21: mol_type = other RNA
  modified_base 1: mod_base = OTHER; note = 2'-O-methyluridine-3'-phosphorothioate
  modified_base 2: mod_base = OTHER; note = 2'-fluorouridine-3'-phosphorothioate
  modified_base 3: mod_base = OTHER; note = 2'-O-methylcytidine-3'-phosphate
  modified_base 4: mod_base = OTHER; note = 2'-O-methylcytidine-3'-phosphate
  modified_base 5: mod_base = OTHER; note = 2'-O-methylguanosine-3'-phosphate
  modified_base 6: mod_base = OTHER; note = 2'-fluoroadenosine-3'-phosphate
  modified_base 7: mod_base = OTHER; note = 2'-O-methyladenosine-3'-phosphate
  modified_base 8: mod_base = OTHER; note = 2'-O-methyluridine-3'-phosphate
  modified_base 9: mod_base = OTHER; note = 2'-O-methyladenosine-3'-phosphate
  modified_base 10: mod_base = OTHER; note = 2'-O-methyladenosine-3'-phosphate
  modified_base 11: mod_base = OTHER; note = 2'-O-methyladenosine-3'-phosphate
  modified_base 12: mod_base = OTHER; note = 2'-O-methylcytidine-3'-phosphate
  modified_base 13: mod_base = OTHER; note = 2'-O-methyluridine-3'-phosphate
  modified_base 14: mod_base = OTHER; note = 2'-fluorocytidine-3'-phosphate
  modified_base 15: mod_base = OTHER; note = 2'-O-methylcytidine-3'-phosphate
  modified_base 16: mod_base = OTHER; note = 2'-fluoroadenosine-3'-phosphate
  modified_base 17: mod_base = OTHER; note = 2'-O-methylguanosine-3'-phosphate
  modified_base 18: mod_base = OTHER; note = 2'-O-methylguanosine-3'-phosphate
  modified_base 19: mod_base = OTHER; note = 2'-O-methylcytidine-3'-phosphorothioate
  modified_base 20: mod_base = OTHER; note = 2'-O-methylcytidine-3'-phosphorothioate
  modified_base 21: mod_base = OTHER; note = 2'-O-methyluridine
ttccgaataaactccaggcct

SEQ ID NO: 1676 - RNA, 19 nt, synthetic construct
  source 1..19: mol_type = other RNA
  modified_base 1: mod_base = OTHER; note = 2'-O-methylguanosine-3'-phosphorothioate
  modified_base 2: mod_base = OTHER; note = 2'-O-methylcytidine-3'-phosphorothioate
  modified_base 3: mod_base = OTHER; note = 2'-O-methylcytidine-3'-phosphate
  modified_base 4: mod_base = OTHER; note = 2'-O-methyluridine-3'-phosphate
  modified_base 5: mod_base = OTHER; note = 2'-fluoroguanosine-3'-phosphate
  modified_base 6: mod_base = OTHER; note = 2'-O-methylguanosine-3'-phosphate
  modified_base 7: mod_base = OTHER; note = 2'-fluoroadenosine-3'-phosphate
  modified_base 8: mod_base = OTHER; note = 2'-fluoroguanosine-3'-phosphate
  modified_base 9: mod_base = OTHER; note = 2'-fluorouridine-3'-phosphate
  modified_base 10: mod_base = OTHER; note = 2'-O-methyluridine-3'-phosphate
  modified_base 11: mod_base = OTHER; note = 2'-O-methyluridine-3'-phosphate
  modified_base 12: mod_base = OTHER; note = 2'-O-methyladenosine-3'-phosphate
  modified_base 13: mod_base = OTHER; note = 2'-O-methyluridine-3'-phosphate
  modified_base 14: mod_base = OTHER; note = 2'-O-methyluridine-3'-phosphate
  modified_base 15: mod_base = OTHER; note = 2'-O-methylcytidine-3'-phosphate
  modified_base 16: mod_base = OTHER; note = 2'-O-methylguanosine-3'-phosphate
  modified_base 17: mod_base = OTHER; note = 2'-O-methylguanosine-3'-phosphate
  modified_base 18: mod_base = OTHER; note = 2'-O-methyladenosine-3'-phosphate
  modified_base 19: mod_base = OTHER; note = 2'-O-methyladenosine
gcctggagtttattcggaa

SEQ ID NO: 1677 - RNA, 21 nt, synthetic construct
  source 1..21: mol_type = other RNA
  modified_base 1: mod_base = OTHER; note = 2'-O-methyluridine-3'-phosphorothioate
  modified_base 2: mod_base = OTHER; note = 2'-fluorouridine-3'-phosphorothioate
  modified_base 3: mod_base = OTHER; note = 2'-O-methylcytidine-3'-phosphate
  modified_base 4: mod_base = OTHER; note = 2'-O-methylcytidine-3'-phosphate
  modified_base 5: mod_base = OTHER; note = 2'-O-methylguanosine-3'-phosphate
  modified_base 6: mod_base = OTHER; note = 2'-fluoroadenosine-3'-phosphate
  modified_base 7: mod_base = OTHER; note = 2'-O-methyladenosine-3'-phosphate
  modified_base 8: mod_base = OTHER; note = 2'-fluorouridine-3'-phosphate
  modified_base 9: mod_base = OTHER; note = 2'-fluoroadenosine-3'-phosphate
  modified_base 10: mod_base = OTHER; note = 2'-O-methyladenosine-3'-phosphate
  modified_base 11: mod_base = OTHER; note = 2'-O-methyladenosine-3'-phosphate
  modified_base 12: mod_base = OTHER; note = 2'-O-methylcytidine-3'-phosphate
  modified_base 13: mod_base = OTHER; note = 2'-O-methyluridine-3'-phosphate
  modified_base 14: mod_base = OTHER; note = 2'-fluorocytidine-3'-phosphate
  modified_base 15: mod_base = OTHER; note = 2'-O-methylcytidine-3'-phosphate
  modified_base 16: mod_base = OTHER; note = 2'-fluoroadenosine-3'-phosphate
  modified_base 17: mod_base = OTHER; note = 2'-O-methylguanosine-3'-phosphate
  modified_base 18: mod_base = OTHER; note = 2'-O-methylguanosine-3'-phosphate
  modified_base 19: mod_base = OTHER; note = 2'-O-methylcytidine-3'-phosphorothioate
  modified_base 20: mod_base = OTHER; note = 2'-O-methylcytidine-3'-phosphorothioate
  modified_base 21: mod_base = OTHER; note = 2'-O-methyluridine
ttccgaataaactccaggcct

SEQ ID NO: 1678 - RNA, 19 nt, synthetic construct
  source 1..19: mol_type = other RNA
  modified_base 1: mod_base = OTHER; note = 2'-O-methylguanosine-3'-phosphorothioate
  modified_base 2: mod_base = OTHER; note = 2'-O-methylcytidine-3'-phosphorothioate
  modified_base 3: mod_base = OTHER; note = 2'-O-methylcytidine-3'-phosphate
  modified_base 4: mod_base = OTHER; note = 2'-O-methyluridine-3'-phosphate
  modified_base 5: mod_base = OTHER; note = 2'-fluoroguanosine-3'-phosphate
  modified_base 6: mod_base = OTHER; note = 2'-O-methylguanosine-3'-phosphate
  modified_base 7: mod_base = OTHER; note = 2'-fluoroadenosine-3'-phosphate
  modified_base 8: mod_base = OTHER; note = 2'-fluoroguanosine-3'-phosphate
  modified_base 9: mod_base = OTHER; note = 2'-fluorouridine-3'-phosphate
  modified_base 10: mod_base = OTHER; note = 2'-O-methyluridine-3'-phosphate
  modified_base 11: mod_base = OTHER; note = 2'-O-methyluridine-3'-phosphate
  modified_base 12: mod_base = OTHER; note = 2'-O-methyladenosine-3'-phosphate
  modified_base 13: mod_base = OTHER; note = 2'-O-methyluridine-3'-phosphate
  modified_base 14: mod_base = OTHER; note = 2'-O-methyluridine-3'-phosphate
  modified_base 15: mod_base = OTHER; note = 2'-O-methylcytidine-3'-phosphate
  modified_base 16: mod_base = OTHER; note = 2'-O-methylguanosine-3'-phosphate
  modified_base 17: mod_base = OTHER; note = 2'-O-methylguanosine-3'-phosphate
  modified_base 18: mod_base = OTHER; note = 2'-O-methyladenosine-3'-phosphate
  modified_base 19: mod_base = OTHER; note = 2'-O-methyladenosine
gcctggagtttattcggaa

SEQ ID NO: 1679 - RNA, 21 nt, synthetic construct
  source 1..21: mol_type = other RNA
  modified_base 1: mod_base = OTHER; note = 2'-O-methyluridine-3'-phosphorothioate
  modified_base 2: mod_base = OTHER; note = 2'-fluorouridine-3'-phosphorothioate
  modified_base 3: mod_base = OTHER; note = 2'-O-methylcytidine-3'-phosphate
  modified_base 4: mod_base = OTHER; note = 2'-O-methylcytidine-3'-phosphate
  modified_base 5: mod_base = OTHER; note = 2'-O-methylguanosine-3'-phosphate
  modified_base 6: mod_base = OTHER; note = 2'-fluoroadenosine-3'-phosphate
  modified_base 7: mod_base = OTHER; note = 2'-O-methyladenosine-3'-phosphate
  modified_base 8: mod_base = OTHER; note = 2'-O-methyluridine-3'-phosphate
  modified_base 9: mod_base = OTHER; note = 2'-O-methyladenosine-3'-phosphate
  modified_base 10: mod_base = OTHER; note = 2'-O-methyladenosine-3'-phosphate
  modified_base 11: mod_base = OTHER; note = 2'-O-methyladenosine-3'-phosphate
  modified_base 12: mod_base = OTHER; note = 2'-O-methylcytidine-3'-phosphate
  modified_base 13: mod_base = OTHER; note = 2'-O-methyluridine-3'-phosphate
  modified_base 14: mod_base = OTHER; note = 2'-fluorocytidine-3'-phosphate
  modified_base 15: mod_base = OTHER; note = 2'-O-methylcytidine-3'-phosphate
  modified_base 16: mod_base = OTHER; note = 2'-fluoroadenosine-3'-phosphate
  modified_base 17: mod_base = OTHER; note = 2'-O-methylguanosine-3'-phosphate
  modified_base 18: mod_base = OTHER; note = 2'-O-methylguanosine-3'-phosphate
  modified_base 19: mod_base = OTHER; note = 2'-O-methylcytidine-3'-phosphorothioate
  modified_base 20: mod_base = OTHER; note = 2'-O-methylcytidine-3'-phosphorothioate
  modified_base 21: mod_base = OTHER; note = 2'-O-methyluridine
ttccgaataaactccaggcct

SEQ ID NO: 1680 - RNA, 21 nt, synthetic construct
  source 1..21: mol_type = other RNA
  modified_base 1: mod_base = OTHER; note = 2'-O-methyladenosine-3'-phosphorothioate
  modified_base 2: mod_base = OTHER; note = 2'-O-methylguanosine-3'-phosphorothioate
  modified_base 3: mod_base = OTHER; note = 2'-O-methylguanosine-3'-phosphate
  modified_base 4: mod_base = OTHER; note = 2'-O-methylcytidine-3'-phosphate
  modified_base 5: mod_base = OTHER; note = 2'-O-methylcytidine-3'-phosphate
  modified_base 6: mod_base = OTHER; note = 2'-O-methyluridine-3'-phosphate
  modified_base 7: mod_base = OTHER; note = 2'-O-methylguanosine-3'-phosphate
  modified_base 8: mod_base = OTHER; note = 2'-O-methylguanosine-3'-phosphate
  modified_base 9: mod_base = OTHER; note = 2'-fluoroadenosine-3'-phosphate
  modified_base 10: mod_base = OTHER; note = 2'-fluoroguanosine-3'-phosphate
  modified_base 11: mod_base = OTHER; note = 2'-fluorouridine-3'-phosphate
  modified_base 12: mod_base = OTHER; note = 2'-O-methyluridine-3'-phosphate
  modified_base 13: mod_base = OTHER; note = 2'-O-methyluridine-3'-phosphate
  modified_base 14: mod_base = OTHER; note = 2'-O-methyladenosine-3'-phosphate
  modified_base 15: mod_base = OTHER; note = 2'-O-methyluridine-3'-phosphate
  modified_base 16: mod_base = OTHER; note = 2'-O-methyluridine-3'-phosphate
  modified_base 17: mod_base = OTHER; note = 2'-O-methylcytidine-3'-phosphate
  modified_base 18: mod_base = OTHER; note = 2'-O-methylguanosine-3'-phosphate
  modified_base 19: mod_base = OTHER; note = 2'-O-methylguanosine-3'-phosphate
  modified_base 20: mod_base = OTHER; note = 2'-O-methyladenosine-3'-phosphate
  modified_base 21: mod_base = OTHER; note = 2'-O-methyladenosine
aggcctggagtttattcggaa

SEQ ID NO: 1681 - RNA, 23 nt, synthetic construct
  source 1..23: mol_type = other RNA
  modified_base 1: mod_base = OTHER; note = 2'-O-methyluridine-3'-phosphorothioate
  modified_base 2: mod_base = OTHER; note = 2'-fluorouridine-3'-phosphorothioate
  modified_base 3: mod_base = OTHER; note = 2'-O-methylcytidine-3'-phosphate
  modified_base 4: mod_base = OTHER; note = 2'-O-methylcytidine-3'-phosphate
  modified_base 5: mod_base = OTHER; note = 2'-O-methylguanosine-3'-phosphate
  modified_base 6: mod_base = OTHER; note = 2'-fluoroadenosine-3'-phosphate
  modified_base 7: mod_base = OTHER; note = 2'-O-methyladenosine-3'-phosphate
  modified_base 8: mod_base = OTHER; note = 2'-O-methyluridine-3'-phosphate
  modified_base 9: mod_base = OTHER; note = 2'-O-methyladenosine-3'-phosphate
  modified_base 10: mod_base = OTHER; note = 2'-O-methyladenosine-3'-phosphate
  modified_base 11: mod_base = OTHER; note = 2'-O-methyladenosine-3'-phosphate
  modified_base 12: mod_base = OTHER; note = 2'-O-methylcytidine-3'-phosphate
  modified_base 13: mod_base = OTHER; note = 2'-O-methyluridine-3'-phosphate
  modified_base 14: mod_base = OTHER; note = 2'-fluorocytidine-3'-phosphate
  modified_base 15: mod_base = OTHER; note = 2'-O-methylcytidine-3'-phosphate
  modified_base 16: mod_base = OTHER; note = 2'-fluoroadenosine-3'-phosphate
  modified_base 17: mod_base = OTHER; note = 2'-O-methylguanosine-3'-phosphate
  modified_base 18: mod_base = OTHER; note = 2'-O-methylguanosine-3'-phosphate
  modified_base 19: mod_base = OTHER; note = 2'-O-methylcytidine-3'-phosphate
  modified_base 20: mod_base = OTHER; note = 2'-O-methylcytidine-3'-phosphate
  modified_base 21: mod_base = OTHER; note = 2'-O-methyluridine-3'-phosphorothioate
  modified_base 22: mod_base = OTHER; note = 2'-O-methyladenosine-3'-phosphorothioate
  modified_base 23: mod_base = OTHER; note = 2'-O-methyluridine
ttccgaataaactccaggcctat

SEQ ID NO: 1682 - RNA, 21 nt, synthetic construct
  source 1..21: mol_type = other RNA
  modified_base 1: mod_base = OTHER; note = 2'-O-methyladenosine-3'-phosphorothioate
  modified_base 2: mod_base = OTHER; note = 2'-O-methylguanosine-3'-phosphorothioate
  modified_base 3: mod_base = OTHER; note = 2'-O-methylguanosine-3'-phosphate
  modified_base 4: mod_base = OTHER; note = 2'-O-methylcytidine-3'-phosphate
  modified_base 5: mod_base = OTHER; note = 2'-O-methylcytidine-3'-phosphate
  modified_base 6: mod_base = OTHER; note = 2'-O-methyluridine-3'-phosphate
  modified_base 7: mod_base = OTHER; note = 2'-fluoroguanosine-3'-phosphate
  modified_base 8: mod_base = OTHER; note = 2'-O-methylguanosine-3'-phosphate
  modified_base 9: mod_base = OTHER; note = 2'-fluoroadenosine-3'-phosphate
  modified_base 10: mod_base = OTHER; note = 2'-fluoroguanosine-3'-phosphate
  modified_base 11: mod_base = OTHER; note = 2'-fluorouridine-3'-phosphate
  modified_base 12: mod_base = OTHER; note = 2'-O-methyluridine-3'-phosphate
  modified_base 13: mod_base = OTHER; note = 2'-O-methyluridine-3'-phosphate
  modified_base 14: mod_base = OTHER; note = 2'-O-methyladenosine-3'-phosphate
  modified_base 15: mod_base = OTHER; note = 2'-O-methyluridine-3'-phosphate
  modified_base 16: mod_base = OTHER; note = 2'-O-methyluridine-3'-phosphate
  modified_base 17: mod_base = OTHER; note = 2'-O-methylcytidine-3'-phosphate
  modified_base 18: mod_base = OTHER; note = 2'-O-methylguanosine-3'-phosphate
  modified_base 19: mod_base = OTHER; note = 2'-O-methylguanosine-3'-phosphate
  modified_base 20: mod_base = OTHER; note = 2'-O-methyladenosine-3'-phosphate
  modified_base 21: mod_base = OTHER; note = 2'-O-methyladenosine
aggcctggagtttattcggaa

SEQ ID NO: 1683 - RNA, 23 nt, synthetic construct
  source 1..23: mol_type = other RNA
  modified_base 1: mod_base = OTHER; note = 2'-O-methyluridine-3'-phosphorothioate
  modified_base 2: mod_base = OTHER; note = 2'-fluorouridine-3'-phosphorothioate
  modified_base 3: mod_base = OTHER; note = 2'-O-methylcytidine-3'-phosphate
  modified_base 4: mod_base = OTHER; note = 2'-O-methylcytidine-3'-phosphate
  modified_base 5: mod_base = OTHER; note = 2'-O-methylguanosine-3'-phosphate
  modified_base 6: mod_base = OTHER; note = 2'-fluoroadenosine-3'-phosphate
  modified_base 7: mod_base = OTHER; note = 2'-O-methyladenosine-3'-phosphate
  modified_base 8: mod_base = OTHER; note = 2'-fluorouridine-3'-phosphate
  modified_base 9: mod_base = OTHER; note = 2'-fluoroadenosine-3'-phosphate
  modified_base 10: mod_base = OTHER; note = 2'-O-methyladenosine-3'-phosphate
  modified_base 11: mod_base = OTHER; note = 2'-O-methyladenosine-3'-phosphate
  modified_base 12: mod_base = OTHER; note = 2'-O-methylcytidine-3'-phosphate
  modified_base 13: mod_base = OTHER; note = 2'-O-methyluridine-3'-phosphate
  modified_base 14: mod_base = OTHER; note = 2'-fluorocytidine-3'-phosphate
  modified_base 15: mod_base = OTHER; note = 2'-O-methylcytidine-3'-phosphate
  modified_base 16: mod_base = OTHER; note = 2'-fluoroadenosine-3'-phosphate
  modified_base 17: mod_base = OTHER; note = 2'-O-methylguanosine-3'-phosphate
  modified_base 18: mod_base = OTHER; note = 2'-O-methylguanosine-3'-phosphate
  modified_base 19: mod_base = OTHER; note = 2'-O-methylcytidine-3'-phosphate
  modified_base 20: mod_base = OTHER; note = 2'-O-methylcytidine-3'-phosphate
  modified_base 21: mod_base = OTHER; note = 2'-O-methyluridine-3'-phosphorothioate
  modified_base 22: mod_base = OTHER; note = 2'-O-methyladenosine-3'-phosphorothioate
  modified_base 23: mod_base = OTHER; note = 2'-O-methyluridine
ttccgaataaactccaggcctat

SEQ ID NO: 1684 - RNA, 21 nt, synthetic construct
  source 1..21: mol_type = other RNA
  modified_base 1: mod_base = OTHER; note = 2'-O-methyladenosine-3'-phosphorothioate
  modified_base 2: mod_base = OTHER; note = 2'-O-methylguanosine-3'-phosphorothioate
  modified_base 3: mod_base = OTHER; note = 2'-O-methylguanosine-3'-phosphate
  modified_base 4: mod_base = OTHER; note = 2'-O-methylcytidine-3'-phosphate
  modified_base 5: mod_base = OTHER; note = 2'-O-methylcytidine-3'-phosphate
  modified_base 6: mod_base = OTHER; note = 2'-O-methyluridine-3'-phosphate
  modified_base 7: mod_base = OTHER; note = 2'-fluoroguanosine-3'-phosphate
  modified_base 8: mod_base = OTHER; note = 2'-O-methylguanosine-3'-phosphate
  modified_base 9: mod_base = OTHER; note = 2'-fluoroadenosine-3'-phosphate
  modified_base 10: mod_base = OTHER; note = 2'-fluoroguanosine-3'-phosphate
  modified_base 11: mod_base = OTHER; note = 2'-fluorouridine-3'-phosphate
  modified_base 12: mod_base = OTHER; note = 2'-O-methyluridine-3'-phosphate
  modified_base 13: mod_base = OTHER; note = 2'-O-methyluridine-3'-phosphate
  modified_base 14: mod_base = OTHER; note = 2'-O-methyladenosine-3'-phosphate
  modified_base 15: mod_base = OTHER; note = 2'-O-methyluridine-3'-phosphate
  modified_base 16: mod_base = OTHER; note = 2'-O-methyluridine-3'-phosphate
  modified_base 17: mod_base = OTHER; note = 2'-O-methylcytidine-3'-phosphate
  modified_base 18: mod_base = OTHER; note = 2'-O-methylguanosine-3'-phosphate
  modified_base 19: mod_base = OTHER; note = 2'-O-methylguanosine-3'-phosphate
  modified_base 20: mod_base = OTHER; note = 2'-O-methyladenosine-3'-phosphate
  modified_base 21: mod_base = OTHER; note = 2'-O-methyladenosine
aggcctggagtttattcggaa

SEQ ID NO: 1685 - RNA, 23 nt, synthetic construct
  source 1..23: mol_type = other RNA
  modified_base 1: mod_base = OTHER; note = 2'-O-methyluridine-3'-phosphorothioate
  modified_base 2: mod_base = OTHER; note = 2'-fluorouridine-3'-phosphorothioate
  modified_base 3: mod_base = OTHER; note = 2'-O-methylcytidine-3'-phosphate
  modified_base 4: mod_base = OTHER; note = 2'-O-methylcytidine-3'-phosphate
  modified_base 5: mod_base = OTHER; note = 2'-O-methylguanosine-3'-phosphate
  modified_base 6: mod_base = OTHER; note = 2'-fluoroadenosine-3'-phosphate
  modified_base 7: mod_base = OTHER; note = 2'-O-methyladenosine-3'-phosphate
  modified_base 8: mod_base = OTHER; note = 2'-O-methyluridine-3'-phosphate
  modified_base 9: mod_base = OTHER; note = 2'-O-methyladenosine-3'-phosphate
  modified_base 10: mod_base = OTHER; note = 2'-O-methyladenosine-3'-phosphate
  modified_base 11: mod_base = OTHER; note = 2'-O-methyladenosine-3'-phosphate
  modified_base 12: mod_base = OTHER; note = 2'-O-methylcytidine-3'-phosphate
  modified_base 13: mod_base = OTHER; note = 2'-O-methyluridine-3'-phosphate
  modified_base 14: mod_base = OTHER; note = 2'-fluorocytidine-3'-phosphate
  modified_base 15: mod_base = OTHER; note = 2'-O-methylcytidine-3'-phosphate
  modified_base 16: mod_base = OTHER; note = 2'-fluoroadenosine-3'-phosphate
  modified_base 17: mod_base = OTHER; note = 2'-O-methylguanosine-3'-phosphate
  modified_base 18: mod_base = OTHER; note = 2'-O-methylguanosine-3'-phosphate
  modified_base 19: mod_base = OTHER; note = 2'-O-methylcytidine-3'-phosphate
  modified_base 20: mod_base = OTHER; note = 2'-O-methylcytidine-3'-phosphate
  modified_base 21: mod_base = OTHER; note = 2'-O-methyluridine-3'-phosphorothioate
  modified_base 22: mod_base = OTHER; note = 2'-O-methyladenosine-3'-phosphorothioate
  modified_base 23: mod_base = OTHER; note = 2'-O-methyluridine
ttccgaataaactccaggcctat

SEQ ID NO: 1686 - RNA, 19 nt, synthetic construct
  source 1..19: mol_type = other RNA
  modified_base 1: mod_base = OTHER; note = 2'-O-methylguanosine-3'-phosphate
  modified_base 2: mod_base = OTHER; note = 2'-O-methylcytidine-3'-phosphate
  modified_base 3: mod_base = OTHER; note = 2'-O-methylcytidine-3'-phosphate
  modified_base 4: mod_base = OTHER; note = 2'-O-methyluridine-3'-phosphate
  modified_base 5: mod_base = OTHER; note = 2'-O-methylguanosine-3'-phosphate
  modified_base 6: mod_base = OTHER; note = 2'-O-methylguanosine-3'-phosphate
  modified_base 7: mod_base = OTHER; note = 2'-fluoroadenosine-3'-phosphate
  modified_base 8: mod_base = OTHER; note = 2'-fluoroguanosine-3'-phosphate
  modified_base 9: mod_base = OTHER; note = 2'-fluorouridine-3'-phosphate
  modified_base 10: mod_base = OTHER; note = 2'-O-methyluridine-3'-phosphate
  modified_base 11: mod_base = OTHER; note = 2'-O-methyluridine-3'-phosphate
  modified_base 12: mod_base = OTHER; note = 2'-O-methyladenosine-3'-phosphate
  modified_base 13: mod_base = OTHER; note = 2'-O-methyluridine-3'-phosphate
  modified_base 14: mod_base = OTHER; note = 2'-O-methyluridine-3'-phosphate
  modified_base 15: mod_base = OTHER; note = 2'-O-methylcytidine-3'-phosphate
  modified_base 16: mod_base = OTHER; note = 2'-O-methylguanosine-3'-phosphate
  modified_base 17: mod_base = OTHER; note = 2'-O-methylguanosine-3'-phosphate
  modified_base 18: mod_base = OTHER; note = 2'-O-methyladenosine-3'-phosphate
  modified_base 19: mod_base = OTHER; note = 2'-O-methyladenosine
gcctggagtttattcggaa

SEQ ID NO: 1687 - RNA, 21 nt, synthetic construct
  source 1..21: mol_type = other RNA
  modified_base 1: mod_base = OTHER; note = 5'-phosphate-2'-O-methyluridine-3'-phosphate
  modified_base 2: mod_base = OTHER; note = 2'-fluorouridine-3'-phosphate
  modified_base 3: mod_base = OTHER; note = 2'-O-methylcytidine-3'-phosphate
  modified_base 4: mod_base = OTHER; note = 2'-O-methylcytidine-3'-phosphate
  modified_base 5: mod_base = OTHER; note = 2'-O-methylguanosine-3'-phosphate
  modified_base 6: mod_base = OTHER; note = 2'-fluoroadenosine-3'-phosphate
  modified_base 7: mod_base = OTHER; note = 2'-O-methyladenosine-3'-phosphate
  modified_base 8: mod_base = OTHER; note = 2'-O-methyluridine-3'-phosphate
  modified_base 9: mod_base = OTHER; note = 2'-O-methyladenosine-3'-phosphate
  modified_base 10: mod_base = OTHER; note = 2'-O-methyladenosine-3'-phosphate
  modified_base 11: mod_base = OTHER; note = 2'-O-methyladenosine-3'-phosphate
  modified_base 12: mod_base = OTHER; note = 2'-O-methylcytidine-3'-phosphate
  modified_base 13: mod_base = OTHER; note = 2'-O-methyluridine-3'-phosphate
  modified_base 14: mod_base = OTHER; note = 2'-fluorocytidine-3'-phosphate
  modified_base 15: mod_base = OTHER; note = 2'-O-methylcytidine-3'-phosphate
  modified_base 16: mod_base = OTHER; note = 2'-fluoroadenosine-3'-phosphate
  modified_base 17: mod_base = OTHER; note = 2'-O-methylguanosine-3'-phosphate
  modified_base 18: mod_base = OTHER; note = 2'-O-methylguanosine-3'-phosphate
  modified_base 19: mod_base = OTHER; note = 2'-O-methylcytidine-3'-phosphate
  modified_base 20: mod_base = OTHER; note = 2'-O-methylcytidine-3'-phosphate
  modified_base 21: mod_base = OTHER; note = 2'-O-methyluridine
ttccgaataaactccaggcct

SEQ ID NO: 1688 - RNA, 19 nt, synthetic construct
  source 1..19: mol_type = other RNA
  modified_base 1: mod_base = OTHER; note = 2'-O-methylguanosine-3'-phosphate
  modified_base 2: mod_base = OTHER; note = 2'-O-methylcytidine-3'-phosphate
  modified_base 3: mod_base = OTHER; note = 2'-O-methylcytidine-3'-phosphate
  modified_base 4: mod_base = OTHER; note = 2'-O-methyluridine-3'-phosphate
  modified_base 5: mod_base = OTHER; note = 2'-fluoroguanosine-3'-phosphate
  modified_base 6: mod_base = OTHER; note = 2'-O-methylguanosine-3'-phosphate
  modified_base 7: mod_base = OTHER; note = 2'-fluoroadenosine-3'-phosphate
  modified_base 8: mod_base = OTHER; note = 2'-fluoroguanosine-3'-phosphate
  modified_base 9: mod_base = OTHER; note = 2'-fluorouridine-3'-phosphate
  modified_base 10: mod_base = OTHER; note = 2'-O-methyluridine-3'-phosphate
  modified_base 11: mod_base = OTHER; note = 2'-O-methyluridine-3'-phosphate
  modified_base 12: mod_base = OTHER; note = 2'-O-methyladenosine-3'-phosphate
  modified_base 13: mod_base = OTHER; note = 2'-O-methyluridine-3'-phosphate
  modified_base 14: mod_base = OTHER; note = 2'-O-methyluridine-3'-phosphate
  modified_base 15: mod_base = OTHER; note = 2'-O-methylcytidine-3'-phosphate
  modified_base 16: mod_base = OTHER; note = 2'-O-methylguanosine-3'-phosphate
  modified_base 17: mod_base = OTHER; note = 2'-O-methylguanosine-3'-phosphate
  modified_base 18: mod_base = OTHER; note = 2'-O-methyladenosine-3'-phosphate
  modified_base 19: mod_base = OTHER; note = 2'-O-methyladenosine
gcctggagtttattcggaa

SEQ ID NO: 1689 - RNA, 21 nt, synthetic construct
  source 1..21: mol_type = other RNA
  modified_base 1: mod_base = OTHER; note = 5'-phosphate-2'-O-methyluridine-3'-phosphate
  modified_base 2: mod_base = OTHER; note = 2'-fluorouridine-3'-phosphate
  modified_base 3: mod_base = OTHER; note = 2'-O-methylcytidine-3'-phosphate
  modified_base 4: mod_base = OTHER; note = 2'-O-methylcytidine-3'-phosphate
  modified_base 5: mod_base = OTHER; note = 2'-O-methylguanosine-3'-phosphate
  modified_base 6: mod_base = OTHER; note = 2'-fluoroadenosine-3'-phosphate
  modified_base 7: mod_base = OTHER; note = 2'-O-methyladenosine-3'-phosphate
  modified_base 8: mod_base = OTHER; note = 2'-fluorouridine-3'-phosphate
  modified_base 9: mod_base = OTHER; note = 2'-fluoroadenosine-3'-phosphate
  modified_base 10: mod_base = OTHER; note = 2'-O-methyladenosine-3'-phosphate
  modified_base 11: mod_base = OTHER; note = 2'-O-methyladenosine-3'-phosphate
  modified_base 12: mod_base = OTHER; note = 2'-O-methylcytidine-3'-phosphate
  modified_base 13: mod_base = OTHER; note = 2'-O-methyluridine-3'-phosphate
  modified_base 14: mod_base = OTHER; note = 2'-fluorocytidine-3'-phosphate
  modified_base 15: mod_base = OTHER; note = 2'-O-methylcytidine-3'-phosphate
  modified_base 16: mod_base = OTHER; note = 2'-fluoroadenosine-3'-phosphate
  modified_base 17: mod_base = OTHER; note = 2'-O-methylguanosine-3'-phosphate
  modified_base 18: mod_base = OTHER; note = 2'-O-methylguanosine-3'-phosphate
  modified_base 19: mod_base = OTHER; note = 2'-O-methylcytidine-3'-phosphate
  modified_base 20: mod_base = OTHER; note = 2'-O-methylcytidine-3'-phosphate
  modified_base 21: mod_base = OTHER; note = 2'-O-methyluridine
ttccgaataaactccaggcct

SEQ ID NO: 1690 - RNA, 19 nt, synthetic construct
  source 1..19: mol_type = other RNA
  modified_base 1: mod_base = OTHER; note = 2'-O-methylguanosine-3'-phosphate
  modified_base 2: mod_base = OTHER; note = 2'-O-methylcytidine-3'-phosphate
  modified_base 3: mod_base = OTHER; note = 2'-O-methylcytidine-3'-phosphate
  modified_base 4: mod_base = OTHER; note = 2'-O-methyluridine-3'-phosphate
  modified_base 5: mod_base = OTHER; note = 2'-fluoroguanosine-3'-phosphate
  modified_base 6: mod_base = OTHER; note = 2'-O-methylguanosine-3'-phosphate
  modified_base 7: mod_base = OTHER; note = 2'-fluoroadenosine-3'-phosphate
  modified_base 8: mod_base = OTHER; note = 2'-fluoroguanosine-3'-phosphate
  modified_base 9: mod_base = OTHER; note = 2'-fluorouridine-3'-phosphate
  modified_base 10: mod_base = OTHER; note = 2'-O-methyluridine-3'-phosphate
  modified_base 11: mod_base = OTHER; note = 2'-O-methyluridine-3'-phosphate
  modified_base 12: mod_base = OTHER; note = 2'-O-methyladenosine-3'-phosphate
  modified_base 13: mod_base = OTHER; note = 2'-O-methyluridine-3'-phosphate
  modified_base 14: mod_base = OTHER; note = 2'-O-methyluridine-3'-phosphate
  modified_base 15: mod_base = OTHER; note = 2'-O-methylcytidine-3'-phosphate
  modified_base 16: mod_base = OTHER; note = 2'-O-methylguanosine-3'-phosphate
  modified_base 17: mod_base = OTHER; note = 2'-O-methylguanosine-3'-phosphate
  modified_base 18: mod_base = OTHER; note = 2'-O-methyladenosine-3'-phosphate
  modified_base 19: mod_base = OTHER; note = 2'-O-methyladenosine
gcctggagtttattcggaa

SEQ ID NO: 1691 - RNA, 21 nt, synthetic construct
  source 1..21: mol_type = other RNA
  modified_base 1: mod_base = OTHER; note = 5'-phosphate-2'-O-methyluridine-3'-phosphate
  modified_base 2: mod_base = OTHER; note = 2'-fluorouridine-3'-phosphate
  modified_base 3: mod_base = OTHER; note = 2'-O-methylcytidine-3'-phosphate
  modified_base 4: mod_base = OTHER; note = 2'-O-methylcytidine-3'-phosphate
  modified_base 5: mod_base = OTHER; note = 2'-O-methylguanosine-3'-phosphate
  modified_base 6: mod_base = OTHER; note = 2'-fluoroadenosine-3'-phosphate
  modified_base 7: mod_base = OTHER; note = 2'-O-methyladenosine-3'-phosphate
  modified_base 8: mod_base = OTHER; note = 2'-O-methyluridine-3'-phosphate
  modified_base 9: mod_base = OTHER; note = 2'-O-methyladenosine-3'-phosphate
  modified_base 10: mod_base = OTHER; note = 2'-O-methyladenosine-3'-phosphate
  modified_base 11: mod_base = OTHER; note = 2'-O-methyladenosine-3'-phosphate
  modified_base 12: mod_base = OTHER; note = 2'-O-methylcytidine-3'-phosphate
  modified_base 13: mod_base = OTHER; note = 2'-O-methyluridine-3'-phosphate
  modified_base 14: mod_base = OTHER; note = 2'-fluorocytidine-3'-phosphate
  modified_base 15: mod_base = OTHER; note = 2'-O-methylcytidine-3'-phosphate
  modified_base 16: mod_base = OTHER; note = 2'-fluoroadenosine-3'-phosphate
  modified_base 17: mod_base = OTHER; note = 2'-O-methylguanosine-3'-phosphate
  modified_base 18: mod_base = OTHER; note = 2'-O-methylguanosine-3'-phosphate
  modified_base 19: mod_base = OTHER; note = 2'-O-methylcytidine-3'-phosphate
  modified_base 20: mod_base = OTHER; note = 2'-O-methylcytidine-3'-phosphate
  modified_base 21: mod_base = OTHER; note = 2'-O-methyluridine
ttccgaataaactccaggcct

SEQ ID NO: 1692 - RNA, 21 nt, synthetic construct
  source 1..21: mol_type = other RNA
  modified_base 1: mod_base = OTHER; note = 2'-O-methyladenosine-3'-phosphate
  modified_base 2: mod_base = OTHER; note = 2'-O-methylguanosine-3'-phosphate
  modified_base 3: mod_base = OTHER; note = 2'-O-methylguanosine-3'-phosphate
  modified_base 4: mod_base = OTHER; note = 2'-O-methylcytidine-3'-phosphate
  modified_base 5: mod_base = OTHER; note = 2'-O-methylcytidine-3'-phosphate
  modified_base 6: mod_base = OTHER; note = 2'-O-methyluridine-3'-phosphate
  modified_base 7: mod_base = OTHER; note = 2'-O-methylguanosine-3'-phosphate
  modified_base 8: mod_base = OTHER; note = 2'-O-methylguanosine-3'-phosphate
  modified_base 9: mod_base = OTHER; note = 2'-fluoroadenosine-3'-phosphate
  modified_base 10: mod_base = OTHER; note = 2'-fluoroguanosine-3'-phosphate
  modified_base 11: mod_base = OTHER; note = 2'-fluorouridine-3'-phosphate
  modified_base 12: mod_base = OTHER; note = 2'-O-methyluridine-3'-phosphate
  modified_base 13: mod_base = OTHER; note = 2'-O-methyluridine-3'-phosphate
  modified_base 14: mod_base = OTHER; note = 2'-O-methyladenosine-3'-phosphate
  modified_base 15: mod_base = OTHER; note = 2'-O-methyluridine-3'-phosphate
  modified_base 16: mod_base = OTHER; note = 2'-O-methyluridine-3'-phosphate
  modified_base 17: mod_base = OTHER; note = 2'-O-methylcytidine-3'-phosphate
  modified_base 18: mod_base = OTHER; note = 2'-O-methylguanosine-3'-phosphate
  modified_base 19: mod_base = OTHER; note = 2'-O-methylguanosine-3'-phosphate
  modified_base 20: mod_base = OTHER; note = 2'-O-methyladenosine-3'-phosphate
  modified_base 21: mod_base = OTHER; note = 2'-O-methyladenosine
aggcctggagtttattcggaa

SEQ ID NO: 1693 - RNA, 23 nt, synthetic construct
  source 1..23: mol_type = other RNA
  modified_base 1: mod_base = OTHER; note = 5'-phosphate-2'-O-methyluridine-3'-phosphate
  modified_base 2: mod_base = OTHER; note = 2'-fluorouridine-3'-phosphate
  modified_base 3: mod_base = OTHER; note = 2'-O-methylcytidine-3'-phosphate
  modified_base 4: mod_base = OTHER; note = 2'-O-methylcytidine-3'-phosphate
  modified_base 5: mod_base = OTHER; note = 2'-O-methylguanosine-3'-phosphate
  modified_base 6: mod_base = OTHER; note = 2'-fluoroadenosine-3'-phosphate
  modified_base 7: mod_base = OTHER; note = 2'-O-methyladenosine-3'-phosphate
  modified_base 8: mod_base = OTHER; note = 2'-O-methyluridine-3'-phosphate
  modified_base 9: mod_base = OTHER; note = 2'-O-methyladenosine-3'-phosphate
  modified_base 10: mod_base = OTHER; note = 2'-O-methyladenosine-3'-phosphate
  modified_base 11: mod_base = OTHER; note = 2'-O-methyladenosine-3'-phosphate
  modified_base 12: mod_base = OTHER; note = 2'-O-methylcytidine-3'-phosphate
  modified_base 13: mod_base = OTHER; note = 2'-O-methyluridine-3'-phosphate
  modified_base 14: mod_base = OTHER; note = 2'-fluorocytidine-3'-phosphate
  modified_base 15: mod_base = OTHER; note = 2'-O-methylcytidine-3'-phosphate
  modified_base 16: mod_base = OTHER; note = 2'-fluoroadenosine-3'-phosphate
  modified_base 17: mod_base = OTHER; note = 2'-O-methylguanosine-3'-phosphate
  modified_base 18: mod_base = OTHER; note = 2'-O-methylguanosine-3'-phosphate
  modified_base 19: mod_base = OTHER; note = 2'-O-methylcytidine-3'-phosphate
  modified_base 20: mod_base = OTHER; note = 2'-O-methylcytidine-3'-phosphate
  modified_base 21: mod_base = OTHER; note = 2'-O-methyluridine-3'-phosphate
  modified_base 22: mod_base = OTHER; note = 2'-O-methyladenosine-3'-phosphate
  modified_base 23: mod_base = OTHER; note = 2'-O-methyluridine
ttccgaataaactccaggcctat

SEQ ID NO: 1694 - RNA, 21 nt, synthetic construct
  source 1..21: mol_type = other RNA
  modified_base 1: mod_base = OTHER; note = 2'-O-methyladenosine-3'-phosphate
  modified_base 2: mod_base = OTHER; note = 2'-O-methylguanosine-3'-phosphate
  modified_base 3: mod_base = OTHER; note = 2'-O-methylguanosine-3'-phosphate
  modified_base 4: mod_base = OTHER; note = 2'-O-methylcytidine-3'-phosphate
  modified_base 5: mod_base = OTHER; note = 2'-O-methylcytidine-3'-phosphate
  modified_base 6: mod_base = OTHER; note = 2'-O-methyluridine-3'-phosphate
  modified_base 7: mod_base = OTHER; note = 2'-fluoroguanosine-3'-phosphate
  modified_base 8: mod_base = OTHER; note = 2'-O-methylguanosine-3'-phosphate
  modified_base 9: mod_base = OTHER; note = 2'-fluoroadenosine-3'-phosphate
  modified_base 10: mod_base = OTHER; note = 2'-fluoroguanosine-3'-phosphate
  modified_base 11: mod_base = OTHER; note = 2'-fluorouridine-3'-phosphate
  modified_base 12: mod_base = OTHER; note = 2'-O-methyluridine-3'-phosphate
  modified_base 13: mod_base = OTHER; note = 2'-O-methyluridine-3'-phosphate
  modified_base 14: mod_base = OTHER; note = 2'-O-methyladenosine-3'-phosphate
  modified_base 15: mod_base = OTHER; note = 2'-O-methyluridine-3'-phosphate
  modified_base 16: mod_base = OTHER; note = 2'-O-methyluridine-3'-phosphate
  modified_base 17: mod_base = OTHER; note = 2'-O-methylcytidine-3'-phosphate
  modified_base 18: mod_base = OTHER; note = 2'-O-methylguanosine-3'-phosphate
  modified_base 19: mod_base = OTHER; note = 2'-O-methylguanosine-3'-phosphate
  modified_base 20: mod_base = OTHER; note = 2'-O-methyladenosine-3'-phosphate
  modified_base 21: mod_base = OTHER; note = 2'-O-methyladenosine
aggcctggagtttattcggaa

SEQ ID NO: 1695 - RNA, 23 nt, synthetic construct
  source 1..23: mol_type = other RNA
  modified_base 1: mod_base = OTHER; note = 5'-phosphate-2'-O-methyluridine-3'-phosphate
  modified_base 2: mod_base = OTHER; note = 2'-fluorouridine-3'-phosphate
  modified_base 3: mod_base = OTHER; note = 2'-O-methylcytidine-3'-phosphate
  modified_base 4: mod_base = OTHER; note = 2'-O-methylcytidine-3'-phosphate
  modified_base 5: mod_base = OTHER; note = 2'-O-methylguanosine-3'-phosphate
  modified_base 6: mod_base = OTHER; note = 2'-fluoroadenosine-3'-phosphate
  modified_base 7: mod_base = OTHER; note = 2'-O-methyladenosine-3'-phosphate
  modified_base 8: mod_base = OTHER; note = 2'-fluorouridine-3'-phosphate
  modified_base 9: mod_base = OTHER; note = 2'-fluoroadenosine-3'-phosphate
  modified_base 10: mod_base = OTHER; note = 2'-O-methyladenosine-3'-phosphate
  modified_base 11: mod_base = OTHER; note = 2'-O-methyladenosine-3'-phosphate
  modified_base 12: mod_base = OTHER; note = 2'-O-methylcytidine-3'-phosphate
  modified_base 13: mod_base = OTHER; note = 2'-O-methyluridine-3'-phosphate
  modified_base 14: mod_base = OTHER; note = 2'-fluorocytidine-3'-phosphate
  modified_base 15: mod_base = OTHER; note = 2'-O-methylcytidine-3'-phosphate
  modified_base 16: mod_base = OTHER; note = 2'-fluoroadenosine-3'-phosphate
  modified_base 17: mod_base = OTHER; note = 2'-O-methylguanosine-3'-phosphate
  modified_base 18: mod_base = OTHER; note = 2'-O-methylguanosine-3'-phosphate
  modified_base 19: mod_base = OTHER; note = 2'-O-methylcytidine-3'-phosphate
  modified_base 20: mod_base = OTHER; note = 2'-O-methylcytidine-3'-phosphate
  modified_base 21: mod_base = OTHER; note = 2'-O-methyluridine-3'-phosphate
  modified_base 22: mod_base = OTHER; note = 2'-O-methyladenosine-3'-phosphate
  modified_base 23: mod_base = OTHER; note = 2'-O-methyluridine
ttccgaataaactccaggcctat

SEQ ID NO: 1696 - RNA, 21 nt, synthetic construct
  source 1..21: mol_type = other RNA
  modified_base 1: mod_base = OTHER; note = 2'-O-methyladenosine-3'-phosphate
  modified_base 2: mod_base = OTHER; note = 2'-O-methylguanosine-3'-phosphate
  modified_base 3: mod_base = OTHER; note = 2'-O-methylguanosine-3'-phosphate
  modified_base 4: mod_base = OTHER; note = 2'-O-methylcytidine-3'-phosphate
  modified_base 5: mod_base = OTHER; note = 2'-O-methylcytidine-3'-phosphate
  modified_base 6: mod_base = OTHER; note = 2'-O-methyluridine-3'-phosphate
  modified_base 7: mod_base = OTHER; note = 2'-fluoroguanosine-3'-phosphate
  modified_base 8: mod_base = OTHER; note = 2'-O-methylguanosine-3'-phosphate
  modified_base 9: mod_base = OTHER; note = 2'-fluoroadenosine-3'-phosphate
  modified_base 10: mod_base = OTHER; note = 2'-fluoroguanosine-3'-phosphate
  modified_base 11: mod_base = OTHER; note = 2'-fluorouridine-3'-phosphate
  modified_base 12: mod_base = OTHER; note = 2'-O-methyluridine-3'-phosphate
  modified_base 13: mod_base = OTHER; note = 2'-O-methyluridine-3'-phosphate
  modified_base 14: mod_base = OTHER; note = 2'-O-methyladenosine-3'-phosphate
  modified_base 15: mod_base = OTHER; note = 2'-O-methyluridine-3'-phosphate
  modified_base 16: mod_base = OTHER; note = 2'-O-methyluridine-3'-phosphate
  modified_base 17: mod_base = OTHER; note = 2'-O-methylcytidine-3'-phosphate
  modified_base 18: mod_base = OTHER; note = 2'-O-methylguanosine-3'-phosphate
  modified_base 19: mod_base = OTHER; note = 2'-O-methylguanosine-3'-phosphate
  modified_base 20: mod_base = OTHER; note = 2'-O-methyladenosine-3'-phosphate
  modified_base 21: mod_base = OTHER; note = 2'-O-methyladenosine
aggcctggagtttattcggaa

SEQ ID NO: 1697 - RNA, 23 nt, synthetic construct
  source 1..23: mol_type = other RNA
  modified_base 1: mod_base = OTHER; note = 5'-phosphate-2'-O-methyluridine-3'-phosphate
  modified_base 2: mod_base = OTHER; note = 2'-fluorouridine-3'-phosphate
  modified_base 3: mod_base = OTHER; note = 2'-O-methylcytidine-3'-phosphate
  modified_base 4: mod_base = OTHER; note = 2'-O-methylcytidine-3'-phosphate
  modified_base 5: mod_base = OTHER; note = 2'-O-methylguanosine-3'-phosphate
  modified_base 6: mod_base = OTHER; note = 2'-fluoroadenosine-3'-phosphate
  modified_base 7: mod_base = OTHER; note = 2'-O-methyladenosine-3'-phosphate
  modified_base 8: mod_base = OTHER; note = 2'-O-methyluridine-3'-phosphate
  modified_base 9: mod_base = OTHER; note = 2'-O-methyladenosine-3'-phosphate
  modified_base 10: mod_base = OTHER; note = 2'-O-methyladenosine-3'-phosphate
  modified_base 11: mod_base = OTHER; note = 2'-O-methyladenosine-3'-phosphate
  modified_base 12: mod_base = OTHER; note = 2'-O-methylcytidine-3'-phosphate
  modified_base 13: mod_base = OTHER; note = 2'-O-methyluridine-3'-phosphate
  modified_base 14: mod_base = OTHER; note = 2'-fluorocytidine-3'-phosphate
  modified_base 15: mod_base = OTHER; note = 2'-O-methylcytidine-3'-phosphate
  modified_base 16: mod_base = OTHER; note = 2'-fluoroadenosine-3'-phosphate
  modified_base 17: mod_base = OTHER; note = 2'-O-methylguanosine-3'-phosphate
  modified_base 18: mod_base = OTHER; note = 2'-O-methylguanosine-3'-phosphate
  modified_base 19: mod_base = OTHER; note = 2'-O-methylcytidine-3'-phosphate
  modified_base 20: mod_base = OTHER; note = 2'-O-methylcytidine-3'-phosphate
  modified_base 21: mod_base = OTHER; note = 2'-O-methyluridine-3'-phosphate
  modified_base 22: mod_base = OTHER; note = 2'-O-methyladenosine-3'-phosphate
  modified_base 23: mod_base = OTHER; note = 2'-O-methyluridine
ttccgaataaactccaggcctat

SEQ ID NO: 1698 - RNA, 19 nt, synthetic construct
  source 1..19: mol_type = other RNA
  modified_base 1: mod_base = OTHER; note = 2'-O-methylguanosine-3'-phosphorothioate
  modified_base 2: mod_base = OTHER; note = 2'-O-methylcytidine-3'-phosphorothioate
  modified_base 3: mod_base = OTHER; note = 2'-O-methylcytidine-3'-phosphate
  modified_base 4: mod_base = OTHER; note = 2'-O-methyluridine-3'-phosphate
  modified_base 5: mod_base = OTHER; note = 2'-O-methylguanosine-3'-phosphate
  modified_base 6: mod_base = OTHER; note = 2'-O-methylguanosine-3'-phosphate
  modified_base 7: mod_base = OTHER; note = 2'-fluoroadenosine-3'-phosphate
  modified_base 8: mod_base = OTHER; note = 2'-fluoroguanosine-3'-phosphate
  modified_base 9: mod_base = OTHER; note = 2'-fluorouridine-3'-phosphate
  modified_base 10: mod_base = OTHER; note = 2'-O-methyluridine-3'-phosphate
  modified_base 11: mod_base = OTHER; note = 2'-O-methyluridine-3'-phosphate
  modified_base 12: mod_base = OTHER; note = 2'-O-methyladenosine-3'-phosphate
  modified_base 13: mod_base = OTHER; note = 2'-O-methyluridine-3'-phosphate
  modified_base 14: mod_base = OTHER; note = 2'-O-methyluridine-3'-phosphate
  modified_base 15: mod_base = OTHER; note = 2'-O-methylcytidine-3'-phosphate
  modified_base 16: mod_base = OTHER; note = 2'-O-methylguanosine-3'-phosphate
  modified_base 17: mod_base = OTHER; note = 2'-O-methylguanosine-3'-phosphate
  modified_base 18: mod_base = OTHER; note = 2'-O-methyladenosine-3'-phosphate
  modified_base 19: mod_base = OTHER; note = 2'-O-methyladenosine
gcctggagtttattcggaa

SEQ ID NO: 1699 - RNA, 21 nt, synthetic construct
  source 1..21: mol_type = other RNA
  modified_base 1: mod_base = OTHER; note = 5'-phosphate-2'-O-methyluridine-3'-phosphorothioate
  modified_base 2: mod_base = OTHER; note = 2'-fluorouridine-3'-phosphorothioate
  modified_base 3: mod_base = OTHER; note = 2'-O-methylcytidine-3'-phosphate
  modified_base 4: mod_base = OTHER; note = 2'-O-methylcytidine-3'-phosphate
  modified_base 5: mod_base = OTHER; note = 2'-O-methylguanosine-3'-phosphate
  modified_base 6: mod_base = OTHER; note = 2'-fluoroadenosine-3'-phosphate
  modified_base 7: mod_base = OTHER; note = 2'-O-methyladenosine-3'-phosphate
  modified_base 8: mod_base = OTHER; note = 2'-O-methyluridine-3'-phosphate
  modified_base 9: mod_base = OTHER; note = 2'-O-methyladenosine-3'-phosphate
  modified_base 10: mod_base = OTHER; note = 2'-O-methyladenosine-3'-phosphate
  modified_base 11: mod_base = OTHER; note = 2'-O-methyladenosine-3'-phosphate
  modified_base 12: mod_base = OTHER; note = 2'-O-methylcytidine-3'-phosphate
  modified_base 13: mod_base = OTHER; note = 2'-O-methyluridine-3'-phosphate
  modified_base 14: mod_base = OTHER; note = 2'-fluorocytidine-3'-phosphate
  modified_base 15: mod_base = OTHER; note = 2'-O-methylcytidine-3'-phosphate
  modified_base 16: mod_base = OTHER; note = 2'-fluoroadenosine-3'-phosphate
  modified_base 17: mod_base = OTHER; note = 2'-O-methylguanosine-3'-phosphate
  modified_base 18: mod_base = OTHER; note = 2'-O-methylguanosine-3'-phosphate
  modified_base 19: mod_base = OTHER; note = 2'-O-methylcytidine-3'-phosphorothioate
  modified_base 20: mod_base = OTHER; note = 2'-O-methylcytidine-3'-phosphorothioate
  modified_base 21: mod_base = OTHER; note = 2'-O-methyluridine
ttccgaataaactccaggcct

SEQ ID NO: 1700 - RNA, 19 nt, synthetic construct
  source 1..19: mol_type = other RNA
  modified_base 1: mod_base = OTHER; note = 2'-O-methylguanosine-3'-phosphorothioate
  modified_base 2: mod_base = OTHER; note = 2'-O-methylcytidine-3'-phosphorothioate
  modified_base 3: mod_base = OTHER; note = 2'-O-methylcytidine-3'-phosphate
  modified_base 4: mod_base = OTHER; note = 2'-O-methyluridine-3'-phosphate
  modified_base 5: mod_base = OTHER; note = 2'-fluoroguanosine-3'-phosphate
  modified_base 6: mod_base = OTHER; note = 2'-O-methylguanosine-3'-phosphate
  modified_base 7: mod_base = OTHER; note = 2'-fluoroadenosine-3'-phosphate
  modified_base 8: mod_base = OTHER; note = 2'-fluoroguanosine-3'-phosphate
  modified_base 9: mod_base = OTHER; note = 2'-fluorouridine-3'-phosphate
  modified_base 10: mod_base = OTHER; note = 2'-O-methyluridine-3'-phosphate
  modified_base 11: mod_base = OTHER; note = 2'-O-methyluridine-3'-phosphate
  modified_base 12: mod_base = OTHER; note = 2'-O-methyladenosine-3'-phosphate
  modified_base 13: mod_base = OTHER; note = 2'-O-methyluridine-3'-phosphate
  modified_base 14: mod_base = OTHER; note = 2'-O-methyluridine-3'-phosphate
  modified_base 15: mod_base = OTHER; note = 2'-O-methylcytidine-3'-phosphate
  modified_base 16: mod_base = OTHER; note = 2'-O-methylguanosine-3'-phosphate
  modified_base 17: mod_base = OTHER; note = 2'-O-methylguanosine-3'-phosphate
  modified_base 18: mod_base = OTHER; note = 2'-O-methyladenosine-3'-phosphate
  modified_base 19: mod_base = OTHER; note = 2'-O-methyladenosine
gcctggagtttattcggaa

SEQ ID NO: 1701 - RNA, 21 nt, synthetic construct
  source 1..21: mol_type = other RNA
  modified_base 1: mod_base = OTHER; note = 5'-phosphate-2'-O-methyluridine-3'-phosphorothioate
  modified_base 2: mod_base = OTHER; note = 2'-fluorouridine-3'-phosphorothioate
  modified_base 3: mod_base = OTHER; note = 2'-O-methylcytidine-3'-phosphate
  modified_base 4: mod_base = OTHER; note = 2'-O-methylcytidine-3'-phosphate
  modified_base 5: mod_base = OTHER; note = 2'-O-methylguanosine-3'-phosphate
  modified_base 6: mod_base = OTHER; note = 2'-fluoroadenosine-3'-phosphate
  modified_base 7: mod_base = OTHER; note = 2'-O-methyladenosine-3'-phosphate
  modified_base 8: mod_base = OTHER; note = 2'-fluorouridine-3'-phosphate
  modified_base 9: mod_base = OTHER; note = 2'-fluoroadenosine-3'-phosphate
  modified_base 10: mod_base = OTHER; note = 2'-O-methyladenosine-3'-phosphate
  modified_base 11: mod_base = OTHER; note = 2'-O-methyladenosine-3'-phosphate
  modified_base 12: mod_base = OTHER; note = 2'-O-methylcytidine-3'-phosphate
  modified_base 13: mod_base = OTHER; note = 2'-O-methyluridine-3'-phosphate
  modified_base 14: mod_base = OTHER; note = 2'-fluorocytidine-3'-phosphate
  modified_base 15: mod_base = OTHER; note = 2'-O-methylcytidine-3'-phosphate
  modified_base 16: mod_base = OTHER; note = 2'-fluoroadenosine-3'-phosphate
  modified_base 17: mod_base = OTHER; note = 2'-O-methylguanosine-3'-phosphate
  modified_base 18: mod_base = OTHER; note = 2'-O-methylguanosine-3'-phosphate
  modified_base 19: mod_base = OTHER; note = 2'-O-methylcytidine-3'-phosphorothioate
  modified_base 20: mod_base = OTHER; note = 2'-O-methylcytidine-3'-phosphorothioate
  modified_base 21: mod_base = OTHER; note = 2'-O-methyluridine
ttccgaataaactccaggcct

SEQ ID NO: 1702 - RNA, 19 nt, synthetic construct
  source 1..19: mol_type = other RNA
  modified_base 1: mod_base = OTHER; note = 2'-O-methylguanosine-3'-phosphorothioate
  modified_base 2: mod_base = OTHER; note = 2'-O-methylcytidine-3'-phosphorothioate
  modified_base 3: mod_base = OTHER; note = 2'-O-methylcytidine-3'-phosphate
  modified_base 4: mod_base = OTHER; note = 2'-O-methyluridine-3'-phosphate
  modified_base 5: mod_base = OTHER; note = 2'-fluoroguanosine-3'-phosphate
  modified_base 6: mod_base = OTHER; note = 2'-O-methylguanosine-3'-phosphate
  modified_base 7: mod_base = OTHER; note = 2'-fluoroadenosine-3'-phosphate
  modified_base 8: mod_base = OTHER; note = 2'-fluoroguanosine-3'-phosphate
  modified_base 9: mod_base = OTHER; note = 2'-fluorouridine-3'-phosphate
  modified_base 10: mod_base = OTHER; note = 2'-O-methyluridine-3'-phosphate
  modified_base 11: mod_base = OTHER; note = 2'-O-methyluridine-3'-phosphate
  modified_base 12: mod_base = OTHER; note = 2'-O-methyladenosine-3'-phosphate
  modified_base 13: mod_base = OTHER; note = 2'-O-methyluridine-3'-phosphate
  modified_base 14: mod_base = OTHER; note = 2'-O-methyluridine-3'-phosphate
  modified_base 15: mod_base = OTHER; note = 2'-O-methylcytidine-3'-phosphate
  modified_base 16: mod_base = OTHER; note = 2'-O-methylguanosine-3'-phosphate
  modified_base 17: mod_base = OTHER; note = 2'-O-methylguanosine-3'-phosphate
  modified_base 18: mod_base = OTHER; note = 2'-O-methyladenosine-3'-phosphate
  modified_base 19: mod_base = OTHER; note = 2'-O-methyladenosine
gcctggagtttattcggaa

SEQ ID NO: 1703 - RNA, 21 nt, synthetic construct
  source 1..21: mol_type = other RNA
  modified_base 1: mod_base = OTHER; note = 5'-phosphate-2'-O-methyluridine-3'-phosphorothioate
  modified_base 2: mod_base = OTHER; note = 2'-fluorouridine-3'-phosphorothioate
  modified_base 3: mod_base = OTHER; note = 2'-O-methylcytidine-3'-phosphate
  modified_base 4: mod_base = OTHER; note = 2'-O-methylcytidine-3'-phosphate
  modified_base 5: mod_base = OTHER; note = 2'-O-methylguanosine-3'-phosphate
  modified_base 6: mod_base = OTHER; note = 2'-fluoroadenosine-3'-phosphate
  modified_base 7: mod_base = OTHER; note = 2'-O-methyladenosine-3'-phosphate
  modified_base 8: mod_base = OTHER; note = 2'-O-methyluridine-3'-phosphate
  modified_base 9: mod_base = OTHER; note = 2'-O-methyladenosine-3'-phosphate
  modified_base 10: mod_base = OTHER; note = 2'-O-methyladenosine-3'-phosphate
  modified_base 11: mod_base = OTHER; note = 2'-O-methyladenosine-3'-phosphate
  modified_base 12: mod_base = OTHER; note = 2'-O-methylcytidine-3'-phosphate
  modified_base 13: mod_base = OTHER; note = 2'-O-methyluridine-3'-phosphate
  modified_base 14: mod_base = OTHER; note = 2'-fluorocytidine-3'-phosphate
  modified_base 15: mod_base = OTHER; note = 2'-O-methylcytidine-3'-phosphate
  modified_base 16: mod_base = OTHER; note = 2'-fluoroadenosine-3'-phosphate
  modified_base 17: mod_base = OTHER; note = 2'-O-methylguanosine-3'-phosphate
  modified_base 18: mod_base = OTHER; note = 2'-O-methylguanosine-3'-phosphate
  modified_base 19: mod_base = OTHER; note = 2'-O-methylcytidine-3'-phosphorothioate
  modified_base 20: mod_base = OTHER; note = 2'-O-methylcytidine-3'-phosphorothioate
  modified_base 21: mod_base = OTHER; note = 2'-O-methyluridine
ttccgaataaactccaggcct

SEQ ID NO: 1704 - RNA, 21 nt, synthetic construct
  source 1..21: mol_type = other RNA
  modified_base 1: mod_base = OTHER; note = 2'-O-methyladenosine-3'-phosphorothioate
  modified_base 2: mod_base = OTHER; note = 2'-O-methylguanosine-3'-phosphorothioate
  modified_base 3: mod_base = OTHER; note = 2'-O-methylguanosine-3'-phosphate
  modified_base 4: mod_base = OTHER; note = 2'-O-methylcytidine-3'-phosphate
  modified_base 5: mod_base = OTHER; note = 2'-O-methylcytidine-3'-phosphate
  modified_base 6: mod_base = OTHER; note = 2'-O-methyluridine-3'-phosphate
  modified_base 7: mod_base = OTHER; note = 2'-O-methylguanosine-3'-phosphate
  modified_base 8: mod_base = OTHER; note = 2'-O-methylguanosine-3'-phosphate
  modified_base 9: mod_base = OTHER; note = 2'-fluoroadenosine-3'-phosphate
  modified_base 10: mod_base = OTHER; note = 2'-fluoroguanosine-3'-phosphate
  modified_base 11: mod_base = OTHER; note = 2'-fluorouridine-3'-phosphate
  modified_base 12: mod_base = OTHER; note = 2'-O-methyluridine-3'-phosphate
  modified_base 13: mod_base = OTHER; note = 2'-O-methyluridine-3'-phosphate
  modified_base 14: mod_base = OTHER; note = 2'-O-methyladenosine-3'-phosphate
  modified_base 15: mod_base = OTHER; note = 2'-O-methyluridine-3'-phosphate
  modified_base 16: mod_base = OTHER; note = 2'-O-methyluridine-3'-phosphate
  modified_base 17: mod_base = OTHER; note = 2'-O-methylcytidine-3'-phosphate
  modified_base 18: mod_base = OTHER; note = 2'-O-methylguanosine-3'-phosphate
  modified_base 19: mod_base = OTHER; note = 2'-O-methylguanosine-3'-phosphate
  modified_base 20: mod_base = OTHER; note = 2'-O-methyladenosine-3'-phosphate
  modified_base 21: mod_base = OTHER; note = 2'-O-methyladenosine
aggcctggagtttattcggaa

SEQ ID NO: 1705 - RNA, 23 nt, synthetic construct
  source 1..23: mol_type = other RNA
  modified_base 1: mod_base = OTHER; note = 5'-phosphate-2'-O-methyluridine-3'-phosphorothioate
  modified_base 2: mod_base = OTHER; note = 2'-fluorouridine-3'-phosphorothioate
  modified_base 3: mod_base = OTHER; note = 2'-O-methylcytidine-3'-phosphate
  modified_base 4: mod_base = OTHER; note = 2'-O-methylcytidine-3'-phosphate
  modified_base 5: mod_base = OTHER; note = 2'-O-methylguanosine-3'-phosphate
  modified_base 6: mod_base = OTHER; note = 2'-fluoroadenosine-3'-phosphate
  modified_base 7: mod_base = OTHER; note = 2'-O-methyladenosine-3'-phosphate
  modified_base 8: mod_base = OTHER; note = 2'-O-methyluridine-3'-phosphate
  modified_base 9: mod_base = OTHER; note = 2'-O-methyladenosine-3'-phosphate
  modified_base 10: mod_base = OTHER; note = 2'-O-methyladenosine-3'-phosphate
  modified_base 11: mod_base = OTHER; note = 2'-O-methyladenosine-3'-phosphate
  modified_base 12: mod_base = OTHER; note = 2'-O-methylcytidine-3'-phosphate
  modified_base 13: mod_base = OTHER; note = 2'-O-methyluridine-3'-phosphate
  modified_base 14: mod_base = OTHER; note = 2'-fluorocytidine-3'-phosphate
  modified_base 15: mod_base = OTHER; note = 2'-O-methylcytidine-3'-phosphate
  modified_base 16: mod_base = OTHER; note = 2'-fluoroadenosine-3'-phosphate
  modified_base 17: mod_base = OTHER; note = 2'-O-methylguanosine-3'-phosphate
  modified_base 18: mod_base = OTHER; note = 2'-O-methylguanosine-3'-phosphate
  modified_base 19: mod_base = OTHER; note = 2'-O-methylcytidine-3'-phosphate
  modified_base 20: mod_base = OTHER; note = 2'-O-methylcytidine-3'-phosphate
  modified_base 21: mod_base = OTHER; note = 2'-O-methyluridine-3'-phosphorothioate
  modified_base 22: mod_base = OTHER; note = 2'-O-methyladenosine-3'-phosphorothioate
  modified_base 23: mod_base = OTHER; note = 2'-O-methyluridine
ttccgaataaactccaggcctat

SEQ ID NO: 1706 - RNA, 21 nt, synthetic construct
  source 1..21: mol_type = other RNA
  modified_base 1: mod_base = OTHER; note = 2'-O-methyladenosine-3'-phosphorothioate
  modified_base 2: mod_base = OTHER; note = 2'-O-methylguanosine-3'-phosphorothioate
  modified_base 3: mod_base = OTHER; note = 2'-O-methylguanosine-3'-phosphate
  modified_base 4: mod_base = OTHER; note = 2'-O-methylcytidine-3'-phosphate
  modified_base 5: mod_base = OTHER; note = 2'-O-methylcytidine-3'-phosphate
  modified_base 6: mod_base = OTHER; note = 2'-O-methyluridine-3'-phosphate
  modified_base 7: mod_base = OTHER; note = 2'-fluoroguanosine-3'-phosphate
  modified_base 8: mod_base = OTHER; note = 2'-O-methylguanosine-3'-phosphate
  modified_base 9: mod_base = OTHER; note = 2'-fluoroadenosine-3'-phosphate
  modified_base 10: mod_base = OTHER; note = 2'-fluoroguanosine-3'-phosphate
  modified_base 11: mod_base = OTHER; note = 2'-fluorouridine-3'-phosphate
  modified_base 12: mod_base = OTHER; note = 2'-O-methyluridine-3'-phosphate
  modified_base 13: mod_base = OTHER; note = 2'-O-methyluridine-3'-phosphate
  modified_base 14: mod_base = OTHER; note = 2'-O-methyladenosine-3'-phosphate
  modified_base 15: mod_base = OTHER; note = 2'-O-methyluridine-3'-phosphate
  modified_base 16: mod_base = OTHER; note = 2'-O-methyluridine-3'-phosphate
  modified_base 17: mod_base = OTHER; note = 2'-O-methylcytidine-3'-phosphate
  modified_base 18: mod_base = OTHER; note = 2'-O-methylguanosine-3'-phosphate
  modified_base 19: mod_base = OTHER; note = 2'-O-methylguanosine-3'-phosphate
  modified_base 20: mod_base = OTHER; note = 2'-O-methyladenosine-3'-phosphate
  modified_base 21: mod_base = OTHER; note = 2'-O-methyladenosine
aggcctggagtttattcggaa

SEQ ID NO: 1707 - RNA, 23 nt, synthetic construct
  source 1..23: mol_type = other RNA
  modified_base 1: mod_base = OTHER; note = 5'-phosphate-2'-O-methyluridine-3'-phosphorothioate
  modified_base 2: mod_base = OTHER; note = 2'-fluorouridine-3'-phosphorothioate
  modified_base 3: mod_base = OTHER; note = 2'-O-methylcytidine-3'-phosphate
  modified_base 4: mod_base = OTHER; note = 2'-O-methylcytidine-3'-phosphate
  modified_base 5: mod_base = OTHER; note = 2'-O-methylguanosine-3'-phosphate
  modified_base 6: mod_base = OTHER; note = 2'-fluoroadenosine-3'-phosphate
  modified_base 7: mod_base = OTHER; note = 2'-O-methyladenosine-3'-phosphate
  modified_base 8: mod_base = OTHER; note = 2'-fluorouridine-3'-phosphate
  modified_base 9: mod_base = OTHER; note = 2'-fluoroadenosine-3'-phosphate
  modified_base 10: mod_base = OTHER; note = 2'-O-methyladenosine-3'-phosphate
  modified_base 11: mod_base = OTHER; note = 2'-O-methyladenosine-3'-phosphate
  modified_base 12: mod_base = OTHER; note = 2'-O-methylcytidine-3'-phosphate
  modified_base 13: mod_base = OTHER; note = 2'-O-methyluridine-3'-phosphate
  modified_base 14: mod_base = OTHER; note = 2'-fluorocytidine-3'-phosphate
  modified_base 15: mod_base = OTHER; note = 2'-O-methylcytidine-3'-phosphate
  modified_base 16: mod_base = OTHER; note = 2'-fluoroadenosine-3'-phosphate
  modified_base 17: mod_base = OTHER; note = 2'-O-methylguanosine-3'-phosphate
  modified_base 18: mod_base = OTHER; note = 2'-O-methylguanosine-3'-phosphate
  modified_base 19: mod_base = OTHER; note = 2'-O-methylcytidine-3'-phosphate
  modified_base 20: mod_base = OTHER; note = 2'-O-methylcytidine-3'-phosphate
  modified_base 21: mod_base = OTHER; note = 2'-O-methyluridine-3'-phosphorothioate
  modified_base 22: mod_base = OTHER; note = 2'-O-methyladenosine-3'-phosphorothioate
  modified_base 23: mod_base = OTHER; note = 2'-O-methyluridine
ttccgaataaactccaggcctat

SEQ ID NO: 1708 - RNA, 21 nt, synthetic construct
  source 1..21: mol_type = other RNA
  modified_base 1: mod_base = OTHER; note = 2'-O-methyladenosine-3'-phosphorothioate
  modified_base 2: mod_base = OTHER; note = 2'-O-methylguanosine-3'-phosphorothioate
  modified_base 3: mod_base = OTHER; note = 2'-O-methylguanosine-3'-phosphate
  modified_base 4: mod_base = OTHER; note = 2'-O-methylcytidine-3'-phosphate
  modified_base 5: mod_base = OTHER; note = 2'-O-methylcytidine-3'-phosphate
  modified_base 6: mod_base = OTHER; note = 2'-O-methyluridine-3'-phosphate
  modified_base 7: mod_base = OTHER; note = 2'-fluoroguanosine-3'-phosphate
  modified_base 8: mod_base = OTHER; note = 2'-O-methylguanosine-3'-phosphate
  modified_base 9: mod_base = OTHER; note = 2'-fluoroadenosine-3'-phosphate
  modified_base 10: mod_base = OTHER; note = 2'-fluoroguanosine-3'-phosphate
  modified_base 11: mod_base = OTHER; note = 2'-fluorouridine-3'-phosphate
  modified_base 12: mod_base = OTHER; note = 2'-O-methyluridine-3'-phosphate
  modified_base 13: mod_base = OTHER; note = 2'-O-methyluridine-3'-phosphate
  modified_base 14: mod_base = OTHER; note = 2'-O-methyladenosine-3'-phosphate
  modified_base 15: mod_base = OTHER; note = 2'-O-methyluridine-3'-phosphate
  modified_base 16: mod_base = OTHER; note = 2'-O-methyluridine-3'-phosphate
  modified_base 17: mod_base = OTHER; note = 2'-O-methylcytidine-3'-phosphate
  modified_base 18: mod_base = OTHER; note = 2'-O-methylguanosine-3'-phosphate
  modified_base 19: mod_base = OTHER; note = 2'-O-methylguanosine-3'-phosphate
  modified_base 20: mod_base = OTHER; note = 2'-O-methyladenosine-3'-phosphate
  modified_base 21: mod_base = OTHER; note = 2'-O-methyladenosine
aggcctggagtttattcggaa

SEQ ID NO: 1709 - RNA, 23 nt, synthetic construct
  source 1..23: mol_type = other RNA
  modified_base 1: mod_base = OTHER; note = 5'-phosphate-2'-O-methyluridine-3'-phosphorothioate
  modified_base 2: mod_base = OTHER; note = 2'-fluorouridine-3'-phosphorothioate
  modified_base 3: mod_base = OTHER; note = 2'-O-methylcytidine-3'-phosphate
  modified_base 4: mod_base = OTHER; note = 2'-O-methylcytidine-3'-phosphate
  modified_base 5: mod_base = OTHER; note = 2'-O-methylguanosine-3'-phosphate
  modified_base 6: mod_base = OTHER; note = 2'-fluoroadenosine-3'-phosphate
  modified_base 7: mod_base = OTHER; note = 2'-O-methyladenosine-3'-phosphate
  modified_base 8: mod_base = OTHER; note = 2'-O-methyluridine-3'-phosphate
  modified_base 9: mod_base = OTHER; note = 2'-O-methyladenosine-3'-phosphate
  modified_base 10: mod_base = OTHER; note = 2'-O-methyladenosine-3'-phosphate
  modified_base 11: mod_base = OTHER; note = 2'-O-methyladenosine-3'-phosphate
  modified_base 12: mod_base = OTHER; note = 2'-O-methylcytidine-3'-phosphate
  modified_base 13: mod_base = OTHER; note = 2'-O-methyluridine-3'-phosphate
  modified_base 14: mod_base = OTHER; note = 2'-fluorocytidine-3'-phosphate
  modified_base 15: mod_base = OTHER; note = 2'-O-methylcytidine-3'-phosphate
  modified_base 16: mod_base = OTHER; note = 2'-fluoroadenosine-3'-phosphate
  modified_base 17: mod_base = OTHER; note = 2'-O-methylguanosine-3'-phosphate
  modified_base 18: mod_base = OTHER; note = 2'-O-methylguanosine-3'-phosphate
  modified_base 19: mod_base = OTHER; note = 2'-O-methylcytidine-3'-phosphate
  modified_base 20: mod_base = OTHER; note = 2'-O-methylcytidine-3'-phosphate
  modified_base 21: mod_base = OTHER; note = 2'-O-methyluridine-3'-phosphorothioate
  modified_base 22: mod_base = OTHER; note = 2'-O-methyladenosine-3'-phosphorothioate
  modified_base 23: mod_base = OTHER; note = 2'-O-methyluridine
ttccgaataaactccaggcctat

SEQ ID NO: 1710 - RNA, 19 nt, synthetic construct
  source 1..19: mol_type = other RNA
ctgttttgcttttgtaact

SEQ ID NO: 1711 - RNA, 21 nt, synthetic construct
  source 1..21: mol_type = other RNA
agttacaaaagcaaaacaggt

SEQ ID NO: 1712 - RNA, 21 nt, synthetic construct
  source 1..21: mol_type = other RNA
acctgttttgcttttgtaact

SEQ ID NO: 1713 - RNA, 23 nt, synthetic construct
  source 1..23: mol_type = other RNA
agttacaaaagcaaaacaggtct

SEQ ID NO: 1714 - RNA, 19 nt, synthetic construct
  source 1..19: mol_type = other RNA
  modified_base 1: mod_base = OTHER; note = 2'-O-methylcytidine-3'-phosphate
  modified_base 2: mod_base = OTHER; note = 2'-O-methyluridine-3'-phosphate
  modified_base 3: mod_base = OTHER; note = 2'-O-methylguanosine-3'-phosphate
  modified_base 4: mod_base = OTHER; note = 2'-O-methyluridine-3'-phosphate
  modified_base 5: mod_base = OTHER; note = 2'-O-methyluridine-3'-phosphate
  modified_base 6: mod_base = OTHER; note = 2'-O-methyluridine-3'-phosphate
  modified_base 7: mod_base = OTHER; note = 2'-fluorouridine-3'-phosphate
  modified_base 8: mod_base = OTHER; note = 2'-fluoroguanosine-3'-phosphate
  modified_base 9: mod_base = OTHER; note = 2'-fluorocytidine-3'-phosphate
  modified_base 10: mod_base = OTHER; note = 2'-O-methyluridine-3'-phosphate
  modified_base 11: mod_base = OTHER; note = 2'-O-methyluridine-3'-phosphate
  modified_base 12: mod_base = OTHER; note = 2'-O-methyluridine-3'-phosphate
  modified_base 13: mod_base = OTHER; note = 2'-O-methyluridine-3'-phosphate
  modified_base 14: mod_base = OTHER; note = 2'-O-methylguanosine-3'-phosphate
  modified_base 15: mod_base = OTHER; note = 2'-O-methyluridine-3'-phosphate
  modified_base 16: mod_base = OTHER; note = 2'-O-methyladenosine-3'-phosphate
  modified_base 17: mod_base = OTHER; note = 2'-O-methyladenosine-3'-phosphate
  modified_base 18: mod_base = OTHER; note = 2'-O-methylcytidine-3'-phosphate
  modified_base 19: mod_base = OTHER; note = 2'-O-methyluridine-3'-phosphate
ctgttttgcttttgtaact

SEQ ID NO: 1715 - RNA, 21 nt, synthetic construct
  source 1..21: mol_type = other RNA
  modified_base 1: mod_base = OTHER; note = 2'-O-methyladenosine-3'-phosphate
  modified_base 2: mod_base = OTHER; note = 2'-fluoroguanosine-3'-phosphate
  modified_base 3: mod_base = OTHER; note = 2'-O-methyluridine-3'-phosphate
  modified_base 4: mod_base = OTHER; note = 2'-O-methyluridine-3'-phosphate
  modified_base 5: mod_base = OTHER; note = 2'-O-methyladenosine-3'-phosphate
  modified_base 6: mod_base = OTHER; note = 2'-fluorocytidine-3'-phosphate
  modified_base 7: mod_base = OTHER; note = 2'-O-methyladenosine-3'-phosphate
  modified_base 8: mod_base = OTHER; note = 2'-O-methyladenosine-3'-phosphate
  modified_base 9: mod_base = OTHER; note = 2'-O-methyladenosine-3'-phosphate
  modified_base 10: mod_base = OTHER; note = 2'-O-methyladenosine-3'-phosphate
  modified_base 11: mod_base = OTHER; note = 2'-O-methylguanosine-3'-phosphate
  modified_base 12: mod_base = OTHER; note = 2'-O-methylcytidine-3'-phosphate
  modified_base 13: mod_base = OTHER; note = 2'-O-methyladenosine-3'-phosphate
  modified_base 14: mod_base = OTHER; note = 2'-fluoroadenosine-3'-phosphate
  modified_base 15: mod_base = OTHER; note = 2'-O-methyladenosine-3'-phosphate
  modified_base 16: mod_base = OTHER; note = 2'-fluoroadenosine-3'-phosphate
  modified_base 17: mod_base = OTHER; note = 2'-O-methylcytidine-3'-phosphate
  modified_base 18: mod_base = OTHER; note = 2'-O-methyladenosine-3'-phosphate
  modified_base 19: mod_base = OTHER; note = 2'-O-methylguanosine-3'-phosphate
  modified_base 20: mod_base = OTHER; note = 2'-O-methylguanosine-3'-phosphate
  modified_base 21: mod_base = OTHER; note = 2'-O-methyluridine
agttacaaaagcaaaacaggt

SEQ ID NO: 1716 - RNA, 19 nt, synthetic construct
  source 1..19: mol_type = other RNA
  modified_base 1: mod_base = OTHER; note = 2'-O-methylcytidine-3'-phosphate
  modified_base 2: mod_base = OTHER; note = 2'-O-methyluridine-3'-phosphate
  modified_base 3: mod_base = OTHER; note = 2'-O-methylguanosine-3'-phosphate
  modified_base 4: mod_base = OTHER; note = 2'-O-methyluridine-3'-phosphate
  modified_base 5: mod_base = OTHER; note = 2'-fluorouridine-3'-phosphate
  modified_base 6: mod_base = OTHER; note = 2'-O-methyluridine-3'-phosphate
  modified_base 7: mod_base = OTHER; note = 2'-fluorouridine-3'-phosphate
  modified_base 8: mod_base = OTHER; note = 2'-fluoroguanosine-3'-phosphate
  modified_base 9: mod_base = OTHER; note = 2'-fluorocytidine-3'-phosphate
  modified_base 10: mod_base = OTHER; note = 2'-O-methyluridine-3'-phosphate
  modified_base 11: mod_base = OTHER; note = 2'-O-methyluridine-3'-phosphate
  modified_base 12: mod_base = OTHER; note = 2'-O-methyluridine-3'-phosphate
  modified_base 13: mod_base = OTHER; note = 2'-O-methyluridine-3'-phosphate
  modified_base 14: mod_base = OTHER; note = 2'-O-methylguanosine-3'-phosphate
  modified_base 15: mod_base = OTHER; note = 2'-O-methyluridine-3'-phosphate
  modified_base 16: mod_base = OTHER; note = 2'-O-methyladenosine-3'-phosphate
  modified_base 17: mod_base = OTHER; note = 2'-O-methyladenosine-3'-phosphate
  modified_base 18: mod_base = OTHER; note = 2'-O-methylcytidine-3'-phosphate
  modified_base 19: mod_base = OTHER; note = 2'-O-methyluridine
ctgttttgcttttgtaact

SEQ ID NO: 1717 - RNA, 21 nt, synthetic construct
  source 1..21: mol_type = other RNA
  modified_base 1: mod_base = OTHER; note = 2'-O-methyladenosine-3'-phosphate
  modified_base 2: mod_base = OTHER; note = 2'-fluoroguanosine-3'-phosphate
  modified_base 3: mod_base = OTHER; note = 2'-O-methyluridine-3'-phosphate
  modified_base 4: mod_base = OTHER; note = 2'-O-methyluridine-3'-phosphate
  modified_base 5: mod_base = OTHER; note = 2'-O-methyladenosine-3'-phosphate
  modified_base 6: mod_base = OTHER; note = 2'-fluorocytidine-3'-phosphate
  modified_base 7: mod_base = OTHER; note = 2'-O-methyladenosine-3'-phosphate
  modified_base 8: mod_base = OTHER; note = 2'-fluoroadenosine-3'-phosphate
  modified_base 9: mod_base = OTHER; note = 2'-fluoroadenosine-3'-phosphate
  modified_base 10: mod_base = OTHER; note = 2'-O-methyladenosine-3'-phosphate
  modified_base 11: mod_base = OTHER; note = 2'-O-methylguanosine-3'-phosphate
  modified_base 12: mod_base = OTHER; note = 2'-O-methylcytidine-3'-phosphate
  modified_base 13: mod_base = OTHER; note = 2'-O-methyladenosine-3'-phosphate
  modified_base 14: mod_base = OTHER; note = 2'-fluoroadenosine-3'-phosphate
  modified_base 15: mod_base = OTHER; note = 2'-O-methyladenosine-3'-phosphate
  modified_base 16: mod_base = OTHER; note = 2'-fluoroadenosine-3'-phosphate
  modified_base 17: mod_base = OTHER; note = 2'-O-methylcytidine-3'-phosphate
  modified_base 18: mod_base = OTHER; note = 2'-O-methyladenosine-3'-phosphate
  modified_base 19: mod_base = OTHER; note = 2'-O-methylguanosine-3'-phosphate
  modified_base 20: mod_base = OTHER; note = 2'-O-methylguanosine-3'-phosphate
  modified_base 21: mod_base = OTHER; note = 2'-O-methyluridine
agttacaaaagcaaaacaggt

SEQ ID NO: 1718 - RNA, 19 nt, synthetic construct
  source 1..19: mol_type = other RNA
  modified_base 1: mod_base = OTHER; note = 2'-O-methylcytidine-3'-phosphate
  modified_base 2: mod_base = OTHER; note = 2'-O-methyluridine-3'-phosphate
  modified_base 3: mod_base = OTHER; note = 2'-O-methylguanosine-3'-phosphate
  modified_base 4: mod_base = OTHER; note = 2'-O-methyluridine-3'-phosphate
  modified_base 5: mod_base = OTHER; note = 2'-fluorouridine-3'-phosphate
  modified_base 6: mod_base = OTHER; note = 2'-O-methyluridine-3'-phosphate
  modified_base 7: mod_base = OTHER; note = 2'-fluorouridine-3'-phosphate
  modified_base 8: mod_base = OTHER; note = 2'-fluoroguanosine-3'-phosphate
  modified_base 9: mod_base = OTHER; note = 2'-fluorocytidine-3'-phosphate
  modified_base 10: mod_base = OTHER; note = 2'-O-methyluridine-3'-phosphate
  modified_base 11: mod_base = OTHER; note = 2'-O-methyluridine-3'-phosphate
  modified_base 12: mod_base = OTHER; note = 2'-O-methyluridine-3'-phosphate
  modified_base 13: mod_base = OTHER; note = 2'-O-methyluridine-3'-phosphate
  modified_base 14: mod_base = OTHER; note = 2'-O-methylguanosine-3'-phosphate
  modified_base 15: mod_base = OTHER; note = 2'-O-methyluridine-3'-phosphate
  modified_base 16: mod_base = OTHER; note = 2'-O-methyladenosine-3'-phosphate
  modified_base 17: mod_base = OTHER; note = 2'-O-methyladenosine-3'-phosphate
  modified_base 18: mod_base = OTHER; note = 2'-O-methylcytidine-3'-phosphate
  modified_base 19: mod_base = OTHER; note = 2'-O-methyluridine
ctgttttgcttttgtaact

SEQ ID NO: 1719 - RNA, 21 nt, synthetic construct
  source 1..21: mol_type = other RNA
  modified_base 1: mod_base = OTHER; note = 2'-O-methyladenosine-3'-phosphate
  modified_base 2: mod_base = OTHER; note = 2'-fluoroguanosine-3'-phosphate
  modified_base 3: mod_base = OTHER; note = 2'-O-methyluridine-3'-phosphate
  modified_base 4: mod_base = OTHER; note = 2'-O-methyluridine-3'-phosphate
  modified_base 5: mod_base = OTHER; note = 2'-O-methyladenosine-3'-phosphate
  modified_base 6: mod_base = OTHER; note = 2'-fluorocytidine-3'-phosphate
  modified_base 7: mod_base = OTHER; note = 2'-O-methyladenosine-3'-phosphate
  modified_base 8: mod_base = OTHER; note = 2'-O-methyladenosine-3'-phosphate
  modified_base 9: mod_base = OTHER; note = 2'-O-methyladenosine-3'-phosphate
  modified_base 10: mod_base = OTHER; note = 2'-O-methyladenosine-3'-phosphate
  modified_base 11: mod_base = OTHER; note = 2'-O-methylguanosine-3'-phosphate
  modified_base 12: mod_base = OTHER; note = 2'-O-methylcytidine-3'-phosphate
  modified_base 13: mod_base = OTHER; note = 2'-O-methyladenosine-3'-phosphate
  modified_base 14: mod_base = OTHER; note = 2'-fluoroadenosine-3'-phosphate
  modified_base 15: mod_base = OTHER; note = 2'-O-methyladenosine-3'-phosphate
  modified_base 16: mod_base = OTHER; note = 2'-fluoroadenosine-3'-phosphate
  modified_base 17: mod_base = OTHER; note = 2'-O-methylcytidine-3'-phosphate
  modified_base 18: mod_base = OTHER; note = 2'-O-methyladenosine-3'-phosphate
  modified_base 19: mod_base = OTHER; note = 2'-O-methylguanosine-3'-phosphate
  modified_base 20: mod_base = OTHER; note = 2'-O-methylguanosine-3'-phosphate
  modified_base 21: mod_base = OTHER; note = 2'-O-methyluridine
agttacaaaagcaaaacaggt

SEQ ID NO: 1720 - RNA, 21 nt, synthetic construct
  source 1..21: mol_type = other RNA
  modified_base 1: mod_base = OTHER; note = 2'-O-methyladenosine-3'-phosphate
  modified_base 2: mod_base = OTHER; note = 2'-O-methylcytidine-3'-phosphate
  modified_base 3: mod_base = OTHER; note = 2'-O-methylcytidine-3'-phosphate
  modified_base 4: mod_base = OTHER; note = 2'-O-methyluridine-3'-phosphate
  modified_base 5: mod_base = OTHER; note = 2'-O-methylguanosine-3'-phosphate
  modified_base 6: mod_base = OTHER; note = 2'-O-methyluridine-3'-phosphate
  modified_base 7: mod_base = OTHER; note = 2'-O-methyluridine-3'-phosphate
  modified_base 8: mod_base = OTHER; note = 2'-O-methyluridine-3'-phosphate
  modified_base 9: mod_base = OTHER; note = 2'-fluorouridine-3'-phosphate
  modified_base 10: mod_base = OTHER; note = 2'-fluoroguanosine-3'-phosphate
  modified_base 11: mod_base = OTHER; note = 2'-fluorocytidine-3'-phosphate
  modified_base 12: mod_base = OTHER; note = 2'-O-methyluridine-3'-phosphate
  modified_base 13: mod_base = OTHER; note = 2'-O-methyluridine-3'-phosphate
  modified_base 14: mod_base = OTHER; note = 2'-O-methyluridine-3'-phosphate
  modified_base 15: mod_base = OTHER; note = 2'-O-methyluridine-3'-phosphate
  modified_base 16: mod_base = OTHER; note = 2'-O-methylguanosine-3'-phosphate
  modified_base 17: mod_base = OTHER; note = 2'-O-methyluridine-3'-phosphate
  modified_base 18: mod_base = OTHER; note = 2'-O-methyladenosine-3'-phosphate
  modified_base 19: mod_base = OTHER; note = 2'-O-methyladenosine-3'-phosphate
  modified_base 20: mod_base = OTHER; note = 2'-O-methylcytidine-3'-phosphate
  modified_base 21: mod_base = OTHER; note = 2'-O-methyluridine
acctgttttgcttttgtaact

SEQ ID NO: 1721 - RNA, 23 nt, synthetic construct
  source 1..23: mol_type = other RNA
  modified_base 1: mod_base = OTHER; note = 2'-O-methyladenosine-3'-phosphate
  modified_base 2: mod_base = OTHER; note = 2'-fluoroguanosine-3'-phosphate
  modified_base 3: mod_base = OTHER; note = 2'-O-methyluridine-3'-phosphate
  modified_base 4: mod_base = OTHER; note = 2'-O-methyluridine-3'-phosphate
  modified_base 5: mod_base = OTHER; note = 2'-O-methyladenosine-3'-phosphate
  modified_base 6: mod_base = OTHER; note = 2'-fluorocytidine-3'-phosphate
  modified_base 7: mod_base = OTHER; note = 2'-O-methyladenosine-3'-phosphate
  modified_base 8: mod_base = OTHER; note = 2'-O-methyladenosine-3'-phosphate
  modified_base 9: mod_base = OTHER; note = 2'-O-methyladenosine-3'-phosphate
  modified_base 10: mod_base = OTHER; note = 2'-O-methyladenosine-3'-phosphate
  modified_base 11: mod_base = OTHER; note = 2'-O-methylguanosine-3'-phosphate
  modified_base 12: mod_base = OTHER; note = 2'-O-methylcytidine-3'-phosphate
  modified_base 13: mod_base = OTHER; note = 2'-O-methyladenosine-3'-phosphate
  modified_base 14: mod_base = OTHER; note = 2'-fluoroadenosine-3'-phosphate
  modified_base 15: mod_base = OTHER; note = 2'-O-methyladenosine-3'-phosphate
  modified_base 16: mod_base = OTHER; note = 2'-fluoroadenosine-3'-phosphate
  modified_base 17: mod_base = OTHER; note = 2'-O-methylcytidine-3'-phosphate
  modified_base 18: mod_base = OTHER; note = 2'-O-methyladenosine-3'-phosphate
  modified_base 19: mod_base = OTHER; note = 2'-O-methylguanosine-3'-phosphate
  modified_base 20: mod_base = OTHER; note = 2'-O-methylguanosine-3'-phosphate
  modified_base 21: mod_base = OTHER; note = 2'-O-methyluridine-3'-phosphate
  modified_base 22: mod_base = OTHER; note = 2'-O-methylcytidine-3'-phosphate
  modified_base 23: mod_base = OTHER; note = 2'-O-methyluridine
agttacaaaagcaaaacaggtct

SEQ ID NO: 1722 - RNA, 21 nt, synthetic construct
  source 1..21: mol_type = other RNA
  modified_base 1: mod_base = OTHER; note = 2'-O-methyladenosine-3'-phosphate
  modified_base 2: mod_base = OTHER; note = 2'-O-methylcytidine-3'-phosphate
  modified_base 3: mod_base = OTHER; note = 2'-O-methylcytidine-3'-phosphate
  modified_base 4: mod_base = OTHER; note = 2'-O-methyluridine-3'-phosphate
  modified_base 5: mod_base = OTHER; note = 2'-O-methylguanosine-3'-phosphate
  modified_base 6: mod_base = OTHER; note = 2'-O-methyluridine-3'-phosphate
  modified_base 7: mod_base = OTHER; note = 2'-fluorouridine-3'-phosphate
  modified_base 8: mod_base = OTHER; note = 2'-O-methyluridine-3'-phosphate
  modified_base 9: mod_base = OTHER; note = 2'-fluorouridine-3'-phosphate
  modified_base 10: mod_base = OTHER; note = 2'-fluoroguanosine-3'-phosphate
  modified_base 11: mod_base = OTHER; note = 2'-fluorocytidine-3'-phosphate
  modified_base 12: mod_base = OTHER; note = 2'-O-methyluridine-3'-phosphate
  modified_base 13: mod_base = OTHER; note = 2'-O-methyluridine-3'-phosphate
  modified_base 14: mod_base = OTHER; note = 2'-O-methyluridine-3'-phosphate
  modified_base 15: mod_base = OTHER; note = 2'-O-methyluridine-3'-phosphate
  modified_base 16: mod_base = OTHER; note = 2'-O-methylguanosine-3'-phosphate
  modified_base 17: mod_base = OTHER; note = 2'-O-methyluridine-3'-phosphate
  modified_base 18: mod_base = OTHER; note = 2'-O-methyladenosine-3'-phosphate
  modified_base 19: mod_base = OTHER; note = 2'-O-methyladenosine-3'-phosphate
  modified_base 20: mod_base = OTHER; note = 2'-O-methylcytidine-3'-phosphate
  modified_base 21: mod_base = OTHER; note = 2'-O-methyluridine
acctgttttgcttttgtaact

SEQ ID NO: 1723 - RNA, 23 nt, synthetic construct
  source 1..23: mol_type = other RNA
  modified_base 1: mod_base = OTHER; note = 2'-O-methyladenosine-3'-phosphate
  modified_base 2: mod_base = OTHER; note = 2'-fluoroguanosine-3'-phosphate
  modified_base 3: mod_base = OTHER; note = 2'-O-methyluridine-3'-phosphate
  modified_base 4: mod_base = OTHER; note = 2'-O-methyluridine-3'-phosphate
  modified_base 5: mod_base = OTHER; note = 2'-O-methyladenosine-3'-phosphate
  modified_base 6: mod_base = OTHER; note = 2'-fluorocytidine-3'-phosphate
  modified_base 7: mod_base = OTHER; note = 2'-O-methyladenosine-3'-phosphate
  modified_base 8: mod_base = OTHER; note = 2'-fluoroadenosine-3'-phosphate
  modified_base 9: mod_base = OTHER; note = 2'-fluoroadenosine-3'-phosphate
  modified_base 10: mod_base = OTHER; note = 2'-O-methyladenosine-3'-phosphate
  modified_base 11: mod_base = OTHER; note = 2'-O-methylguanosine-3'-phosphate
  modified_base 12: mod_base = OTHER; note = 2'-O-methylcytidine-3'-phosphate
  modified_base 13: mod_base = OTHER; note = 2'-O-methyladenosine-3'-phosphate
  modified_base 14: mod_base = OTHER; note = 2'-fluoroadenosine-3'-phosphate
  modified_base 15: mod_base = OTHER; note = 2'-O-methyladenosine-3'-phosphate
  modified_base 16: mod_base = OTHER; note = 2'-fluoroadenosine-3'-phosphate
  modified_base 17: mod_base = OTHER; note = 2'-O-methylcytidine-3'-phosphate
  modified_base 18: mod_base = OTHER; note = 2'-O-methyladenosine-3'-phosphate
  modified_base 19: mod_base = OTHER; note = 2'-O-methylguanosine-3'-phosphate
  modified_base 20: mod_base = OTHER; note = 2'-O-methylguanosine-3'-phosphate
  modified_base 21: mod_base = OTHER; note = 2'-O-methyluridine-3'-phosphate
  modified_base 22: mod_base = OTHER; note = 2'-O-methylcytidine-3'-phosphate
  modified_base 23: mod_base = OTHER; note = 2'-O-methyluridine
agttacaaaagcaaaacaggtct

SEQ ID NO: 1724 - RNA, 21 nt, synthetic construct
  source 1..21: mol_type = other RNA
  modified_base 1: mod_base = OTHER; note = 2'-O-methyladenosine-3'-phosphate
  modified_base 2: mod_base = OTHER; note = 2'-O-methylcytidine-3'-phosphate
  modified_base 3: mod_base = OTHER; note = 2'-O-methylcytidine-3'-phosphate
  modified_base 4: mod_base = OTHER; note = 2'-O-methyluridine-3'-phosphate
  modified_base 5: mod_base = OTHER; note = 2'-O-methylguanosine-3'-phosphate
  modified_base 6: mod_base = OTHER; note = 2'-O-methyluridine-3'-phosphate
  modified_base 7: mod_base = OTHER; note = 2'-fluorouridine-3'-phosphate
  modified_base 8: mod_base = OTHER; note = 2'-O-methyluridine-3'-phosphate
  modified_base 9: mod_base = OTHER; note = 2'-fluorouridine-3'-phosphate
  modified_base 10: mod_base = OTHER; note = 2'-fluoroguanosine-3'-phosphate
  modified_base 11: mod_base = OTHER; note = 2'-fluorocytidine-3'-phosphate
  modified_base 12: mod_base = OTHER; note = 2'-O-methyluridine-3'-phosphate
  modified_base 13: mod_base = OTHER; note = 2'-O-methyluridine-3'-phosphate
  modified_base 14: mod_base = OTHER; note = 2'-O-methyluridine-3'-phosphate
  modified_base 15: mod_base = OTHER; note = 2'-O-methyluridine-3'-phosphate
  modified_base 16: mod_base = OTHER; note = 2'-O-methylguanosine-3'-phosphate
  modified_base 17: mod_base = OTHER; note = 2'-O-methyluridine-3'-phosphate
  modified_base 18: mod_base = OTHER; note = 2'-O-methyladenosine-3'-phosphate
  modified_base 19: mod_base = OTHER; note = 2'-O-methyladenosine-3'-phosphate
  modified_base 20: mod_base = OTHER; note = 2'-O-methylcytidine-3'-phosphate
  modified_base 21: mod_base = OTHER; note = 2'-O-methyluridine
acctgttttgcttttgtaact

SEQ ID NO: 1725 - RNA, 23 nt, synthetic construct
  source 1..23: mol_type = other RNA
  modified_base 1: mod_base = OTHER; note = 2'-O-methyladenosine-3'-phosphate
  modified_base 2: mod_base = OTHER; note = 2'-fluoroguanosine-3'-phosphate
  modified_base 3: mod_base = OTHER; note = 2'-O-methyluridine-3'-phosphate
  modified_base 4: mod_base = OTHER; note = 2'-O-methyluridine-3'-phosphate
  modified_base 5: mod_base = OTHER; note = 2'-O-methyladenosine-3'-phosphate
  modified_base 6: mod_base = OTHER; note = 2'-fluorocytidine-3'-phosphate
  modified_base 7: mod_base = OTHER; note = 2'-O-methyladenosine-3'-phosphate
  modified_base 8: mod_base = OTHER; note = 2'-O-methyladenosine-3'-phosphate
  modified_base 9: mod_base = OTHER; note = 2'-O-methyladenosine-3'-phosphate
  modified_base 10: mod_base = OTHER; note = 2'-O-methyladenosine-3'-phosphate
  modified_base 11: mod_base = OTHER; note = 2'-O-methylguanosine-3'-phosphate
  modified_base 12: mod_base = OTHER; note = 2'-O-methylcytidine-3'-phosphate
  modified_base 13: mod_base = OTHER; note = 2'-O-methyladenosine-3'-phosphate
  modified_base 14: mod_base = OTHER; note = 2'-fluoroadenosine-3'-phosphate
  modified_base 15: mod_base = OTHER; note = 2'-O-methyladenosine-3'-phosphate
  modified_base 16: mod_base = OTHER; note = 2'-fluoroadenosine-3'-phosphate
  modified_base 17: mod_base = OTHER; note = 2'-O-methylcytidine-3'-phosphate
  modified_base 18: mod_base = OTHER; note = 2'-O-methyladenosine-3'-phosphate
  modified_base 19: mod_base = OTHER; note = 2'-O-methylguanosine-3'-phosphate
  modified_base 20: mod_base = OTHER; note = 2'-O-methylguanosine-3'-phosphate
  modified_base 21: mod_base = OTHER; note = 2'-O-methyluridine-3'-phosphate
  modified_base 22: mod_base = OTHER; note = 2'-O-methylcytidine-3'-phosphate
  modified_base 23: mod_base = OTHER; note = 2'-O-methyluridine
agttacaaaagcaaaacaggtct

SEQ ID NO: 1726 - RNA, 19 nt, synthetic construct
  source 1..19: mol_type = other RNA
  modified_base 1: mod_base = OTHER; note = 2'-O-methylcytidine-3'-phosphorothioate
  modified_base 2: mod_base = OTHER; note = 2'-O-methyluridine-3'-phosphorothioate
  modified_base 3: mod_base = OTHER; note = 2'-O-methylguanosine-3'-phosphate
  modified_base 4: mod_base = OTHER; note = 2'-O-methyluridine-3'-phosphate
  modified_base 5: mod_base = OTHER; note = 2'-O-methyluridine-3'-phosphate
  modified_base 6: mod_base = OTHER; note = 2'-O-methyluridine-3'-phosphate
  modified_base 7: mod_base = OTHER; note = 2'-fluorouridine-3'-phosphate
  modified_base 8: mod_base = OTHER; note = 2'-fluoroguanosine-3'-phosphate
  modified_base 9: mod_base = OTHER; note = 2'-fluorocytidine-3'-phosphate
  modified_base 10: mod_base = OTHER; note = 2'-O-methyluridine-3'-phosphate
  modified_base 11: mod_base = OTHER; note = 2'-O-methyluridine-3'-phosphate
  modified_base 12: mod_base = OTHER; note = 2'-O-methyluridine-3'-phosphate
  modified_base 13: mod_base = OTHER; note = 2'-O-methyluridine-3'-phosphate
  modified_base 14: mod_base = OTHER; note = 2'-O-methylguanosine-3'-phosphate
  modified_base 15: mod_base = OTHER; note = 2'-O-methyluridine-3'-phosphate
  modified_base 16: mod_base = OTHER; note = 2'-O-methyladenosine-3'-phosphate
  modified_base 17: mod_base = OTHER; note = 2'-O-methyladenosine-3'-phosphate
  modified_base 18: mod_base = OTHER; note = 2'-O-methylcytidine-3'-phosphate
  modified_base 19: mod_base = OTHER; note = 2'-O-methyluridine
ctgttttgcttttgtaact

SEQ ID NO: 1727 - RNA, 21 nt, synthetic construct
  source 1..21: mol_type = other RNA
  modified_base 1: mod_base = OTHER; note = 2'-O-methyladenosine-3'-phosphorothioate
  modified_base 2: mod_base = OTHER; note = 2'-fluoroguanosine-3'-phosphorothioate
  modified_base 3: mod_base = OTHER; note = 2'-O-methyluridine-3'-phosphate
  modified_base 4: mod_base = OTHER; note = 2'-O-methyluridine-3'-phosphate
  modified_base 5: mod_base = OTHER; note = 2'-O-methyladenosine-3'-phosphate
  modified_base 6: mod_base = OTHER; note = 2'-fluorocytidine-3'-phosphate
  modified_base 7: mod_base = OTHER; note = 2'-O-methyladenosine-3'-phosphate
  modified_base 8: mod_base = OTHER; note = 2'-O-methyladenosine-3'-phosphate
  modified_base 9: mod_base = OTHER; note = 2'-O-methyladenosine-3'-phosphate
  modified_base 10: mod_base = OTHER; note = 2'-O-methyladenosine-3'-phosphate
  modified_base 11: mod_base = OTHER; note = 2'-O-methylguanosine-3'-phosphate
  modified_base 12: mod_base = OTHER; note = 2'-O-methylcytidine-3'-phosphate
  modified_base 13: mod_base = OTHER; note = 2'-O-methyladenosine-3'-phosphate
  modified_base 14: mod_base = OTHER; note = 2'-fluoroadenosine-3'-phosphate
  modified_base 15: mod_base = OTHER; note = 2'-O-methyladenosine-3'-phosphate
  modified_base 16: mod_base = OTHER; note = 2'-fluoroadenosine-3'-phosphate
  modified_base 17: mod_base = OTHER; note = 2'-O-methylcytidine-3'-phosphate
  modified_base 18: mod_base = OTHER; note = 2'-O-methyladenosine-3'-phosphate
  modified_base 19: mod_base = OTHER; note = 2'-O-methylguanosine-3'-phosphorothioate
  modified_base 20: mod_base = OTHER; note = 2'-O-methylguanosine-3'-phosphorothioate
  modified_base 21: mod_base = OTHER; note = 2'-O-methyluridine
agttacaaaagcaaaacaggt

SEQ ID NO: 1728 - RNA, 19 nt, synthetic construct
  source 1..19: mol_type = other RNA
  modified_base 1: mod_base = OTHER; note = 2'-O-methylcytidine-3'-phosphorothioate
  modified_base 2: mod_base = OTHER; note = 2'-O-methyluridine-3'-phosphorothioate
  modified_base 3: mod_base = OTHER; note = 2'-O-methylguanosine-3'-phosphate
  modified_base 4: mod_base = OTHER; note = 2'-O-methyluridine-3'-phosphate
  modified_base 5: mod_base = OTHER; note = 2'-fluorouridine-3'-phosphate
  modified_base 6: mod_base = OTHER; note = 2'-O-methyluridine-3'-phosphate
  modified_base 7: mod_base = OTHER; note = 2'-fluorouridine-3'-phosphate
  modified_base 8: mod_base = OTHER; note = 2'-fluoroguanosine-3'-phosphate
  modified_base 9: mod_base = OTHER; note = 2'-fluorocytidine-3'-phosphate
  modified_base 10: mod_base = OTHER; note = 2'-O-methyluridine-3'-phosphate
  modified_base 11: mod_base = OTHER; note = 2'-O-methyluridine-3'-phosphate
  modified_base 12: mod_base = OTHER; note = 2'-O-methyluridine-3'-phosphate
  modified_base 13: mod_base = OTHER; note = 2'-O-methyluridine-3'-phosphate
  modified_base 14: mod_base = OTHER; note = 2'-O-methylguanosine-3'-phosphate
  modified_base 15: mod_base = OTHER; note = 2'-O-methyluridine-3'-phosphate
  modified_base 16: mod_base = OTHER; note = 2'-O-methyladenosine-3'-phosphate
  modified_base 17: mod_base = OTHER; note = 2'-O-methyladenosine-3'-phosphate
  modified_base 18: mod_base = OTHER; note = 2'-O-methylcytidine-3'-phosphate
  modified_base 19: mod_base = OTHER; note = 2'-O-methyluridine
ctgttttgcttttgtaact

SEQ ID NO: 1729 - RNA, 21 nt, synthetic construct
  source 1..21: mol_type = other RNA
  modified_base 1: mod_base = OTHER; note = 2'-O-methyladenosine-3'-phosphorothioate
  modified_base 2: mod_base = OTHER; note = 2'-fluoroguanosine-3'-phosphorothioate
  modified_base 3: mod_base = OTHER; note = 2'-O-methyluridine-3'-phosphate
  modified_base 4: mod_base = OTHER; note = 2'-O-methyluridine-3'-phosphate
  modified_base 5: mod_base = OTHER; note = 2'-O-methyladenosine-3'-phosphate
  modified_base 6: mod_base = OTHER; note = 2'-fluorocytidine-3'-phosphate
  modified_base 7: mod_base = OTHER; note = 2'-O-methyladenosine-3'-phosphate
  modified_base 8: mod_base = OTHER; note = 2'-fluoroadenosine-3'-phosphate
  modified_base 9: mod_base = OTHER; note = 2'-fluoroadenosine-3'-phosphate
  modified_base 10: mod_base = OTHER; note = 2'-O-methyladenosine-3'-phosphate
  modified_base 11: mod_base = OTHER; note = 2'-O-methylguanosine-3'-phosphate
  modified_base 12: mod_base = OTHER; note = 2'-O-methylcytidine-3'-phosphate
  modified_base 13: mod_base = OTHER; note = 2'-O-methyladenosine-3'-phosphate
  modified_base 14: mod_base = OTHER; note = 2'-fluoroadenosine-3'-phosphate
  modified_base 15: mod_base = OTHER; note = 2'-O-methyladenosine-3'-phosphate
  modified_base 16: mod_base = OTHER; note = 2'-fluoroadenosine-3'-phosphate
  modified_base 17: mod_base = OTHER; note = 2'-O-methylcytidine-3'-phosphate
  modified_base 18: mod_base = OTHER; note = 2'-O-methyladenosine-3'-phosphate
  modified_base 19: mod_base = OTHER; note = 2'-O-methylguanosine-3'-phosphorothioate
  modified_base 20: mod_base = OTHER; note = 2'-O-methylguanosine-3'-phosphorothioate
  modified_base 21: mod_base = OTHER; note = 2'-O-methyluridine
agttacaaaagcaaaacaggt

SEQ ID NO: 1730 - RNA, 19 nt, synthetic construct
  source 1..19: mol_type = other RNA
  modified_base 1: mod_base = OTHER; note = 2'-O-methylcytidine-3'-phosphorothioate
  modified_base 2: mod_base = OTHER; note = 2'-O-methyluridine-3'-phosphorothioate
  modified_base 3: mod_base = OTHER; note = 2'-O-methylguanosine-3'-phosphate
  modified_base 4: mod_base = OTHER; note = 2'-O-methyluridine-3'-phosphate
  modified_base 5: mod_base = OTHER; note = 2'-fluorouridine-3'-phosphate
  modified_base 6: mod_base = OTHER; note = 2'-O-methyluridine-3'-phosphate
  modified_base 7: mod_base = OTHER; note = 2'-fluorouridine-3'-phosphate
  modified_base 8: mod_base = OTHER; note = 2'-fluoroguanosine-3'-phosphate
  modified_base 9: mod_base = OTHER; note = 2'-fluorocytidine-3'-phosphate
  modified_base 10: mod_base = OTHER; note = 2'-O-methyluridine-3'-phosphate
  modified_base 11: mod_base = OTHER; note = 2'-O-methyluridine-3'-phosphate
  modified_base 12: mod_base = OTHER; note = 2'-O-methyluridine-3'-phosphate
  modified_base 13: mod_base = OTHER; note = 2'-O-methyluridine-3'-phosphate
  modified_base 14: mod_base = OTHER; note = 2'-O-methylguanosine-3'-phosphate
  modified_base 15: mod_base = OTHER; note = 2'-O-methyluridine-3'-phosphate
  modified_base 16: mod_base = OTHER; note = 2'-O-methyladenosine-3'-phosphate
  modified_base 17: mod_base = OTHER; note = 2'-O-methyladenosine-3'-phosphate
  modified_base 18: mod_base = OTHER; note = 2'-O-methylcytidine-3'-phosphate
  modified_base 19: mod_base = OTHER; note = 2'-O-methyluridine
ctgttttgcttttgtaact

SEQ ID NO: 1731 - RNA, 21 nt, synthetic construct
  source 1..21: mol_type = other RNA
  modified_base 1: mod_base = OTHER; note = 2'-O-methyladenosine-3'-phosphorothioate
  modified_base 2: mod_base = OTHER; note = 2'-fluoroguanosine-3'-phosphorothioate
  modified_base 3: mod_base = OTHER; note = 2'-O-methyluridine-3'-phosphate
  modified_base 4: mod_base = OTHER; note = 2'-O-methyluridine-3'-phosphate
  modified_base 5: mod_base = OTHER; note = 2'-O-methyladenosine-3'-phosphate
  modified_base 6: mod_base = OTHER; note = 2'-fluorocytidine-3'-phosphate
  modified_base 7: mod_base = OTHER; note = 2'-O-methyladenosine-3'-phosphate
  modified_base 8: mod_base = OTHER; note = 2'-O-methyladenosine-3'-phosphate
  modified_base 9: mod_base = OTHER; note = 2'-O-methyladenosine-3'-phosphate
  modified_base 10: mod_base = OTHER; note = 2'-O-methyladenosine-3'-phosphate
  modified_base 11: mod_base = OTHER; note = 2'-O-methylguanosine-3'-phosphate
  modified_base 12: mod_base = OTHER; note = 2'-O-methylcytidine-3'-phosphate
  modified_base 13: mod_base = OTHER; note = 2'-O-methyladenosine-3'-phosphate
  modified_base 14: mod_base = OTHER; note = 2'-fluoroadenosine-3'-phosphate
  modified_base 15: mod_base = OTHER; note = 2'-O-methyladenosine-3'-phosphate
  modified_base 16: mod_base = OTHER; note = 2'-fluoroadenosine-3'-phosphate
  modified_base 17: mod_base = OTHER; note = 2'-O-methylcytidine-3'-phosphate
  modified_base 18: mod_base = OTHER; note = 2'-O-methyladenosine-3'-phosphate
  modified_base 19: mod_base = OTHER; note = 2'-O-methylguanosine-3'-phosphorothioate
  modified_base 20: mod_base = OTHER; note = 2'-O-methylguanosine-3'-phosphorothioate
  modified_base 21: mod_base = OTHER; note = 2'-O-methyluridine
agttacaaaagcaaaacaggt

SEQ ID NO: 1732 - RNA, 21 nt, synthetic construct
  source 1..21: mol_type = other RNA
  modified_base 1: mod_base = OTHER; note = 2'-O-methyladenosine-3'-phosphorothioate
  modified_base 2: mod_base = OTHER; note = 2'-O-methylcytidine-3'-phosphorothioate
  modified_base 3: mod_base = OTHER; note = 2'-O-methylcytidine-3'-phosphate
  modified_base 4: mod_base = OTHER; note = 2'-O-methyluridine-3'-phosphate
  modified_base 5: mod_base = OTHER; note = 2'-O-methylguanosine-3'-phosphate
  modified_base 6: mod_base = OTHER; note = 2'-O-methyluridine-3'-phosphate
  modified_base 7: mod_base = OTHER; note = 2'-O-methyluridine-3'-phosphate
  modified_base 8: mod_base = OTHER; note = 2'-O-methyluridine-3'-phosphate
  modified_base 9: mod_base = OTHER; note = 2'-fluorouridine-3'-phosphate
  modified_base 10: mod_base = OTHER; note = 2'-fluoroguanosine-3'-phosphate
  modified_base 11: mod_base = OTHER; note = 2'-fluorocytidine-3'-phosphate
  modified_base 12: mod_base = OTHER; note = 2'-O-methyluridine-3'-phosphate
  modified_base 13: mod_base = OTHER; note = 2'-O-methyluridine-3'-phosphate
  modified_base 14: mod_base = OTHER; note = 2'-O-methyluridine-3'-phosphate
  modified_base 15: mod_base = OTHER; note = 2'-O-methyluridine-3'-phosphate
  modified_base 16: mod_base = OTHER; note = 2'-O-methylguanosine-3'-phosphate
  modified_base 17: mod_base = OTHER; note = 2'-O-methyluridine-3'-phosphate
  modified_base 18: mod_base = OTHER; note = 2'-O-methyladenosine-3'-phosphate
  modified_base 19: mod_base = OTHER; note = 2'-O-methyladenosine-3'-phosphate
  modified_base 20: mod_base = OTHER; note = 2'-O-methylcytidine-3'-phosphate
  modified_base 21: mod_base = OTHER; note = 2'-O-methyluridine
acctgttttgcttttgtaact

SEQ ID NO: 1733 - RNA, 23 nt, synthetic construct
  source 1..23: mol_type = other RNA
  modified_base 1: mod_base = OTHER; note = 2'-O-methyladenosine-3'-phosphorothioate
  modified_base 2: mod_base = OTHER; note = 2'-fluoroguanosine-3'-phosphorothioate
  modified_base 3: mod_base = OTHER; note = 2'-O-methyluridine-3'-phosphate
  modified_base 4: mod_base = OTHER; note = 2'-O-methyluridine-3'-phosphate
  modified_base 5: mod_base = OTHER; note = 2'-O-methyladenosine-3'-phosphate
  modified_base 6: mod_base = OTHER; note = 2'-fluorocytidine-3'-phosphate
  modified_base 7: mod_base = OTHER; note = 2'-O-methyladenosine-3'-phosphate
  modified_base 8: mod_base = OTHER; note = 2'-O-methyladenosine-3'-phosphate
  modified_base 9: mod_base = OTHER; note = 2'-O-methyladenosine-3'-phosphate
  modified_base 10: mod_base = OTHER; note = 2'-O-methyladenosine-3'-phosphate
  modified_base 11: mod_base = OTHER; note = 2'-O-methylguanosine-3'-phosphate
  modified_base 12: mod_base = OTHER; note = 2'-O-methylcytidine-3'-phosphate
  modified_base 13: mod_base = OTHER; note = 2'-O-methyladenosine-3'-phosphate
  modified_base 14: mod_base = OTHER; note = 2'-fluoroadenosine-3'-phosphate
  modified_base 15: mod_base = OTHER; note = 2'-O-methyladenosine-3'-phosphate
  modified_base 16: mod_base = OTHER; note = 2'-fluoroadenosine-3'-phosphate
  modified_base 17: mod_base = OTHER; note = 2'-O-methylcytidine-3'-phosphate
  modified_base 18: mod_base = OTHER; note = 2'-O-methyladenosine-3'-phosphate
  modified_base 19: mod_base = OTHER; note = 2'-O-methylguanosine-3'-phosphate
  modified_base 20: mod_base = OTHER; note = 2'-O-methylguanosine-3'-phosphate
  modified_base 21: mod_base = OTHER; note = 2'-O-methyluridine-3'-phosphorothioate
  modified_base 22: mod_base = OTHER; note = 2'-O-methylcytidine-3'-phosphorothioate
  modified_base 23: mod_base = OTHER; note = 2'-O-methyluridine
agttacaaaagcaaaacaggtct

SEQ ID NO: 1734 - RNA, 21 nt, synthetic construct
  source 1..21: mol_type = other RNA
  modified_base 1: mod_base = OTHER; note = 2'-O-methyladenosine-3'-phosphorothioate
  modified_base 2: mod_base = OTHER; note = 2'-O-methylcytidine-3'-phosphorothioate
  modified_base 3: mod_base = OTHER; note = 2'-O-methylcytidine-3'-phosphate
  modified_base 4: mod_base = OTHER; note = 2'-O-methyluridine-3'-phosphate
  modified_base 5: mod_base = OTHER; note = 2'-O-methylguanosine-3'-phosphate
  modified_base 6: mod_base = OTHER; note = 2'-O-methyluridine-3'-phosphate
  modified_base 7: mod_base = OTHER; note = 2'-fluorouridine-3'-phosphate
  modified_base 8: mod_base = OTHER; note = 2'-O-methyluridine-3'-phosphate
  modified_base 9: mod_base = OTHER; note = 2'-fluorouridine-3'-phosphate
  modified_base 10: mod_base = OTHER; note = 2'-fluoroguanosine-3'-phosphate
  modified_base 11: mod_base = OTHER; note = 2'-fluorocytidine-3'-phosphate
  modified_base 12: mod_base = OTHER; note = 2'-O-methyluridine-3'-phosphate
  modified_base 13: mod_base = OTHER; note = 2'-O-methyluridine-3'-phosphate
  modified_base 14: mod_base = OTHER; note = 2'-O-methyluridine-3'-phosphate
  modified_base 15: mod_base = OTHER; note = 2'-O-methyluridine-3'-phosphate
  modified_base 16: mod_base = OTHER; note = 2'-O-methylguanosine-3'-phosphate
  modified_base 17: mod_base = OTHER; note = 2'-O-methyluridine-3'-phosphate
  modified_base 18: mod_base = OTHER; note = 2'-O-methyladenosine-3'-phosphate
  modified_base 19: mod_base = OTHER; note = 2'-O-methyladenosine-3'-phosphate
  modified_base 20: mod_base = OTHER; note = 2'-O-methylcytidine-3'-phosphate
  modified_base 21: mod_base = OTHER; note = 2'-O-methyluridine
acctgttttgcttttgtaact

SEQ ID NO: 1735 - RNA, 23 nt, synthetic construct
  source 1..23: mol_type = other RNA
  modified_base 1: mod_base = OTHER; note = 2'-O-methyladenosine-3'-phosphorothioate
  modified_base 2: mod_base = OTHER; note = 2'-fluoroguanosine-3'-phosphorothioate
  modified_base 3: mod_base = OTHER; note = 2'-O-methyluridine-3'-phosphate
  modified_base 4: mod_base = OTHER; note = 2'-O-methyluridine-3'-phosphate
  modified_base 5: mod_base = OTHER; note = 2'-O-methyladenosine-3'-phosphate
  modified_base 6: mod_base = OTHER; note = 2'-fluorocytidine-3'-phosphate
  modified_base 7: mod_base = OTHER; note = 2'-O-methyladenosine-3'-phosphate
  modified_base 8: mod_base = OTHER; note = 2'-fluoroadenosine-3'-phosphate
  modified_base 9: mod_base = OTHER; note = 2'-fluoroadenosine-3'-phosphate
  modified_base 10: mod_base = OTHER; note = 2'-O-methyladenosine-3'-phosphate
  modified_base 11: mod_base = OTHER; note = 2'-O-methylguanosine-3'-phosphate
  modified_base 12: mod_base = OTHER; note = 2'-O-methylcytidine-3'-phosphate
  modified_base 13: mod_base = OTHER; note = 2'-O-methyladenosine-3'-phosphate
  modified_base 14: mod_base = OTHER; note = 2'-fluoroadenosine-3'-phosphate
  modified_base 15: mod_base = OTHER; note = 2'-O-methyladenosine-3'-phosphate
  modified_base 16: mod_base = OTHER; note = 2'-fluoroadenosine-3'-phosphate
  modified_base 17: mod_base = OTHER; note = 2'-O-methylcytidine-3'-phosphate
  modified_base 18: mod_base = OTHER; note = 2'-O-methyladenosine-3'-phosphate
  modified_base 19: mod_base = OTHER; note = 2'-O-methylguanosine-3'-phosphate
  modified_base 20: mod_base = OTHER; note = 2'-O-methylguanosine-3'-phosphate
  modified_base 21: mod_base = OTHER; note = 2'-O-methyluridine-3'-phosphorothioate
  modified_base 22: mod_base = OTHER; note = 2'-O-methylcytidine-3'-phosphorothioate
  modified_base 23: mod_base = OTHER; note = 2'-O-methyluridine
agttacaaaagcaaaacaggtct

SEQ ID NO: 1736 - RNA, 21 nt, synthetic construct
  source 1..21: mol_type = other RNA
  modified_base 1: mod_base = OTHER; note = 2'-O-methyladenosine-3'-phosphorothioate
  modified_base 2: mod_base = OTHER; note = 2'-O-methylcytidine-3'-phosphorothioate
  modified_base 3: mod_base = OTHER; note = 2'-O-methylcytidine-3'-phosphate
  modified_base 4: mod_base = OTHER; note = 2'-O-methyluridine-3'-phosphate
  modified_base 5: mod_base = OTHER; note = 2'-O-methylguanosine-3'-phosphate
  modified_base 6: mod_base = OTHER; note = 2'-O-methyluridine-3'-phosphate
  modified_base 7: mod_base = OTHER; note = 2'-fluorouridine-3'-phosphate
  modified_base 8: mod_base = OTHER; note = 2'-O-methyluridine-3'-phosphate
  modified_base 9: mod_base = OTHER; note = 2'-fluorouridine-3'-phosphate
  modified_base 10: mod_base = OTHER; note = 2'-fluoroguanosine-3'-phosphate
  modified_base 11: mod_base = OTHER; note = 2'-fluorocytidine-3'-phosphate
  modified_base 12: mod_base = OTHER; note = 2'-O-methyluridine-3'-phosphate
  modified_base 13: mod_base = OTHER; note = 2'-O-methyluridine-3'-phosphate
  modified_base 14: mod_base = OTHER; note = 2'-O-methyluridine-3'-phosphate
  modified_base 15: mod_base = OTHER; note = 2'-O-methyluridine-3'-phosphate
  modified_base 16: mod_base = OTHER; note = 2'-O-methylguanosine-3'-phosphate
  modified_base 17: mod_base = OTHER; note = 2'-O-methyluridine-3'-phosphate
  modified_base 18: mod_base = OTHER; note = 2'-O-methyladenosine-3'-phosphate
  modified_base 19: mod_base = OTHER; note = 2'-O-methyladenosine-3'-phosphate
  modified_base 20: mod_base = OTHER; note = 2'-O-methylcytidine-3'-phosphate
  modified_base 21: mod_base = OTHER; note = 2'-O-methyluridine
acctgttttgcttttgtaact

SEQ ID NO: 1737 - RNA, 23 nt, synthetic construct
  source 1..23: mol_type = other RNA
  modified_base 1: mod_base = OTHER; note = 2'-O-methyladenosine-3'-phosphorothioate
  modified_base 2: mod_base = OTHER; note = 2'-fluoroguanosine-3'-phosphorothioate
  modified_base 3: mod_base = OTHER; note = 2'-O-methyluridine-3'-phosphate
  modified_base 4: mod_base = OTHER; note = 2'-O-methyluridine-3'-phosphate
  modified_base 5: mod_base = OTHER; note = 2'-O-methyladenosine-3'-phosphate
  modified_base 6: mod_base = OTHER; note = 2'-fluorocytidine-3'-phosphate
  modified_base 7: mod_base = OTHER; note = 2'-O-methyladenosine-3'-phosphate
  modified_base 8: mod_base = OTHER; note = 2'-O-methyladenosine-3'-phosphate
  modified_base 9: mod_base = OTHER; note = 2'-O-methyladenosine-3'-phosphate
  modified_base 10: mod_base = OTHER; note = 2'-O-methyladenosine-3'-phosphate
  modified_base 11: mod_base = OTHER; note = 2'-O-methylguanosine-3'-phosphate
  modified_base 12: mod_base = OTHER; note = 2'-O-methylcytidine-3'-phosphate
  modified_base 13: mod_base = OTHER; note = 2'-O-methyladenosine-3'-phosphate
  modified_base 14: mod_base = OTHER; note = 2'-fluoroadenosine-3'-phosphate
  modified_base 15: mod_base = OTHER; note = 2'-O-methyladenosine-3'-phosphate
  modified_base 16: mod_base = OTHER; note = 2'-fluoroadenosine-3'-phosphate
  modified_base 17: mod_base = OTHER; note = 2'-O-methylcytidine-3'-phosphate
  modified_base 18: mod_base = OTHER; note = 2'-O-methyladenosine-3'-phosphate
  modified_base 19: mod_base = OTHER; note = 2'-O-methylguanosine-3'-phosphate
  modified_base 20: mod_base = OTHER; note = 2'-O-methylguanosine-3'-phosphate
  modified_base 21: mod_base = OTHER; note = 2'-O-methyluridine-3'-phosphorothioate
  modified_base 22: mod_base = OTHER; note = 2'-O-methylcytidine-3'-phosphorothioate
  modified_base 23: mod_base = OTHER; note = 2'-O-methyluridine
agttacaaaagcaaaacaggtct

SEQ ID NO: 1738 - RNA, 19 nt, synthetic construct
  source 1..19: mol_type = other RNA
  modified_base 1: mod_base = OTHER; note = 2'-O-methylcytidine-3'-phosphate
  modified_base 2: mod_base = OTHER; note = 2'-O-methyluridine-3'-phosphate
  modified_base 3: mod_base = OTHER; note = 2'-O-methylguanosine-3'-phosphate
  modified_base 4: mod_base = OTHER; note = 2'-O-methyluridine-3'-phosphate
  modified_base 5: mod_base = OTHER; note = 2'-O-methyluridine-3'-phosphate
  modified_base 6: mod_base = OTHER; note = 2'-O-methyluridine-3'-phosphate
  modified_base 7: mod_base = OTHER; note = 2'-fluorouridine-3'-phosphate
  modified_base 8: mod_base = OTHER; note = 2'-fluoroguanosine-3'-phosphate
  modified_base 9: mod_base = OTHER; note = 2'-fluorocytidine-3'-phosphate
  modified_base 10: mod_base = OTHER; note = 2'-O-methyluridine-3'-phosphate
  modified_base 11: mod_base = OTHER; note = 2'-O-methyluridine-3'-phosphate
  modified_base 12: mod_base = OTHER; note = 2'-O-methyluridine-3'-phosphate
  modified_base 13: mod_base = OTHER; note = 2'-O-methyluridine-3'-phosphate
  modified_base 14: mod_base = OTHER; note = 2'-O-methylguanosine-3'-phosphate
  modified_base 15: mod_base = OTHER; note = 2'-O-methyluridine-3'-phosphate
  modified_base 16: mod_base = OTHER; note = 2'-O-methyladenosine-3'-phosphate
  modified_base 17: mod_base = OTHER; note = 2'-O-methyladenosine-3'-phosphate
  modified_base 18: mod_base = OTHER; note = 2'-O-methylcytidine-3'-phosphate
  modified_base 19: mod_base = OTHER; note = 2'-O-methyluridine
ctgttttgcttttgtaact

SEQ ID NO: 1739 - RNA, 21 nt, synthetic construct
  source 1..21: mol_type = other RNA
  modified_base 1: mod_base = OTHER; note = 5'-phosphate-2'-O-methyladenosine-3'-phosphate
  modified_base 2: mod_base = OTHER; note = 2'-fluoroguanosine-3'-phosphate
  modified_base 3: mod_base = OTHER; note = 2'-O-methyluridine-3'-phosphate
  modified_base 4: mod_base = OTHER; note = 2'-O-methyluridine-3'-phosphate
  modified_base 5: mod_base = OTHER; note = 2'-O-methyladenosine-3'-phosphate
  modified_base 6: mod_base = OTHER; note = 2'-fluorocytidine-3'-phosphate
  modified_base 7: mod_base = OTHER; note = 2'-O-methyladenosine-3'-phosphate
  modified_base 8: mod_base = OTHER; note = 2'-O-methyladenosine-3'-phosphate
  modified_base 9: mod_base = OTHER; note = 2'-O-methyladenosine-3'-phosphate
  modified_base 10: mod_base = OTHER; note = 2'-O-methyladenosine-3'-phosphate
  modified_base 11: mod_base = OTHER; note = 2'-O-methylguanosine-3'-phosphate
  modified_base 12: mod_base = OTHER; note = 2'-O-methylcytidine-3'-phosphate
  modified_base 13: mod_base = OTHER; note = 2'-O-methyladenosine-3'-phosphate
  modified_base 14: mod_base = OTHER; note = 2'-fluoroadenosine-3'-phosphate
  modified_base 15: mod_base = OTHER; note = 2'-O-methyladenosine-3'-phosphate
  modified_base 16: mod_base = OTHER; note = 2'-fluoroadenosine-3'-phosphate
  modified_base 17: mod_base = OTHER; note = 2'-O-methylcytidine-3'-phosphate
  modified_base 18: mod_base = OTHER; note = 2'-O-methyladenosine-3'-phosphate
  modified_base 19: mod_base = OTHER; note = 2'-O-methylguanosine-3'-phosphate
  modified_base 20: mod_base = OTHER; note = 2'-O-methylguanosine-3'-phosphate
  modified_base 21: mod_base = OTHER; note = 2'-O-methyluridine
agttacaaaagcaaaacaggt

SEQ ID NO: 1740 - RNA, 19 nt, synthetic construct
  source 1..19: mol_type = other RNA
  modified_base 1: mod_base = OTHER; note = 2'-O-methylcytidine-3'-phosphate
  modified_base 2: mod_base = OTHER; note = 2'-O-methyluridine-3'-phosphate
  modified_base 3: mod_base = OTHER; note = 2'-O-methylguanosine-3'-phosphate
  modified_base 4: mod_base = OTHER; note = 2'-O-methyluridine-3'-phosphate
  modified_base 5: mod_base = OTHER; note = 2'-fluorouridine-3'-phosphate
  modified_base 6: mod_base = OTHER; note = 2'-O-methyluridine-3'-phosphate
  modified_base 7: mod_base = OTHER; note = 2'-fluorouridine-3'-phosphate
  modified_base 8: mod_base = OTHER; note = 2'-fluoroguanosine-3'-phosphate
  modified_base 9: mod_base = OTHER; note = 2'-fluorocytidine-3'-phosphate
  modified_base 10: mod_base = OTHER; note = 2'-O-methyluridine-3'-phosphate
  modified_base 11: mod_base = OTHER; note = 2'-O-methyluridine-3'-phosphate
  modified_base 12: mod_base = OTHER; note = 2'-O-methyluridine-3'-phosphate
  modified_base 13: mod_base = OTHER; note = 2'-O-methyluridine-3'-phosphate
  modified_base 14: mod_base = OTHER; note = 2'-O-methylguanosine-3'-phosphate
  modified_base 15: mod_base = OTHER; note = 2'-O-methyluridine-3'-phosphate
  modified_base 16: mod_base = OTHER; note = 2'-O-methyladenosine-3'-phosphate
  modified_base 17: mod_base = OTHER; note = 2'-O-methyladenosine-3'-phosphate
  modified_base 18: mod_base = OTHER; note = 2'-O-methylcytidine-3'-phosphate
  modified_base 19: mod_base = OTHER; note = 2'-O-methyluridine
ctgttttgcttttgtaact

SEQ ID NO: 1741 - RNA, 21 nt, synthetic construct
  source 1..21: mol_type = other RNA
  modified_base 1: mod_base = OTHER; note = 5'-phosphate-2'-O-methyladenosine-3'-phosphate
  modified_base 2: mod_base = OTHER; note = 2'-fluoroguanosine-3'-phosphate
  modified_base 3: mod_base = OTHER; note = 2'-O-methyluridine-3'-phosphate
  modified_base 4: mod_base = OTHER; note = 2'-O-methyluridine-3'-phosphate
  modified_base 5: mod_base = OTHER; note = 2'-O-methyladenosine-3'-phosphate
  modified_base 6: mod_base = OTHER; note = 2'-fluorocytidine-3'-phosphate
  modified_base 7: mod_base = OTHER; note = 2'-O-methyladenosine-3'-phosphate
  modified_base 8: mod_base = OTHER; note = 2'-fluoroadenosine-3'-phosphate
  modified_base 9: mod_base = OTHER; note = 2'-fluoroadenosine-3'-phosphate
  modified_base 10: mod_base = OTHER; note = 2'-O-methyladenosine-3'-phosphate
  modified_base 11: mod_base = OTHER; note = 2'-O-methylguanosine-3'-phosphate
  modified_base 12: mod_base = OTHER; note = 2'-O-methylcytidine-3'-phosphate
  modified_base 13: mod_base = OTHER; note = 2'-O-methyladenosine-3'-phosphate
  modified_base 14: mod_base = OTHER; note = 2'-fluoroadenosine-3'-phosphate
  modified_base 15: mod_base = OTHER; note = 2'-O-methyladenosine-3'-phosphate
  modified_base 16: mod_base = OTHER; note = 2'-fluoroadenosine-3'-phosphate
  modified_base 17: mod_base = OTHER; note = 2'-O-methylcytidine-3'-phosphate
  modified_base 18: mod_base = OTHER; note = 2'-O-methyladenosine-3'-phosphate
  modified_base 19: mod_base = OTHER; note = 2'-O-methylguanosine-3'-phosphate
  modified_base 20: mod_base = OTHER; note = 2'-O-methylguanosine-3'-phosphate
  modified_base 21: mod_base = OTHER; note = 2'-O-methyluridine
agttacaaaagcaaaacaggt

SEQ ID NO: 1742 - RNA, 19 nt, synthetic construct
  source 1..19: mol_type = other RNA
  modified_base 1: mod_base = OTHER; note = 2'-O-methylcytidine-3'-phosphate
  modified_base 2: mod_base = OTHER; note = 2'-O-methyluridine-3'-phosphate
  modified_base 3: mod_base = OTHER; note = 2'-O-methylguanosine-3'-phosphate
  modified_base 4: mod_base = OTHER; note = 2'-O-methyluridine-3'-phosphate
  modified_base 5: mod_base = OTHER; note = 2'-fluorouridine-3'-phosphate
  modified_base 6: mod_base = OTHER; note = 2'-O-methyluridine-3'-phosphate
  modified_base 7: mod_base = OTHER; note = 2'-fluorouridine-3'-phosphate
  modified_base 8: mod_base = OTHER; note = 2'-fluoroguanosine-3'-phosphate
  modified_base 9: mod_base = OTHER; note = 2'-fluorocytidine-3'-phosphate
  modified_base 10: mod_base = OTHER; note = 2'-O-methyluridine-3'-phosphate
  modified_base 11: mod_base = OTHER; note = 2'-O-methyluridine-3'-phosphate
  modified_base 12: mod_base = OTHER; note = 2'-O-methyluridine-3'-phosphate
  modified_base 13: mod_base = OTHER; note = 2'-O-methyluridine-3'-phosphate
  modified_base 14: mod_base = OTHER; note = 2'-O-methylguanosine-3'-phosphate
  modified_base 15: mod_base = OTHER; note = 2'-O-methyluridine-3'-phosphate
  modified_base 16: mod_base = OTHER; note = 2'-O-methyladenosine-3'-phosphate
  modified_base 17: mod_base = OTHER; note = 2'-O-methyladenosine-3'-phosphate
  modified_base 18: mod_base = OTHER; note = 2'-O-methylcytidine-3'-phosphate
  modified_base 19: mod_base = OTHER; note = 2'-O-methyluridine
ctgttttgcttttgtaact

SEQ ID NO: 1743 - RNA, 21 nt, synthetic construct
  source 1..21: mol_type = other RNA
  modified_base 1: mod_base = OTHER; note = 5'-phosphate-2'-O-methyladenosine-3'-phosphate
  modified_base 2: mod_base = OTHER; note = 2'-fluoroguanosine-3'-phosphate
  modified_base 3: mod_base = OTHER; note = 2'-O-methyluridine-3'-phosphate
  modified_base 4: mod_base = OTHER; note = 2'-O-methyluridine-3'-phosphate
  modified_base 5: mod_base = OTHER; note = 2'-O-methyladenosine-3'-phosphate
  modified_base 6: mod_base = OTHER; note = 2'-fluorocytidine-3'-phosphate
  modified_base 7: mod_base = OTHER; note = 2'-O-methyladenosine-3'-phosphate
  modified_base 8: mod_base = OTHER; note = 2'-O-methyladenosine-3'-phosphate
  modified_base 9: mod_base = OTHER; note = 2'-O-methyladenosine-3'-phosphate
  modified_base 10: mod_base = OTHER; note = 2'-O-methyladenosine-3'-phosphate
  modified_base 11: mod_base = OTHER; note = 2'-O-methylguanosine-3'-phosphate
  modified_base 12: mod_base = OTHER; note = 2'-O-methylcytidine-3'-phosphate
  modified_base 13: mod_base = OTHER; note = 2'-O-methyladenosine-3'-phosphate
  modified_base 14: mod_base = OTHER; note = 2'-fluoroadenosine-3'-phosphate
  modified_base 15: mod_base = OTHER; note = 2'-O-methyladenosine-3'-phosphate
  modified_base 16: mod_base = OTHER; note = 2'-fluoroadenosine-3'-phosphate
  modified_base 17: mod_base = OTHER; note = 2'-O-methylcytidine-3'-phosphate
  modified_base 18: mod_base = OTHER; note = 2'-O-methyladenosine-3'-phosphate
  modified_base 19: mod_base = OTHER; note = 2'-O-methylguanosine-3'-phosphate
  modified_base 20: mod_base = OTHER; note = 2'-O-methylguanosine-3'-phosphate
  modified_base 21: mod_base = OTHER; note = 2'-O-methyluridine
agttacaaaagcaaaacaggt

SEQ ID NO: 1744 - RNA, 21 nt, synthetic construct
  source 1..21: mol_type = other RNA
  modified_base 1: mod_base = OTHER; note = 2'-O-methyladenosine-3'-phosphate
  modified_base 2: mod_base = OTHER; note = 2'-O-methylcytidine-3'-phosphate
  modified_base 3: mod_base = OTHER; note = 2'-O-methylcytidine-3'-phosphate
  modified_base 4: mod_base = OTHER; note = 2'-O-methyluridine-3'-phosphate
  modified_base 5: mod_base = OTHER; note = 2'-O-methylguanosine-3'-phosphate
  modified_base 6: mod_base = OTHER; note = 2'-O-methyluridine-3'-phosphate
  modified_base 7: mod_base = OTHER; note = 2'-O-methyluridine-3'-phosphate
  modified_base 8: mod_base = OTHER; note = 2'-O-methyluridine-3'-phosphate
  modified_base 9: mod_base = OTHER; note = 2'-fluorouridine-3'-phosphate
  modified_base 10: mod_base = OTHER; note = 2'-fluoroguanosine-3'-phosphate
  modified_base 11: mod_base = OTHER; note = 2'-fluorocytidine-3'-phosphate
  modified_base 12: mod_base = OTHER; note = 2'-O-methyluridine-3'-phosphate
  modified_base 13: mod_base = OTHER; note = 2'-O-methyluridine-3'-phosphate
  modified_base 14: mod_base = OTHER; note = 2'-O-methyluridine-3'-phosphate
  modified_base 15: mod_base = OTHER; note = 2'-O-methyluridine-3'-phosphate
  modified_base 16: mod_base = OTHER; note = 2'-O-methylguanosine-3'-phosphate
  modified_base 17: mod_base = OTHER; note = 2'-O-methyluridine-3'-phosphate
  modified_base 18: mod_base = OTHER; note = 2'-O-methyladenosine-3'-phosphate
  modified_base 19: mod_base = OTHER; note = 2'-O-methyladenosine-3'-phosphate
  modified_base 20: mod_base = OTHER; note = 2'-O-methylcytidine-3'-phosphate
  modified_base 21: mod_base = OTHER; note = 2'-O-methyluridine
acctgttttgcttttgtaact

SEQ ID NO: 1745 - RNA, 23 nt, synthetic construct
  source 1..23: mol_type = other RNA
  modified_base 1: mod_base = OTHER; note = 5'-phosphate-2'-O-methyladenosine-3'-phosphate
  modified_base 2: mod_base = OTHER; note = 2'-fluoroguanosine-3'-phosphate
  modified_base 3: mod_base = OTHER; note = 2'-O-methyluridine-3'-phosphate
  modified_base 4: mod_base = OTHER; note = 2'-O-methyluridine-3'-phosphate
  modified_base 5: mod_base = OTHER; note = 2'-O-methyladenosine-3'-phosphate
  modified_base 6: mod_base = OTHER; note = 2'-fluorocytidine-3'-phosphate
  modified_base 7: mod_base = OTHER; note = 2'-O-methyladenosine-3'-phosphate
  modified_base 8: mod_base = OTHER; note = 2'-O-methyladenosine-3'-phosphate
  modified_base 9: mod_base = OTHER; note = 2'-O-methyladenosine-3'-phosphate
  modified_base 10: mod_base = OTHER; note = 2'-O-methyladenosine-3'-phosphate
  modified_base 11: mod_base = OTHER; note = 2'-O-methylguanosine-3'-phosphate
  modified_base 12: mod_base = OTHER; note = 2'-O-methylcytidine-3'-phosphate
  modified_base 13: mod_base = OTHER; note = 2'-O-methyladenosine-3'-phosphate
  modified_base 14: mod_base = OTHER; note = 2'-fluoroadenosine-3'-phosphate
  modified_base 15: mod_base = OTHER; note = 2'-O-methyladenosine-3'-phosphate
  modified_base 16: mod_base = OTHER; note = 2'-fluoroadenosine-3'-phosphate
  modified_base 17: mod_base = OTHER; note = 2'-O-methylcytidine-3'-phosphate
  modified_base 18: mod_base = OTHER; note = 2'-O-methyladenosine-3'-phosphate
  modified_base 19: mod_base = OTHER; note = 2'-O-methylguanosine-3'-phosphate
  modified_base 20: mod_base = OTHER; note = 2'-O-methylguanosine-3'-phosphate
  modified_base 21: mod_base = OTHER; note = 2'-O-methyluridine-3'-phosphate
  modified_base 22: mod_base = OTHER; note = 2'-O-methylcytidine-3'-phosphate
  modified_base 23: mod_base = OTHER; note = 2'-O-methyluridine
agttacaaaagcaaaacaggtct

SEQ ID NO: 1746 - RNA, 21 nt, synthetic construct
  source 1..21: mol_type = other RNA
  modified_base 1: mod_base = OTHER; note = 2'-O-methyladenosine-3'-phosphate
  modified_base 2: mod_base = OTHER; note = 2'-O-methylcytidine-3'-phosphate
  modified_base 3: mod_base = OTHER; note = 2'-O-methylcytidine-3'-phosphate
  modified_base 4: mod_base = OTHER; note = 2'-O-methyluridine-3'-phosphate
  modified_base 5: mod_base = OTHER; note = 2'-O-methylguanosine-3'-phosphate
  modified_base 6: mod_base = OTHER; note = 2'-O-methyluridine-3'-phosphate
  modified_base 7: mod_base = OTHER; note = 2'-fluorouridine-3'-phosphate
  modified_base 8: mod_base = OTHER; note = 2'-O-methyluridine-3'-phosphate
  modified_base 9: mod_base = OTHER; note = 2'-fluorouridine-3'-phosphate
  modified_base 10: mod_base = OTHER; note = 2'-fluoroguanosine-3'-phosphate
  modified_base 11: mod_base = OTHER; note = 2'-fluorocytidine-3'-phosphate
  modified_base 12: mod_base = OTHER; note = 2'-O-methyluridine-3'-phosphate
  modified_base 13: mod_base = OTHER; note = 2'-O-methyluridine-3'-phosphate
  modified_base 14: mod_base = OTHER; note = 2'-O-methyluridine-3'-phosphate
  modified_base 15: mod_base = OTHER; note = 2'-O-methyluridine-3'-phosphate
  modified_base 16: mod_base = OTHER; note = 2'-O-methylguanosine-3'-phosphate
  modified_base 17: mod_base = OTHER; note = 2'-O-methyluridine-3'-phosphate
  modified_base 18: mod_base = OTHER; note = 2'-O-methyladenosine-3'-phosphate
  modified_base 19: mod_base = OTHER; note = 2'-O-methyladenosine-3'-phosphate
  modified_base 20: mod_base = OTHER; note = 2'-O-methylcytidine-3'-phosphate
  modified_base 21: mod_base = OTHER; note = 2'-O-methyluridine
acctgttttgcttttgtaact

SEQ ID NO: 1747 - RNA, 23 nt, synthetic construct
  source 1..23: mol_type = other RNA
  modified_base 1: mod_base = OTHER; note = 5'-phosphate-2'-O-methyladenosine-3'-phosphate
  modified_base 2: mod_base = OTHER; note = 2'-fluoroguanosine-3'-phosphate
  modified_base 3: mod_base = OTHER; note = 2'-O-methyluridine-3'-phosphate
  modified_base 4: mod_base = OTHER; note = 2'-O-methyluridine-3'-phosphate
  modified_base 5: mod_base = OTHER; note = 2'-O-methyladenosine-3'-phosphate
  modified_base 6: mod_base = OTHER; note = 2'-fluorocytidine-3'-phosphate
  modified_base 7: mod_base = OTHER; note = 2'-O-methyladenosine-3'-phosphate
  modified_base 8: mod_base = OTHER; note = 2'-fluoroadenosine-3'-phosphate
  modified_base 9: mod_base = OTHER; note = 2'-fluoroadenosine-3'-phosphate
  modified_base 10: mod_base = OTHER; note = 2'-O-methyladenosine-3'-phosphate
  modified_base 11: mod_base = OTHER; note = 2'-O-methylguanosine-3'-phosphate
  modified_base 12: mod_base = OTHER; note = 2'-O-methylcytidine-3'-phosphate
  modified_base 13: mod_base = OTHER; note = 2'-O-methyladenosine-3'-phosphate
  modified_base 14: mod_base = OTHER; note = 2'-fluoroadenosine-3'-phosphate
  modified_base 15: mod_base = OTHER; note = 2'-O-methyladenosine-3'-phosphate
  modified_base 16: mod_base = OTHER; note = 2'-fluoroadenosine-3'-phosphate
  modified_base 17: mod_base = OTHER; note = 2'-O-methylcytidine-3'-phosphate
  modified_base 18: mod_base = OTHER; note = 2'-O-methyladenosine-3'-phosphate
  modified_base 19: mod_base = OTHER; note = 2'-O-methylguanosine-3'-phosphate
  modified_base 20: mod_base = OTHER; note = 2'-O-methylguanosine-3'-phosphate
  modified_base 21: mod_base = OTHER; note = 2'-O-methyluridine-3'-phosphate
  modified_base 22: mod_base = OTHER; note = 2'-O-methylcytidine-3'-phosphate
  modified_base 23: mod_base = OTHER; note = 2'-O-methyluridine
agttacaaaagcaaaacaggtct

SEQ ID NO: 1748 - RNA, 21 nt, synthetic construct
  source 1..21: mol_type = other RNA
  modified_base 1: mod_base = OTHER; note = 2'-O-methyladenosine-3'-phosphate
  modified_base 2: mod_base = OTHER; note = 2'-O-methylcytidine-3'-phosphate
  modified_base 3: mod_base = OTHER; note = 2'-O-methylcytidine-3'-phosphate
  modified_base 4: mod_base = OTHER; note = 2'-O-methyluridine-3'-phosphate
  modified_base 5: mod_base = OTHER; note = 2'-O-methylguanosine-3'-phosphate
  modified_base 6: mod_base = OTHER; note = 2'-O-methyluridine-3'-phosphate
  modified_base 7: mod_base = OTHER; note = 2'-fluorouridine-3'-phosphate
  modified_base 8: mod_base = OTHER; note = 2'-O-methyluridine-3'-phosphate
  modified_base 9: mod_base = OTHER; note = 2'-fluorouridine-3'-phosphate
  modified_base 10: mod_base = OTHER; note = 2'-fluoroguanosine-3'-phosphate
  modified_base 11: mod_base = OTHER; note = 2'-fluorocytidine-3'-phosphate
  modified_base 12: mod_base = OTHER; note = 2'-O-methyluridine-3'-phosphate
  modified_base 13: mod_base = OTHER; note = 2'-O-methyluridine-3'-phosphate
  modified_base 14: mod_base = OTHER; note = 2'-O-methyluridine-3'-phosphate
  modified_base 15: mod_base = OTHER; note = 2'-O-methyluridine-3'-phosphate
  modified_base 16: mod_base = OTHER; note = 2'-O-methylguanosine-3'-phosphate
  modified_base 17: mod_base = OTHER; note = 2'-O-methyluridine-3'-phosphate
  modified_base 18: mod_base = OTHER; note = 2'-O-methyladenosine-3'-phosphate
  modified_base 19: mod_base = OTHER; note = 2'-O-methyladenosine-3'-phosphate
  modified_base 20: mod_base = OTHER; note = 2'-O-methylcytidine-3'-phosphate
  modified_base 21: mod_base = OTHER; note = 2'-O-methyluridine
acctgttttgcttttgtaact

SEQ ID NO: 1749 - RNA, 23 nt, synthetic construct
  source 1..23: mol_type = other RNA
  modified_base 1: mod_base = OTHER; note = 5'-phosphate-2'-O-methyladenosine-3'-phosphate
  modified_base 2: mod_base = OTHER; note = 2'-fluoroguanosine-3'-phosphate
  modified_base 3: mod_base = OTHER; note = 2'-O-methyluridine-3'-phosphate
  modified_base 4: mod_base = OTHER; note = 2'-O-methyluridine-3'-phosphate
  modified_base 5: mod_base = OTHER; note = 2'-O-methyladenosine-3'-phosphate
  modified_base 6: mod_base = OTHER; note = 2'-fluorocytidine-3'-phosphate
  modified_base 7: mod_base = OTHER; note = 2'-O-methyladenosine-3'-phosphate
  modified_base 8: mod_base = OTHER; note = 2'-O-methyladenosine-3'-phosphate
  modified_base 9: mod_base = OTHER; note = 2'-O-methyladenosine-3'-phosphate
  modified_base 10: mod_base = OTHER; note = 2'-O-methyladenosine-3'-phosphate
  modified_base 11: mod_base = OTHER; note = 2'-O-methylguanosine-3'-phosphate
  modified_base 12: mod_base = OTHER; note = 2'-O-methylcytidine-3'-phosphate
  modified_base 13: mod_base = OTHER; note = 2'-O-methyladenosine-3'-phosphate
  modified_base 14: mod_base = OTHER; note = 2'-fluoroadenosine-3'-phosphate
  modified_base 15: mod_base = OTHER; note = 2'-O-methyladenosine-3'-phosphate
  modified_base 16: mod_base = OTHER; note = 2'-fluoroadenosine-3'-phosphate
  modified_base 17: mod_base = OTHER; note = 2'-O-methylcytidine-3'-phosphate
  modified_base 18: mod_base = OTHER; note = 2'-O-methyladenosine-3'-phosphate
  modified_base 19: mod_base = OTHER; note = 2'-O-methylguanosine-3'-phosphate
  modified_base 20: mod_base = OTHER; note = 2'-O-methylguanosine-3'-phosphate
  modified_base 21: mod_base = OTHER; note = 2'-O-methyluridine-3'-phosphate
  modified_base 22: mod_base = OTHER; note = 2'-O-methylcytidine-3'-phosphate
  modified_base 23: mod_base = OTHER; note = 2'-O-methyluridine
agttacaaaagcaaaacaggtct

SEQ ID NO: 1750 - RNA, 19 nt, synthetic construct
  source 1..19: mol_type = other RNA
  modified_base 1: mod_base = OTHER; note = 2'-O-methylcytidine-3'-phosphorothioate
  modified_base 2: mod_base = OTHER; note = 2'-O-methyluridine-3'-phosphorothioate
  modified_base 3: mod_base = OTHER; note = 2'-O-methylguanosine-3'-phosphate
  modified_base 4: mod_base = OTHER; note = 2'-O-methyluridine-3'-phosphate
  modified_base 5: mod_base = OTHER; note = 2'-O-methyluridine-3'-phosphate
  modified_base 6: mod_base = OTHER; note = 2'-O-methyluridine-3'-phosphate
  modified_base 7: mod_base = OTHER; note = 2'-fluorouridine-3'-phosphate
  modified_base 8: mod_base = OTHER; note = 2'-fluoroguanosine-3'-phosphate
  modified_base 9: mod_base = OTHER; note = 2'-fluorocytidine-3'-phosphate
  modified_base 10: mod_base = OTHER; note = 2'-O-methyluridine-3'-phosphate
  modified_base 11: mod_base = OTHER; note = 2'-O-methyluridine-3'-phosphate
  modified_base 12: mod_base = OTHER; note = 2'-O-methyluridine-3'-phosphate
  modified_base 13: mod_base = OTHER; note = 2'-O-methyluridine-3'-phosphate
  modified_base 14: mod_base = OTHER; note = 2'-O-methylguanosine-3'-phosphate
  modified_base 15: mod_base = OTHER; note = 2'-O-methyluridine-3'-phosphate
  modified_base 16: mod_base = OTHER; note = 2'-O-methyladenosine-3'-phosphate
  modified_base 17: mod_base = OTHER; note = 2'-O-methyladenosine-3'-phosphate
  modified_base 18: mod_base = OTHER; note = 2'-O-methylcytidine-3'-phosphate
  modified_base 19: mod_base = OTHER; note = 2'-O-methyluridine
ctgttttgcttttgtaact

SEQ ID NO: 1751 - RNA, 21 nt, synthetic construct
  source 1..21: mol_type = other RNA
  modified_base 1: mod_base = OTHER; note = 5'-phosphate-2'-O-methyladenosine-3'-phosphorothioate
  modified_base 2: mod_base = OTHER; note = 2'-fluoroguanosine-3'-phosphorothioate
  modified_base 3: mod_base = OTHER; note = 2'-O-methyluridine-3'-phosphate
  modified_base 4: mod_base = OTHER; note = 2'-O-methyluridine-3'-phosphate
  modified_base 5: mod_base = OTHER; note = 2'-O-methyladenosine-3'-phosphate
  modified_base 6: mod_base = OTHER; note = 2'-fluorocytidine-3'-phosphate
  modified_base 7: mod_base = OTHER; note = 2'-O-methyladenosine-3'-phosphate
  modified_base 8: mod_base = OTHER; note = 2'-O-methyladenosine-3'-phosphate
  modified_base 9: mod_base = OTHER; note = 2'-O-methyladenosine-3'-phosphate
  modified_base 10: mod_base = OTHER; note = 2'-O-methyladenosine-3'-phosphate
  modified_base 11: mod_base = OTHER; note = 2'-O-methylguanosine-3'-phosphate
  modified_base 12: mod_base = OTHER; note = 2'-O-methylcytidine-3'-phosphate
  modified_base 13: mod_base = OTHER; note = 2'-O-methyladenosine-3'-phosphate
  modified_base 14: mod_base = OTHER; note = 2'-fluoroadenosine-3'-phosphate
  modified_base 15: mod_base = OTHER; note = 2'-O-methyladenosine-3'-phosphate
  modified_base 16: mod_base = OTHER; note = 2'-fluoroadenosine-3'-phosphate
  modified_base 17: mod_base = OTHER; note = 2'-O-methylcytidine-3'-phosphate
  modified_base 18: mod_base = OTHER; note = 2'-O-methyladenosine-3'-phosphate
  modified_base 19: mod_base = OTHER; note = 2'-O-methylguanosine-3'-phosphorothioate
  modified_base 20: mod_base = OTHER; note = 2'-O-methylguanosine-3'-phosphorothioate
  modified_base 21: mod_base = OTHER; note = 2'-O-methyluridine
agttacaaaagcaaaacaggt

SEQ ID NO: 1752 - RNA, 19 nt, synthetic construct
  source 1..19: mol_type = other RNA
  modified_base 1: mod_base = OTHER; note = 2'-O-methylcytidine-3'-phosphorothioate
  modified_base 2: mod_base = OTHER; note = 2'-O-methyluridine-3'-phosphorothioate
  modified_base 3: mod_base = OTHER; note = 2'-O-methylguanosine-3'-phosphate
  modified_base 4: mod_base = OTHER; note = 2'-O-methyluridine-3'-phosphate
  modified_base 5: mod_base = OTHER; note = 2'-fluorouridine-3'-phosphate
  modified_base 6: mod_base = OTHER; note = 2'-O-methyluridine-3'-phosphate
  modified_base 7: mod_base = OTHER; note = 2'-fluorouridine-3'-phosphate
  modified_base 8: mod_base = OTHER; note = 2'-fluoroguanosine-3'-phosphate
  modified_base 9: mod_base = OTHER; note = 2'-fluorocytidine-3'-phosphate
  modified_base 10: mod_base = OTHER; note = 2'-O-methyluridine-3'-phosphate
  modified_base 11: mod_base = OTHER; note = 2'-O-methyluridine-3'-phosphate
  modified_base 12: mod_base = OTHER; note = 2'-O-methyluridine-3'-phosphate
  modified_base 13: mod_base = OTHER; note = 2'-O-methyluridine-3'-phosphate
  modified_base 14: mod_base = OTHER; note = 2'-O-methylguanosine-3'-phosphate
  modified_base 15: mod_base = OTHER; note = 2'-O-methyluridine-3'-phosphate
  modified_base 16: mod_base = OTHER; note = 2'-O-methyladenosine-3'-phosphate
  modified_base 17: mod_base = OTHER; note = 2'-O-methyladenosine-3'-phosphate
  modified_base 18: mod_base = OTHER; note = 2'-O-methylcytidine-3'-phosphate
  modified_base 19: mod_base = OTHER; note = 2'-O-methyluridine
ctgttttgcttttgtaact

SEQ ID NO: 1753 - RNA, 21 nt, synthetic construct
  source 1..21: mol_type = other RNA
  modified_base 1: mod_base = OTHER; note = 5'-phosphate-2'-O-methyladenosine-3'-phosphorothioate
  modified_base 2: mod_base = OTHER; note = 2'-fluoroguanosine-3'-phosphorothioate
  modified_base 3: mod_base = OTHER; note = 2'-O-methyluridine-3'-phosphate
  modified_base 4: mod_base = OTHER; note = 2'-O-methyluridine-3'-phosphate
  modified_base 5: mod_base = OTHER; note = 2'-O-methyladenosine-3'-phosphate
  modified_base 6: mod_base = OTHER; note = 2'-fluorocytidine-3'-phosphate
  modified_base 7: mod_base = OTHER; note = 2'-O-methyladenosine-3'-phosphate
  modified_base 8: mod_base = OTHER; note = 2'-fluoroadenosine-3'-phosphate
  modified_base 9: mod_base = OTHER; note = 2'-fluoroadenosine-3'-phosphate
  modified_base 10: mod_base = OTHER; note = 2'-O-methyladenosine-3'-phosphate
  modified_base 11: mod_base = OTHER; note = 2'-O-methylguanosine-3'-phosphate
  modified_base 12: mod_base = OTHER; note = 2'-O-methylcytidine-3'-phosphate
  modified_base 13: mod_base = OTHER; note = 2'-O-methyladenosine-3'-phosphate
  modified_base 14: mod_base = OTHER; note = 2'-fluoroadenosine-3'-phosphate
  modified_base 15: mod_base = OTHER; note = 2'-O-methyladenosine-3'-phosphate
  modified_base 16: mod_base = OTHER; note = 2'-fluoroadenosine-3'-phosphate
  modified_base 17: mod_base = OTHER; note = 2'-O-methylcytidine-3'-phosphate
  modified_base 18: mod_base = OTHER; note = 2'-O-methyladenosine-3'-phosphate
  modified_base 19: mod_base = OTHER; note = 2'-O-methylguanosine-3'-phosphorothioate
  modified_base 20: mod_base = OTHER; note = 2'-O-methylguanosine-3'-phosphorothioate
  modified_base 21: mod_base = OTHER; note = 2'-O-methyluridine
agttacaaaagcaaaacaggt

SEQ ID NO: 1754 - RNA, 19 nt, synthetic construct
  source 1..19: mol_type = other RNA
  modified_base 1: mod_base = OTHER; note = 2'-O-methylcytidine-3'-phosphorothioate
  modified_base 2: mod_base = OTHER; note = 2'-O-methyluridine-3'-phosphorothioate
  modified_base 3: mod_base = OTHER; note = 2'-O-methylguanosine-3'-phosphate
  modified_base 4: mod_base = OTHER; note = 2'-O-methyluridine-3'-phosphate
  modified_base 5: mod_base = OTHER; note = 2'-fluorouridine-3'-phosphate
  modified_base 6: mod_base = OTHER; note = 2'-O-methyluridine-3'-phosphate
  modified_base 7: mod_base = OTHER; note = 2'-fluorouridine-3'-phosphate
  modified_base 8: mod_base = OTHER; note = 2'-fluoroguanosine-3'-phosphate
  modified_base 9: mod_base = OTHER; note = 2'-fluorocytidine-3'-phosphate
  modified_base 10: mod_base = OTHER; note = 2'-O-methyluridine-3'-phosphate
  modified_base 11: mod_base = OTHER; note = 2'-O-methyluridine-3'-phosphate
  modified_base 12: mod_base = OTHER; note = 2'-O-methyluridine-3'-phosphate
  modified_base 13: mod_base = OTHER; note = 2'-O-methyluridine-3'-phosphate
  modified_base 14: mod_base = OTHER; note = 2'-O-methylguanosine-3'-phosphate
  modified_base 15: mod_base = OTHER; note = 2'-O-methyluridine-3'-phosphate
  modified_base 16: mod_base = OTHER; note = 2'-O-methyladenosine-3'-phosphate
  modified_base 17: mod_base = OTHER; note = 2'-O-methyladenosine-3'-phosphate
  modified_base 18: mod_base = OTHER; note = 2'-O-methylcytidine-3'-phosphate
  modified_base 19: mod_base = OTHER; note = 2'-O-methyluridine
ctgttttgcttttgtaact

SEQ ID NO: 1755 - RNA, 21 nt, synthetic construct
  source 1..21: mol_type = other RNA
  modified_base 1: mod_base = OTHER; note = 5'-phosphate-2'-O-methyladenosine-3'-phosphorothioate
  modified_base 2: mod_base = OTHER; note = 2'-fluoroguanosine-3'-phosphorothioate
  modified_base 3: mod_base = OTHER; note = 2'-O-methyluridine-3'-phosphate
  modified_base 4: mod_base = OTHER; note = 2'-O-methyluridine-3'-phosphate
  modified_base 5: mod_base = OTHER; note = 2'-O-methyladenosine-3'-phosphate
  modified_base 6: mod_base = OTHER; note = 2'-fluorocytidine-3'-phosphate
  modified_base 7: mod_base = OTHER; note = 2'-O-methyladenosine-3'-phosphate
  modified_base 8: mod_base = OTHER; note = 2'-O-methyladenosine-3'-phosphate
  modified_base 9: mod_base = OTHER; note = 2'-O-methyladenosine-3'-phosphate
  modified_base 10: mod_base = OTHER; note = 2'-O-methyladenosine-3'-phosphate
  modified_base 11: mod_base = OTHER; note = 2'-O-methylguanosine-3'-phosphate
  modified_base 12: mod_base = OTHER; note = 2'-O-methylcytidine-3'-phosphate
  modified_base 13: mod_base = OTHER; note = 2'-O-methyladenosine-3'-phosphate
  modified_base 14: mod_base = OTHER; note = 2'-fluoroadenosine-3'-phosphate
  modified_base 15: mod_base = OTHER; note = 2'-O-methyladenosine-3'-phosphate
  modified_base 16: mod_base = OTHER; note = 2'-fluoroadenosine-3'-phosphate
  modified_base 17: mod_base = OTHER; note = 2'-O-methylcytidine-3'-phosphate
  modified_base 18: mod_base = OTHER; note = 2'-O-methyladenosine-3'-phosphate
  modified_base 19: mod_base = OTHER; note = 2'-O-methylguanosine-3'-phosphorothioate
  modified_base 20: mod_base = OTHER; note = 2'-O-methylguanosine-3'-phosphorothioate
  modified_base 21: mod_base = OTHER; note = 2'-O-methyluridine
agttacaaaagcaaaacaggt

SEQ ID NO: 1756 - RNA, 21 nt, synthetic construct
  source 1..21: mol_type = other RNA
  modified_base 1: mod_base = OTHER; note = 2'-O-methyladenosine-3'-phosphorothioate
  modified_base 2: mod_base = OTHER; note = 2'-O-methylcytidine-3'-phosphorothioate
  modified_base 3: mod_base = OTHER; note = 2'-O-methylcytidine-3'-phosphate
  modified_base 4: mod_base = OTHER; note = 2'-O-methyluridine-3'-phosphate
  modified_base 5: mod_base = OTHER; note = 2'-O-methylguanosine-3'-phosphate
  modified_base 6: mod_base = OTHER; note = 2'-O-methyluridine-3'-phosphate
  modified_base 7: mod_base = OTHER; note = 2'-O-methyluridine-3'-phosphate
  modified_base 8: mod_base = OTHER; note = 2'-O-methyluridine-3'-phosphate
  modified_base 9: mod_base = OTHER; note = 2'-fluorouridine-3'-phosphate
  modified_base 10: mod_base = OTHER; note = 2'-fluoroguanosine-3'-phosphate
  modified_base 11: mod_base = OTHER; note = 2'-fluorocytidine-3'-phosphate
  modified_base 12: mod_base = OTHER; note = 2'-O-methyluridine-3'-phosphate
  modified_base 13: mod_base = OTHER; note = 2'-O-methyluridine-3'-phosphate
  modified_base 14: mod_base = OTHER; note = 2'-O-methyluridine-3'-phosphate
  modified_base 15: mod_base = OTHER; note = 2'-O-methyluridine-3'-phosphate
  modified_base 16: mod_base = OTHER; note = 2'-O-methylguanosine-3'-phosphate
  modified_base 17: mod_base = OTHER; note = 2'-O-methyluridine-3'-phosphate
  modified_base 18: mod_base = OTHER; note = 2'-O-methyladenosine-3'-phosphate
  modified_base 19: mod_base = OTHER; note = 2'-O-methyladenosine-3'-phosphate
  modified_base 20: mod_base = OTHER; note = 2'-O-methylcytidine-3'-phosphate
  modified_base 21: mod_base = OTHER; note = 2'-O-methyluridine
acctgttttgcttttgtaact

SEQ ID NO: 1757 - RNA, 23 nt, synthetic construct
  source 1..23: mol_type = other RNA
  modified_base 1: mod_base = OTHER; note = 5'-phosphate-2'-O-methyladenosine-3'-phosphorothioate
  modified_base 2: mod_base = OTHER; note = 2'-fluoroguanosine-3'-phosphorothioate
  modified_base 3: mod_base = OTHER; note = 2'-O-methyluridine-3'-phosphate
  modified_base 4: mod_base = OTHER; note = 2'-O-methyluridine-3'-phosphate
  modified_base 5: mod_base = OTHER; note = 2'-O-methyladenosine-3'-phosphate
  modified_base 6: mod_base = OTHER; note = 2'-fluorocytidine-3'-phosphate
  modified_base 7: mod_base = OTHER; note = 2'-O-methyladenosine-3'-phosphate
  modified_base 8: mod_base = OTHER; note = 2'-O-methyladenosine-3'-phosphate
  modified_base 9: mod_base = OTHER; note = 2'-O-methyladenosine-3'-phosphate
  modified_base 10: mod_base = OTHER; note = 2'-O-methyladenosine-3'-phosphate
  modified_base 11: mod_base = OTHER; note = 2'-O-methylguanosine-3'-phosphate
  modified_base 12: mod_base = OTHER; note = 2'-O-methylcytidine-3'-phosphate
  modified_base 13: mod_base = OTHER; note = 2'-O-methyladenosine-3'-phosphate
  modified_base 14: mod_base = OTHER; note = 2'-fluoroadenosine-3'-phosphate
  modified_base 15: mod_base = OTHER; note = 2'-O-methyladenosine-3'-phosphate
  modified_base 16: mod_base = OTHER; note = 2'-fluoroadenosine-3'-phosphate
  modified_base 17: mod_base = OTHER; note = 2'-O-methylcytidine-3'-phosphate
  modified_base 18: mod_base = OTHER; note = 2'-O-methyladenosine-3'-phosphate
  modified_base 19: mod_base = OTHER; note = 2'-O-methylguanosine-3'-phosphate
  modified_base 20: mod_base = OTHER; note = 2'-O-methylguanosine-3'-phosphate
  modified_base 21: mod_base = OTHER; note = 2'-O-methyluridine-3'-phosphorothioate
  modified_base 22: mod_base = OTHER; note = 2'-O-methylcytidine-3'-phosphorothioate
  modified_base 23: mod_base = OTHER; note = 2'-O-methyluridine
agttacaaaagcaaaacaggtct

SEQ ID NO: 1758 - RNA, 21 nt, synthetic construct
  source 1..21: mol_type = other RNA
  modified_base 1: mod_base = OTHER; note = 2'-O-methyladenosine-3'-phosphorothioate
  modified_base 2: mod_base = OTHER; note = 2'-O-methylcytidine-3'-phosphorothioate
  modified_base 3: mod_base = OTHER; note = 2'-O-methylcytidine-3'-phosphate
  modified_base 4: mod_base = OTHER; note = 2'-O-methyluridine-3'-phosphate
  modified_base 5: mod_base = OTHER; note = 2'-O-methylguanosine-3'-phosphate
  modified_base 6: mod_base = OTHER; note = 2'-O-methyluridine-3'-phosphate
  modified_base 7: mod_base = OTHER; note = 2'-fluorouridine-3'-phosphate
  modified_base 8: mod_base = OTHER; note = 2'-O-methyluridine-3'-phosphate
  modified_base 9: mod_base = OTHER; note = 2'-fluorouridine-3'-phosphate
  modified_base 10: mod_base = OTHER; note = 2'-fluoroguanosine-3'-phosphate
  modified_base 11: mod_base = OTHER; note = 2'-fluorocytidine-3'-phosphate
  modified_base 12: mod_base = OTHER; note = 2'-O-methyluridine-3'-phosphate
  modified_base 13: mod_base = OTHER; note = 2'-O-methyluridine-3'-phosphate
  modified_base 14: mod_base = OTHER; note = 2'-O-methyluridine-3'-phosphate
  modified_base 15: mod_base = OTHER; note = 2'-O-methyluridine-3'-phosphate
  modified_base 16: mod_base = OTHER; note = 2'-O-methylguanosine-3'-phosphate
  modified_base 17: mod_base = OTHER; note = 2'-O-methyluridine-3'-phosphate
  modified_base 18: mod_base = OTHER; note = 2'-O-methyladenosine-3'-phosphate
  modified_base 19: mod_base = OTHER; note = 2'-O-methyladenosine-3'-phosphate
  modified_base 20: mod_base = OTHER; note = 2'-O-methylcytidine-3'-phosphate
  modified_base 21: mod_base = OTHER; note = 2'-O-methyluridine
acctgttttgcttttgtaact

SEQ ID NO: 1759 - RNA, 23 nt, synthetic construct
  source 1..23: mol_type = other RNA
  modified_base 1: mod_base = OTHER; note = 5'-phosphate-2'-O-methyladenosine-3'-phosphorothioate
  modified_base 2: mod_base = OTHER; note = 2'-fluoroguanosine-3'-phosphorothioate
  modified_base 3: mod_base = OTHER; note = 2'-O-methyluridine-3'-phosphate
  modified_base 4: mod_base = OTHER; note = 2'-O-methyluridine-3'-phosphate
  modified_base 5: mod_base = OTHER; note = 2'-O-methyladenosine-3'-phosphate
  modified_base 6: mod_base = OTHER; note = 2'-fluorocytidine-3'-phosphate
  modified_base 7: mod_base = OTHER; note = 2'-O-methyladenosine-3'-phosphate
  modified_base 8: mod_base = OTHER; note = 2'-fluoroadenosine-3'-phosphate
  modified_base 9: mod_base = OTHER; note = 2'-fluoroadenosine-3'-phosphate
  modified_base 10: mod_base = OTHER; note = 2'-O-methyladenosine-3'-phosphate
  modified_base 11: mod_base = OTHER; note = 2'-O-methylguanosine-3'-phosphate
  modified_base 12: mod_base = OTHER; note = 2'-O-methylcytidine-3'-phosphate
  modified_base 13: mod_base = OTHER; note = 2'-O-methyladenosine-3'-phosphate
  modified_base 14: mod_base = OTHER; note = 2'-fluoroadenosine-3'-phosphate
  modified_base 15: mod_base = OTHER; note = 2'-O-methyladenosine-3'-phosphate
  modified_base 16: mod_base = OTHER; note = 2'-fluoroadenosine-3'-phosphate
  modified_base 17: mod_base = OTHER; note = 2'-O-methylcytidine-3'-phosphate
  modified_base 18: mod_base = OTHER; note = 2'-O-methyladenosine-3'-phosphate
  modified_base 19: mod_base = OTHER; note = 2'-O-methylguanosine-3'-phosphate
  modified_base 20: mod_base = OTHER; note = 2'-O-methylguanosine-3'-phosphate
  modified_base 21: mod_base = OTHER; note = 2'-O-methyluridine-3'-phosphorothioate
  modified_base 22: mod_base = OTHER; note = 2'-O-methylcytidine-3'-phosphorothioate
  modified_base 23: mod_base = OTHER; note = 2'-O-methyluridine
agttacaaaagcaaaacaggtct

SEQ ID NO: 1760 - RNA, 21 nt, synthetic construct
  source 1..21: mol_type = other RNA
  modified_base 1: mod_base = OTHER; note = 2'-O-methyladenosine-3'-phosphorothioate
  modified_base 2: mod_base = OTHER; note = 2'-O-methylcytidine-3'-phosphorothioate
  modified_base 3: mod_base = OTHER; note = 2'-O-methylcytidine-3'-phosphate
  modified_base 4: mod_base = OTHER; note = 2'-O-methyluridine-3'-phosphate
  modified_base 5: mod_base = OTHER; note = 2'-O-methylguanosine-3'-phosphate
  modified_base 6: mod_base = OTHER; note = 2'-O-methyluridine-3'-phosphate
  modified_base 7: mod_base = OTHER; note = 2'-fluorouridine-3'-phosphate
  modified_base 8: mod_base = OTHER; note = 2'-O-methyluridine-3'-phosphate
  modified_base 9: mod_base = OTHER; note = 2'-fluorouridine-3'-phosphate
  modified_base 10: mod_base = OTHER; note = 2'-fluoroguanosine-3'-phosphate
  modified_base 11: mod_base = OTHER; note = 2'-fluorocytidine-3'-phosphate
  modified_base 12: mod_base = OTHER; note = 2'-O-methyluridine-3'-phosphate
  modified_base 13: mod_base = OTHER; note = 2'-O-methyluridine-3'-phosphate
  modified_base 14: mod_base = OTHER; note = 2'-O-methyluridine-3'-phosphate
  modified_base 15: mod_base = OTHER; note = 2'-O-methyluridine-3'-phosphate
  modified_base 16: mod_base = OTHER; note = 2'-O-methylguanosine-3'-phosphate
  modified_base 17: mod_base = OTHER; note = 2'-O-methyluridine-3'-phosphate
  modified_base 18: mod_base = OTHER; note = 2'-O-methyladenosine-3'-phosphate
  modified_base 19: mod_base = OTHER; note = 2'-O-methyladenosine-3'-phosphate
  modified_base 20: mod_base = OTHER; note = 2'-O-methylcytidine-3'-phosphate
  modified_base 21: mod_base = OTHER; note = 2'-O-methyluridine
acctgttttgcttttgtaact

SEQ ID NO: 1761 - RNA, 23 nt, synthetic construct
  source 1..23: mol_type = other RNA
  modified_base 1: mod_base = OTHER; note = 5'-phosphate-2'-O-methyladenosine-3'-phosphorothioate
  modified_base 2: mod_base = OTHER; note = 2'-fluoroguanosine-3'-phosphorothioate
  modified_base 3: mod_base = OTHER; note = 2'-O-methyluridine-3'-phosphate
  modified_base 4: mod_base = OTHER; note = 2'-O-methyluridine-3'-phosphate
  modified_base 5: mod_base = OTHER; note = 2'-O-methyladenosine-3'-phosphate
  modified_base 6: mod_base = OTHER; note = 2'-fluorocytidine-3'-phosphate
  modified_base 7: mod_base = OTHER; note = 2'-O-methyladenosine-3'-phosphate
  modified_base 8: mod_base = OTHER; note = 2'-O-methyladenosine-3'-phosphate
  modified_base 9: mod_base = OTHER; note = 2'-O-methyladenosine-3'-phosphate
  modified_base 10: mod_base = OTHER; note = 2'-O-methyladenosine-3'-phosphate
  modified_base 11: mod_base = OTHER; note = 2'-O-methylguanosine-3'-phosphate
  modified_base 12: mod_base = OTHER; note = 2'-O-methylcytidine-3'-phosphate
  modified_base 13: mod_base = OTHER; note = 2'-O-methyladenosine-3'-phosphate
  modified_base 14: mod_base = OTHER; note = 2'-fluoroadenosine-3'-phosphate
  modified_base 15: mod_base = OTHER; note = 2'-O-methyladenosine-3'-phosphate
  modified_base 16: mod_base = OTHER; note = 2'-fluoroadenosine-3'-phosphate
  modified_base 17: mod_base = OTHER; note = 2'-O-methylcytidine-3'-phosphate
  modified_base 18: mod_base = OTHER; note = 2'-O-methyladenosine-3'-phosphate
  modified_base 19: mod_base = OTHER; note = 2'-O-methylguanosine-3'-phosphate
  modified_base 20: mod_base = OTHER; note = 2'-O-methylguanosine-3'-phosphate
  modified_base 21: mod_base = OTHER; note = 2'-O-methyluridine-3'-phosphorothioate
  modified_base 22: mod_base = OTHER; note = 2'-O-methylcytidine-3'-phosphorothioate
  modified_base 23: mod_base = OTHER; note = 2'-O-methyluridine
agttacaaaagcaaaacaggtct

SEQ ID NO: 1762 - RNA, 19 nt, synthetic construct
  source 1..19: mol_type = other RNA
ggttttgtagcatttttat

SEQ ID NO: 1763 - RNA, 21 nt, synthetic construct
  source 1..21: mol_type = other RNA
ataaaaatgctacaaaaccca

SEQ ID NO: 1764 - RNA, 21 nt, synthetic construct
  source 1..21: mol_type = other RNA
tgggttttgtagcatttttat

SEQ ID NO: 1765 - RNA, 23 nt, synthetic construct
  source 1..23: mol_type = other RNA
ataaaaatgctacaaaacccaga

SEQ ID NO: 1766 - RNA, 19 nt, synthetic construct
  source 1..19: mol_type = other RNA
  modified_base 1: mod_base = OTHER; note = 2'-O-methylguanosine-3'-phosphate
  modified_base 2: mod_base = OTHER; note = 2'-O-methylguanosine-3'-phosphate
  modified_base 3: mod_base = OTHER; note = 2'-O-methyluridine-3'-phosphate
  modified_base 4: mod_base = OTHER; note = 2'-O-methyluridine-3'-phosphate
  modified_base 5: mod_base = OTHER; note = 2'-O-methyluridine-3'-phosphate
  modified_base 6: mod_base = OTHER; note = 2'-O-methyluridine-3'-phosphate
  modified_base 7: mod_base = OTHER; note = 2'-fluoroguanosine-3'-phosphate
  modified_base 8: mod_base = OTHER; note = 2'-fluorouridine-3'-phosphate
  modified_base 9: mod_base = OTHER; note = 2'-fluoroadenosine-3'-phosphate
  modified_base 10: mod_base = OTHER; note = 2'-O-methylguanosine-3'-phosphate
  modified_base 11: mod_base = OTHER; note = 2'-O-methylcytidine-3'-phosphate
  modified_base 12: mod_base = OTHER; note = 2'-O-methyladenosine-3'-phosphate
  modified_base 13: mod_base = OTHER; note = 2'-O-methyluridine-3'-phosphate
  modified_base 14: mod_base = OTHER; note = 2'-O-methyluridine-3'-phosphate
  modified_base 15: mod_base = OTHER; note = 2'-O-methyluridine-3'-phosphate
  modified_base 16: mod_base = OTHER; note = 2'-O-methyluridine-3'-phosphate
  modified_base 17: mod_base = OTHER; note = 2'-O-methyluridine-3'-phosphate
  modified_base 18: mod_base = OTHER; note = 2'-O-methyladenosine-3'-phosphate
  modified_base 19: mod_base = OTHER; note = 2'-O-methyluridine
ggttttgtagcatttttat

SEQ ID NO: 1767 - RNA, 21 nt, synthetic construct
  source 1..21: mol_type = other RNA
  modified_base 1: mod_base = OTHER; note = 2'-O-methyladenosine-3'-phosphate
  modified_base 2: mod_base = OTHER; note = 2'-fluorouridine-3'-phosphate
  modified_base 3: mod_base = OTHER; note = 2'-O-methyladenosine-3'-phosphate
  modified_base 4: mod_base = OTHER; note = 2'-O-methyladenosine-3'-phosphate
  modified_base 5: mod_base = OTHER; note = 2'-O-methyladenosine-3'-phosphate
  modified_base 6: mod_base = OTHER; note = 2'-fluoroadenosine-3'-phosphate
  modified_base 7: mod_base = OTHER; note = 2'-O-methyladenosine-3'-phosphate
  modified_base 8: mod_base = OTHER; note = 2'-O-methyluridine-3'-phosphate
  modified_base 9: mod_base = OTHER; note = 2'-O-methylguanosine-3'-phosphate
  modified_base 10: mod_base = OTHER; note = 2'-O-methylcytidine-3'-phosphate
  modified_base 11: mod_base = OTHER; note = 2'-O-methyluridine-3'-phosphate
  modified_base 12: mod_base = OTHER; note = 2'-O-methyladenosine-3'-phosphate
  modified_base 13: mod_base = OTHER; note = 2'-O-methylcytidine-3'-phosphate
  modified_base 14: mod_base = OTHER; note = 2'-fluoroadenosine-3'-phosphate
  modified_base 15: mod_base = OTHER; note = 2'-O-methyladenosine-3'-phosphate
  modified_base 16: mod_base = OTHER; note = 2'-fluoroadenosine-3'-phosphate
  modified_base 17: mod_base = OTHER; note = 2'-O-methyladenosine-3'-phosphate
  modified_base 18: mod_base = OTHER; note = 2'-O-methylcytidine-3'-phosphate
  modified_base 19: mod_base = OTHER; note = 2'-O-methylcytidine-3'-phosphate
  modified_base 20: mod_base = OTHER; note = 2'-O-methylcytidine-3'-phosphate
  modified_base 21: mod_base = OTHER; note = 2'-O-methyladenosine
ataaaaatgctacaaaaccca

SEQ ID NO: 1768 - RNA, 19 nt, synthetic construct
  source 1..19: mol_type = other RNA
  modified_base 1: mod_base = OTHER; note = 2'-O-methylguanosine-3'-phosphate
  modified_base 2: mod_base = OTHER; note = 2'-O-methylguanosine-3'-phosphate
  modified_base 3: mod_base = OTHER; note = 2'-O-methyluridine-3'-phosphate
  modified_base 4: mod_base = OTHER; note = 2'-O-methyluridine-3'-phosphate
  modified_base 5: mod_base = OTHER; note = 2'-fluorouridine-3'-phosphate
  modified_base 6: mod_base = OTHER; note = 2'-O-methyluridine-3'-phosphate
  modified_base 7: mod_base = OTHER; note = 2'-fluoroguanosine-3'-phosphate
  modified_base 8: mod_base = OTHER; note = 2'-fluorouridine-3'-phosphate
  modified_base 9: mod_base = OTHER; note = 2'-fluoroadenosine-3'-phosphate
  modified_base 10: mod_base = OTHER; note = 2'-O-methylguanosine-3'-phosphate
  modified_base 11: mod_base = OTHER; note = 2'-O-methylcytidine-3'-phosphate
  modified_base 12: mod_base = OTHER; note = 2'-O-methyladenosine-3'-phosphate
  modified_base 13: mod_base = OTHER; note = 2'-O-methyluridine-3'-phosphate
  modified_base 14: mod_base = OTHER; note = 2'-O-methyluridine-3'-phosphate
  modified_base 15: mod_base = OTHER; note = 2'-O-methyluridine-3'-phosphate
  modified_base 16: mod_base = OTHER; note = 2'-O-methyluridine-3'-phosphate
  modified_base 17: mod_base = OTHER; note = 2'-O-methyluridine-3'-phosphate
  modified_base 18: mod_base = OTHER; note = 2'-O-methyladenosine-3'-phosphate
  modified_base 19: mod_base = OTHER; note = 2'-O-methyluridine
ggttttgtagcatttttat

SEQ ID NO: 1769 - RNA, 21 nt, synthetic construct
  source 1..21: mol_type = other RNA
  modified_base 1: mod_base = OTHER; note = 2'-O-methyladenosine-3'-phosphate
  modified_base 2: mod_base = OTHER; note = 2'-fluorouridine-3'-phosphate
  modified_base 3: mod_base = OTHER; note = 2'-O-methyladenosine-3'-phosphate
  modified_base 4: mod_base = OTHER; note = 2'-O-methyladenosine-3'-phosphate
  modified_base 5: mod_base = OTHER; note = 2'-O-methyladenosine-3'-phosphate
  modified_base 6: mod_base = OTHER; note = 2'-fluoroadenosine-3'-phosphate
  modified_base 7: mod_base = OTHER; note = 2'-O-methyladenosine-3'-phosphate
  modified_base 8: mod_base = OTHER; note = 2'-fluorouridine-3'-phosphate
  modified_base 9: mod_base = OTHER; note = 2'-fluoroguanosine-3'-phosphate
  modified_base 10: mod_base = OTHER; note = 2'-O-methylcytidine-3'-phosphate
  modified_base 11: mod_base = OTHER; note = 2'-O-methyluridine-3'-phosphate
  modified_base 12: mod_base = OTHER; note = 2'-O-methyladenosine-3'-phosphate
  modified_base 13: mod_base = OTHER; note = 2'-O-methylcytidine-3'-phosphate
  modified_base 14: mod_base = OTHER; note = 2'-fluoroadenosine-3'-phosphate
  modified_base 15: mod_base = OTHER; note = 2'-O-methyladenosine-3'-phosphate
  modified_base 16: mod_base = OTHER; note = 2'-fluoroadenosine-3'-phosphate
  modified_base 17: mod_base = OTHER; note = 2'-O-methyladenosine-3'-phosphate
  modified_base 18: mod_base = OTHER; note = 2'-O-methylcytidine-3'-phosphate
  modified_base 19: mod_base = OTHER; note = 2'-O-methylcytidine-3'-phosphate
  modified_base 20: mod_base = OTHER; note = 2'-O-methylcytidine-3'-phosphate
  modified_base 21: mod_base = OTHER; note = 2'-O-methyladenosine
ataaaaatgctacaaaaccca

SEQ ID NO: 1770 - RNA, 19 nt, synthetic construct
  source 1..19: mol_type = other RNA
  modified_base 1: mod_base = OTHER; note = 2'-O-methylguanosine-3'-phosphate
  modified_base 2: mod_base = OTHER; note = 2'-O-methylguanosine-3'-phosphate
  modified_base 3: mod_base = OTHER; note = 2'-O-methyluridine-3'-phosphate
  modified_base 4: mod_base = OTHER; note = 2'-O-methyluridine-3'-phosphate
  modified_base 5: mod_base = OTHER; note = 2'-fluorouridine-3'-phosphate
  modified_base 6: mod_base = OTHER; note = 2'-O-methyluridine-3'-phosphate
  modified_base 7: mod_base = OTHER; note = 2'-fluoroguanosine-3'-phosphate
  modified_base 8: mod_base = OTHER; note = 2'-fluorouridine-3'-phosphate
  modified_base 9: mod_base = OTHER; note = 2'-fluoroadenosine-3'-phosphate
  modified_base 10: mod_base = OTHER; note = 2'-O-methylguanosine-3'-phosphate
  modified_base 11: mod_base = OTHER; note = 2'-O-methylcytidine-3'-phosphate
  modified_base 12: mod_base = OTHER; note = 2'-O-methyladenosine-3'-phosphate
  modified_base 13: mod_base = OTHER; note = 2'-O-methyluridine-3'-phosphate
  modified_base 14: mod_base = OTHER; note = 2'-O-methyluridine-3'-phosphate
  modified_base 15: mod_base = OTHER; note = 2'-O-methyluridine-3'-phosphate
  modified_base 16: mod_base = OTHER; note = 2'-O-methyluridine-3'-phosphate
  modified_base 17: mod_base = OTHER; note = 2'-O-methyluridine-3'-phosphate
  modified_base 18: mod_base = OTHER; note = 2'-O-methyladenosine-3'-phosphate
  modified_base 19: mod_base = OTHER; note = 2'-O-methyluridine
ggttttgtagcatttttat

SEQ ID NO: 1771 - RNA, 21 nt, synthetic construct
  source 1..21: mol_type = other RNA
  modified_base 1: mod_base = OTHER; note = 2'-O-methyladenosine-3'-phosphate
  modified_base 2: mod_base = OTHER; note = 2'-fluorouridine-3'-phosphate
  modified_base 3: mod_base = OTHER; note = 2'-O-methyladenosine-3'-phosphate
  modified_base 4: mod_base = OTHER; note = 2'-O-methyladenosine-3'-phosphate
  modified_base 5: mod_base = OTHER; note = 2'-O-methyladenosine-3'-phosphate
  modified_base 6: mod_base = OTHER; note = 2'-fluoroadenosine-3'-phosphate
  modified_base 7: mod_base = OTHER; note = 2'-O-methyladenosine-3'-phosphate
  modified_base 8: mod_base = OTHER; note = 2'-O-methyluridine-3'-phosphate
  modified_base 9: mod_base = OTHER; note = 2'-O-methylguanosine-3'-phosphate
  modified_base 10: mod_base = OTHER; note = 2'-O-methylcytidine-3'-phosphate
  modified_base 11: mod_base = OTHER; note = 2'-O-methyluridine-3'-phosphate
  modified_base 12: mod_base = OTHER; note = 2'-O-methyladenosine-3'-phosphate
  modified_base 13: mod_base = OTHER; note = 2'-O-methylcytidine-3'-phosphate
  modified_base 14: mod_base = OTHER; note = 2'-fluoroadenosine-3'-phosphate
  modified_base 15: mod_base = OTHER; note = 2'-O-methyladenosine-3'-phosphate
  modified_base 16: mod_base = OTHER; note = 2'-fluoroadenosine-3'-phosphate
  modified_base 17: mod_base = OTHER; note = 2'-O-methyladenosine-3'-phosphate
  modified_base 18: mod_base = OTHER; note = 2'-O-methylcytidine-3'-phosphate
  modified_base 19: mod_base = OTHER; note = 2'-O-methylcytidine-3'-phosphate
  modified_base 20: mod_base = OTHER; note = 2'-O-methylcytidine-3'-phosphate
  modified_base 21: mod_base = OTHER; note = 2'-O-methyladenosine
ataaaaatgctacaaaaccca

SEQ ID NO: 1772 - RNA, 21 nt, synthetic construct
  source 1..21: mol_type = other RNA
  modified_base 1: mod_base = OTHER; note = 2'-O-methyluridine-3'-phosphate
  modified_base 2: mod_base = OTHER; note = 2'-O-methylguanosine-3'-phosphate
  modified_base 3: mod_base = OTHER; note = 2'-O-methylguanosine-3'-phosphate
  modified_base 4: mod_base = OTHER; note = 2'-O-methylguanosine-3'-phosphate
  modified_base 5: mod_base = OTHER; note = 2'-O-methyluridine-3'-phosphate
  modified_base 6: mod_base = OTHER; note = 2'-O-methyluridine-3'-phosphate
  modified_base 7: mod_base = OTHER; note = 2'-O-methyluridine-3'-phosphate
  modified_base 8: mod_base = OTHER; note = 2'-O-methyluridine-3'-phosphate
  modified_base 9: mod_base = OTHER; note = 2'-fluoroguanosine-3'-phosphate
  modified_base 10: mod_base = OTHER; note = 2'-fluorouridine-3'-phosphate
  modified_base 11: mod_base = OTHER; note = 2'-fluoroadenosine-3'-phosphate
  modified_base 12: mod_base = OTHER; note = 2'-O-methylguanosine-3'-phosphate
  modified_base 13: mod_base = OTHER; note = 2'-O-methylcytidine-3'-phosphate
  modified_base 14: mod_base = OTHER; note = 2'-O-methyladenosine-3'-phosphate
  modified_base 15: mod_base = OTHER; note = 2'-O-methyluridine-3'-phosphate
  modified_base 16: mod_base = OTHER; note = 2'-O-methyluridine-3'-phosphate
  modified_base 17: mod_base = OTHER; note = 2'-O-methyluridine-3'-phosphate
  modified_base 18: mod_base = OTHER; note = 2'-O-methyluridine-3'-phosphate
  modified_base 19: mod_base = OTHER; note = 2'-O-methyluridine-3'-phosphate
  modified_base 20: mod_base = OTHER; note = 2'-O-methyladenosine-3'-phosphate
  modified_base 21: mod_base = OTHER; note = 2'-O-methyluridine
tgggttttgtagcatttttat

SEQ ID NO: 1773 - RNA, 23 nt, synthetic construct
  source 1..23: mol_type = other RNA
  modified_base 1: mod_base = OTHER; note = 2'-O-methyladenosine-3'-phosphate
  modified_base 2: mod_base = OTHER; note = 2'-fluorouridine-3'-phosphate
  modified_base 3: mod_base = OTHER; note = 2'-O-methyladenosine-3'-phosphate
  modified_base 4: mod_base = OTHER; note = 2'-O-methyladenosine-3'-phosphate
  modified_base 5: mod_base = OTHER; note = 2'-O-methyladenosine-3'-phosphate
  modified_base 6: mod_base = OTHER; note = 2'-fluoroadenosine-3'-phosphate
  modified_base 7: mod_base = OTHER; note = 2'-O-methyladenosine-3'-phosphate
  modified_base 8: mod_base = OTHER; note = 2'-O-methyluridine-3'-phosphate
  modified_base 9: mod_base = OTHER; note = 2'-O-methylguanosine-3'-phosphate
  modified_base 10: mod_base = OTHER; note = 2'-O-methylcytidine-3'-phosphate
  modified_base 11: mod_base = OTHER; note = 2'-O-methyluridine-3'-phosphate
  modified_base 12: mod_base = OTHER; note = 2'-O-methyladenosine-3'-phosphate
  modified_base 13: mod_base = OTHER; note = 2'-O-methylcytidine-3'-phosphate
  modified_base 14: mod_base = OTHER; note = 2'-fluoroadenosine-3'-phosphate
  modified_base 15: mod_base = OTHER; note = 2'-O-methyladenosine-3'-phosphate
  modified_base 16: mod_base = OTHER; note = 2'-fluoroadenosine-3'-phosphate
  modified_base 17: mod_base = OTHER; note = 2'-O-methyladenosine-3'-phosphate
  modified_base 18: mod_base = OTHER; note = 2'-O-methylcytidine-3'-phosphate
  modified_base 19: mod_base = OTHER; note = 2'-O-methylcytidine-3'-phosphate
  modified_base 20: mod_base = OTHER; note = 2'-O-methylcytidine-3'-phosphate
  modified_base 21: mod_base = OTHER; note = 2'-O-methyladenosine-3'-phosphate
  modified_base 22: mod_base = OTHER; note = 2'-O-methylguanosine-3'-phosphate
  modified_base 23: mod_base = OTHER; note = 2'-O-methyladenosine
ataaaaatgctacaaaacccaga

SEQ ID NO: 1774 - RNA, 21 nt, synthetic construct
  source 1..21: mol_type = other RNA
  modified_base 1: mod_base = OTHER; note = 2'-O-methyluridine-3'-phosphate
  modified_base 2: mod_base = OTHER; note = 2'-O-methylguanosine-3'-phosphate
  modified_base 3: mod_base = OTHER; note = 2'-O-methylguanosine-3'-phosphate
  modified_base 4: mod_base = OTHER; note = 2'-O-methylguanosine-3'-phosphate
  modified_base 5: mod_base = OTHER; note = 2'-O-methyluridine-3'-phosphate
  modified_base 6: mod_base = OTHER; note = 2'-O-methyluridine-3'-phosphate
  modified_base 7: mod_base = OTHER; note = 2'-fluorouridine-3'-phosphate
  modified_base 8: mod_base = OTHER; note = 2'-O-methyluridine-3'-phosphate
  modified_base 9: mod_base = OTHER; note = 2'-fluoroguanosine-3'-phosphate
  modified_base 10: mod_base = OTHER; note = 2'-fluorouridine-3'-phosphate
  modified_base 11: mod_base = OTHER; note = 2'-fluoroadenosine-3'-phosphate
  modified_base 12: mod_base = OTHER; note = 2'-O-methylguanosine-3'-phosphate
  modified_base 13: mod_base = OTHER; note = 2'-O-methylcytidine-3'-phosphate
  modified_base 14: mod_base = OTHER; note = 2'-O-methyladenosine-3'-phosphate
  modified_base 15: mod_base = OTHER; note = 2'-O-methyluridine-3'-phosphate
  modified_base 16: mod_base = OTHER; note = 2'-O-methyluridine-3'-phosphate
  modified_base 17: mod_base = OTHER; note = 2'-O-methyluridine-3'-phosphate
  modified_base 18: mod_base = OTHER; note = 2'-O-methyluridine-3'-phosphate
  modified_base 19: mod_base = OTHER; note = 2'-O-methyluridine-3'-phosphate
  modified_base 20: mod_base = OTHER; note = 2'-O-methyladenosine-3'-phosphate
  modified_base 21: mod_base = OTHER; note = 2'-O-methyluridine
tgggttttgtagcatttttat

SEQ ID NO: 1775 - RNA, 23 nt, synthetic construct
  source 1..23: mol_type = other RNA
  modified_base 1: mod_base = OTHER; note = 2'-O-methyladenosine-3'-phosphate
  modified_base 2: mod_base = OTHER; note = 2'-fluorouridine-3'-phosphate
  modified_base 3: mod_base = OTHER; note = 2'-O-methyladenosine-3'-phosphate
  modified_base 4: mod_base = OTHER; note = 2'-O-methyladenosine-3'-phosphate
  modified_base 5: mod_base = OTHER; note = 2'-O-methyladenosine-3'-phosphate
  modified_base 6: mod_base = OTHER; note = 2'-fluoroadenosine-3'-phosphate
  modified_base 7: mod_base = OTHER; note = 2'-O-methyladenosine-3'-phosphate
  modified_base 8: mod_base = OTHER; note = 2'-fluorouridine-3'-phosphate
  modified_base 9: mod_base = OTHER; note = 2'-fluoroguanosine-3'-phosphate
  modified_base 10: mod_base = OTHER; note = 2'-O-methylcytidine-3'-phosphate
  modified_base 11: mod_base = OTHER; note = 2'-O-methyluridine-3'-phosphate
  modified_base 12: mod_base = OTHER; note = 2'-O-methyladenosine-3'-phosphate
  modified_base 13: mod_base = OTHER; note = 2'-O-methylcytidine-3'-phosphate
  modified_base 14: mod_base = OTHER; note = 2'-fluoroadenosine-3'-phosphate
  modified_base 15: mod_base = OTHER; note = 2'-O-methyladenosine-3'-phosphate
  modified_base 16: mod_base = OTHER; note = 2'-fluoroadenosine-3'-phosphate
  modified_base 17: mod_base = OTHER; note = 2'-O-methyladenosine-3'-phosphate
  modified_base 18: mod_base = OTHER; note = 2'-O-methylcytidine-3'-phosphate
  modified_base 19: mod_base = OTHER; note = 2'-O-methylcytidine-3'-phosphate
  modified_base 20: mod_base = OTHER; note = 2'-O-methylcytidine-3'-phosphate
  modified_base 21: mod_base = OTHER; note = 2'-O-methyladenosine-3'-phosphate
  modified_base 22: mod_base = OTHER; note = 2'-O-methylguanosine-3'-phosphate
  modified_base 23: mod_base = OTHER; note = 2'-O-methyladenosine
ataaaaatgctacaaaacccaga

SEQ ID NO: 1776 - RNA, 21 nt, synthetic construct
  source 1..21: mol_type = other RNA
  modified_base 1: mod_base = OTHER; note = 2'-O-methyluridine-3'-phosphate
  modified_base 2: mod_base = OTHER; note = 2'-O-methylguanosine-3'-phosphate
  modified_base 3: mod_base = OTHER; note = 2'-O-methylguanosine-3'-phosphate
  modified_base 4: mod_base = OTHER; note = 2'-O-methylguanosine-3'-phosphate
  modified_base 5: mod_base = OTHER; note = 2'-O-methyluridine-3'-phosphate
  modified_base 6: mod_base = OTHER; note = 2'-O-methyluridine-3'-phosphate
  modified_base 7: mod_base = OTHER; note = 2'-fluorouridine-3'-phosphate
  modified_base 8: mod_base = OTHER; note = 2'-O-methyluridine-3'-phosphate
  modified_base 9: mod_base = OTHER; note = 2'-fluoroguanosine-3'-phosphate
  modified_base 10: mod_base = OTHER; note = 2'-fluorouridine-3'-phosphate
  modified_base 11: mod_base = OTHER; note = 2'-fluoroadenosine-3'-phosphate
  modified_base 12: mod_base = OTHER; note = 2'-O-methylguanosine-3'-phosphate
  modified_base 13: mod_base = OTHER; note = 2'-O-methylcytidine-3'-phosphate
  modified_base 14: mod_base = OTHER; note = 2'-O-methyladenosine-3'-phosphate
  modified_base 15: mod_base = OTHER; note = 2'-O-methyluridine-3'-phosphate
  modified_base 16: mod_base = OTHER; note = 2'-O-methyluridine-3'-phosphate
  modified_base 17: mod_base = OTHER; note = 2'-O-methyluridine-3'-phosphate
  modified_base 18: mod_base = OTHER; note = 2'-O-methyluridine-3'-phosphate
  modified_base 19: mod_base = OTHER; note = 2'-O-methyluridine-3'-phosphate
  modified_base 20: mod_base = OTHER; note = 2'-O-methyladenosine-3'-phosphate
  modified_base 21: mod_base = OTHER; note = 2'-O-methyluridine
tgggttttgtagcatttttat

SEQ ID NO: 1777 - RNA, 23 nt, synthetic construct
  source 1..23: mol_type = other RNA
  modified_base 1: mod_base = OTHER; note = 2'-O-methyladenosine-3'-phosphate
  modified_base 2: mod_base = OTHER; note = 2'-fluorouridine-3'-phosphate
  modified_base 3: mod_base = OTHER; note = 2'-O-methyladenosine-3'-phosphate
  modified_base 4: mod_base = OTHER; note = 2'-O-methyladenosine-3'-phosphate
  modified_base 5: mod_base = OTHER; note = 2'-O-methyladenosine-3'-phosphate
  modified_base 6: mod_base = OTHER; note = 2'-fluoroadenosine-3'-phosphate
  modified_base 7: mod_base = OTHER; note = 2'-O-methyladenosine-3'-phosphate
  modified_base 8: mod_base = OTHER; note = 2'-O-methyluridine-3'-phosphate
  modified_base 9: mod_base = OTHER; note = 2'-O-methylguanosine-3'-phosphate
  modified_base 10: mod_base = OTHER; note = 2'-O-methylcytidine-3'-phosphate
  modified_base 11: mod_base = OTHER; note = 2'-O-methyluridine-3'-phosphate
  modified_base 12: mod_base = OTHER; note = 2'-O-methyladenosine-3'-phosphate
  modified_base 13: mod_base = OTHER; note = 2'-O-methylcytidine-3'-phosphate
  modified_base 14: mod_base = OTHER; note = 2'-fluoroadenosine-3'-phosphate
  modified_base 15: mod_base = OTHER; note = 2'-O-methyladenosine-3'-phosphate
  modified_base 16: mod_base = OTHER; note = 2'-fluoroadenosine-3'-phosphate
  modified_base 17: mod_base = OTHER; note = 2'-O-methyladenosine-3'-phosphate
  modified_base 18: mod_base = OTHER; note = 2'-O-methylcytidine-3'-phosphate
  modified_base 19: mod_base = OTHER; note = 2'-O-methylcytidine-3'-phosphate
  modified_base 20: mod_base = OTHER; note = 2'-O-methylcytidine-3'-phosphate
  modified_base 21: mod_base = OTHER; note = 2'-O-methyladenosine-3'-phosphate
  modified_base 22: mod_base = OTHER; note = 2'-O-methylguanosine-3'-phosphate
  modified_base 23: mod_base = OTHER; note = 2'-O-methyladenosine
ataaaaatgctacaaaacccaga

SEQ ID NO: 1778 - RNA, 19 nt, synthetic construct
  source 1..19: mol_type = other RNA
  modified_base 1: mod_base = OTHER; note = 2'-O-methylguanosine-3'-phosphorothioate
  modified_base 2: mod_base = OTHER; note = 2'-O-methylguanosine-3'-phosphorothioate
  modified_base 3: mod_base = OTHER; note = 2'-O-methyluridine-3'-phosphate
  modified_base 4: mod_base = OTHER; note = 2'-O-methyluridine-3'-phosphate
  modified_base 5: mod_base = OTHER; note = 2'-O-methyluridine-3'-phosphate
  modified_base 6: mod_base = OTHER; note = 2'-O-methyluridine-3'-phosphate
  modified_base 7: mod_base = OTHER; note = 2'-fluoroguanosine-3'-phosphate
  modified_base 8: mod_base = OTHER; note = 2'-fluorouridine-3'-phosphate
  modified_base 9: mod_base = OTHER; note = 2'-fluoroadenosine-3'-phosphate
  modified_base 10: mod_base = OTHER; note = 2'-O-methylguanosine-3'-phosphate
  modified_base 11: mod_base = OTHER; note = 2'-O-methylcytidine-3'-phosphate
  modified_base 12: mod_base = OTHER; note = 2'-O-methyladenosine-3'-phosphate
  modified_base 13: mod_base = OTHER; note = 2'-O-methyluridine-3'-phosphate
  modified_base 14: mod_base = OTHER; note = 2'-O-methyluridine-3'-phosphate
  modified_base 15: mod_base = OTHER; note = 2'-O-methyluridine-3'-phosphate
  modified_base 16: mod_base = OTHER; note = 2'-O-methyluridine-3'-phosphate
  modified_base 17: mod_base = OTHER; note = 2'-O-methyluridine-3'-phosphate
  modified_base 18: mod_base = OTHER; note = 2'-O-methyladenosine-3'-phosphate
  modified_base 19: mod_base = OTHER; note = 2'-O-methyluridine
ggttttgtagcatttttat

SEQ ID NO: 1779 - RNA, 21 nt, synthetic construct
  source 1..21: mol_type = other RNA
  modified_base 1: mod_base = OTHER; note = 2'-O-methyladenosine-3'-phosphorothioate
  modified_base 2: mod_base = OTHER; note = 2'-fluorouridine-3'-phosphorothioate
  modified_base 3: mod_base = OTHER; note = 2'-O-methyladenosine-3'-phosphate
  modified_base 4: mod_base = OTHER; note = 2'-O-methyladenosine-3'-phosphate
  modified_base 5: mod_base = OTHER; note = 2'-O-methyladenosine-3'-phosphate
  modified_base 6: mod_base = OTHER; note = 2'-fluoroadenosine-3'-phosphate
  modified_base 7: mod_base = OTHER; note = 2'-O-methyladenosine-3'-phosphate
  modified_base 8: mod_base = OTHER; note = 2'-O-methyluridine-3'-phosphate
  modified_base 9: mod_base = OTHER; note = 2'-O-methylguanosine-3'-phosphate
  modified_base 10: mod_base = OTHER; note = 2'-O-methylcytidine-3'-phosphate
  modified_base 11: mod_base = OTHER; note = 2'-O-methyluridine-3'-phosphate
  modified_base 12: mod_base = OTHER; note = 2'-O-methyladenosine-3'-phosphate
  modified_base 13: mod_base = OTHER; note = 2'-O-methylcytidine-3'-phosphate
  modified_base 14: mod_base = OTHER; note = 2'-fluoroadenosine-3'-phosphate
  modified_base 15: mod_base = OTHER; note = 2'-O-methyladenosine-3'-phosphate
  modified_base 16: mod_base = OTHER; note = 2'-fluoroadenosine-3'-phosphate
  modified_base 17: mod_base = OTHER; note = 2'-O-methyladenosine-3'-phosphate
  modified_base 18: mod_base = OTHER; note = 2'-O-methylcytidine-3'-phosphate
  modified_base 19: mod_base = OTHER; note = 2'-O-methylcytidine-3'-phosphorothioate
  modified_base 20: mod_base = OTHER; note = 2'-O-methylcytidine-3'-phosphorothioate
  modified_base 21: mod_base = OTHER; note = 2'-O-methyladenosine
ataaaaatgctacaaaaccca

SEQ ID NO: 1780 - RNA, 19 nt, synthetic construct
  source 1..19: mol_type = other RNA
  modified_base 1: mod_base = OTHER; note = 2'-O-methylguanosine-3'-phosphorothioate
  modified_base 2: mod_base = OTHER; note = 2'-O-methylguanosine-3'-phosphorothioate
  modified_base 3: mod_base = OTHER; note = 2'-O-methyluridine-3'-phosphate
  modified_base 4: mod_base = OTHER; note = 2'-O-methyluridine-3'-phosphate
  modified_base 5: mod_base = OTHER; note = 2'-fluorouridine-3'-phosphate
  modified_base 6: mod_base = OTHER; note = 2'-O-methyluridine-3'-phosphate
  modified_base 7: mod_base = OTHER; note = 2'-fluoroguanosine-3'-phosphate
  modified_base 8: mod_base = OTHER; note = 2'-fluorouridine-3'-phosphate
  modified_base 9: mod_base = OTHER; note = 2'-fluoroadenosine-3'-phosphate
  modified_base 10: mod_base = OTHER; note = 2'-O-methylguanosine-3'-phosphate
  modified_base 11: mod_base = OTHER; note = 2'-O-methylcytidine-3'-phosphate
  modified_base 12: mod_base = OTHER; note = 2'-O-methyladenosine-3'-phosphate
  modified_base 13: mod_base = OTHER; note = 2'-O-methyluridine-3'-phosphate
  modified_base 14: mod_base = OTHER; note = 2'-O-methyluridine-3'-phosphate
  modified_base 15: mod_base = OTHER; note = 2'-O-methyluridine-3'-phosphate
  modified_base 16: mod_base = OTHER; note = 2'-O-methyluridine-3'-phosphate
  modified_base 17: mod_base = OTHER; note = 2'-O-methyluridine-3'-phosphate
  modified_base 18: mod_base = OTHER; note = 2'-O-methyladenosine-3'-phosphate
  modified_base 19: mod_base = OTHER; note = 2'-O-methyluridine
ggttttgtagcatttttat

SEQ ID NO: 1781 - RNA, 21 nt, synthetic construct
  source 1..21: mol_type = other RNA
  modified_base 1: mod_base = OTHER; note = 2'-O-methyladenosine-3'-phosphorothioate
  modified_base 2: mod_base = OTHER; note = 2'-fluorouridine-3'-phosphorothioate
  modified_base 3: mod_base = OTHER; note = 2'-O-methyladenosine-3'-phosphate
  modified_base 4: mod_base = OTHER; note = 2'-O-methyladenosine-3'-phosphate
  modified_base 5: mod_base = OTHER; note = 2'-O-methyladenosine-3'-phosphate
  modified_base 6: mod_base = OTHER; note = 2'-fluoroadenosine-3'-phosphate
  modified_base 7: mod_base = OTHER; note = 2'-O-methyladenosine-3'-phosphate
  modified_base 8: mod_base = OTHER; note = 2'-fluorouridine-3'-phosphate
  modified_base 9: mod_base = OTHER; note = 2'-fluoroguanosine-3'-phosphate
  modified_base 10: mod_base = OTHER; note = 2'-O-methylcytidine-3'-phosphate
  modified_base 11: mod_base = OTHER; note = 2'-O-methyluridine-3'-phosphate
  modified_base 12: mod_base = OTHER; note = 2'-O-methyladenosine-3'-phosphate
  modified_base 13: mod_base = OTHER; note = 2'-O-methylcytidine-3'-phosphate
  modified_base 14: mod_base = OTHER; note = 2'-fluoroadenosine-3'-phosphate
  modified_base 15: mod_base = OTHER; note = 2'-O-methyladenosine-3'-phosphate
  modified_base 16: mod_base = OTHER; note = 2'-fluoroadenosine-3'-phosphate
  modified_base 17: mod_base = OTHER; note = 2'-O-methyladenosine-3'-phosphate
  modified_base 18: mod_base = OTHER; note = 2'-O-methylcytidine-3'-phosphate
  modified_base 19: mod_base = OTHER; note = 2'-O-methylcytidine-3'-phosphorothioate
  modified_base 20: mod_base = OTHER; note = 2'-O-methylcytidine-3'-phosphorothioate
  modified_base 21: mod_base = OTHER; note = 2'-O-methyladenosine
ataaaaatgctacaaaaccca

SEQ ID NO: 1782 - RNA, 19 nt, synthetic construct
  source 1..19: mol_type = other RNA
  modified_base 1: mod_base = OTHER; note = 2'-O-methylguanosine-3'-phosphorothioate
  modified_base 2: mod_base = OTHER; note = 2'-O-methylguanosine-3'-phosphorothioate
  modified_base 3: mod_base = OTHER; note = 2'-O-methyluridine-3'-phosphate
  modified_base 4: mod_base = OTHER; note = 2'-O-methyluridine-3'-phosphate
  modified_base 5: mod_base = OTHER; note = 2'-fluorouridine-3'-phosphate
  modified_base 6: mod_base = OTHER; note = 2'-O-methyluridine-3'-phosphate
  modified_base 7: mod_base = OTHER; note = 2'-fluoroguanosine-3'-phosphate
  modified_base 8: mod_base = OTHER; note = 2'-fluorouridine-3'-phosphate
  modified_base 9: mod_base = OTHER; note = 2'-fluoroadenosine-3'-phosphate
  modified_base 10: mod_base = OTHER; note = 2'-O-methylguanosine-3'-phosphate
  modified_base 11: mod_base = OTHER; note = 2'-O-methylcytidine-3'-phosphate
  modified_base 12: mod_base = OTHER; note = 2'-O-methyladenosine-3'-phosphate
  modified_base 13: mod_base = OTHER; note = 2'-O-methyluridine-3'-phosphate
  modified_base 14: mod_base = OTHER; note = 2'-O-methyluridine-3'-phosphate
  modified_base 15: mod_base = OTHER; note = 2'-O-methyluridine-3'-phosphate
  modified_base 16: mod_base = OTHER; note = 2'-O-methyluridine-3'-phosphate
  modified_base 17: mod_base = OTHER; note = 2'-O-methyluridine-3'-phosphate
  modified_base 18: mod_base = OTHER; note = 2'-O-methyladenosine-3'-phosphate
  modified_base 19: mod_base = OTHER; note = 2'-O-methyluridine
ggttttgtagcatttttat

SEQ ID NO: 1783 - RNA, 21 nt, synthetic construct
  source 1..21: mol_type = other RNA
  modified_base 1: mod_base = OTHER; note = 2'-O-methyladenosine-3'-phosphorothioate
  modified_base 2: mod_base = OTHER; note = 2'-fluorouridine-3'-phosphorothioate
  modified_base 3: mod_base = OTHER; note = 2'-O-methyladenosine-3'-phosphate
  modified_base 4: mod_base = OTHER; note = 2'-O-methyladenosine-3'-phosphate
  modified_base 5: mod_base = OTHER; note = 2'-O-methyladenosine-3'-phosphate
  modified_base 6: mod_base = OTHER; note = 2'-fluoroadenosine-3'-phosphate
  modified_base 7: mod_base = OTHER; note = 2'-O-methyladenosine-3'-phosphate
  modified_base 8: mod_base = OTHER; note = 2'-O-methyluridine-3'-phosphate
  modified_base 9: mod_base = OTHER; note = 2'-O-methylguanosine-3'-phosphate
  modified_base 10: mod_base = OTHER; note = 2'-O-methylcytidine-3'-phosphate
  modified_base 11: mod_base = OTHER; note = 2'-O-methyluridine-3'-phosphate
  modified_base 12: mod_base = OTHER; note = 2'-O-methyladenosine-3'-phosphate
  modified_base 13: mod_base = OTHER; note = 2'-O-methylcytidine-3'-phosphate
  modified_base 14: mod_base = OTHER; note = 2'-fluoroadenosine-3'-phosphate
  modified_base 15: mod_base = OTHER; note = 2'-O-methyladenosine-3'-phosphate
  modified_base 16: mod_base = OTHER; note = 2'-fluoroadenosine-3'-phosphate
  modified_base 17: mod_base = OTHER; note = 2'-O-methyladenosine-3'-phosphate
  modified_base 18: mod_base = OTHER; note = 2'-O-methylcytidine-3'-phosphate
  modified_base 19: mod_base = OTHER; note = 2'-O-methylcytidine-3'-phosphorothioate
  modified_base 20: mod_base = OTHER; note = 2'-O-methylcytidine-3'-phosphorothioate
  modified_base 21: mod_base = OTHER; note = 2'-O-methyladenosine
ataaaaatgctacaaaaccca

SEQ ID NO: 1784 - RNA, 21 nt, synthetic construct
  source 1..21: mol_type = other RNA
  modified_base 1: mod_base = OTHER; note = 2'-O-methyluridine-3'-phosphorothioate
  modified_base 2: mod_base = OTHER; note = 2'-O-methylguanosine-3'-phosphorothioate
  modified_base 3: mod_base = OTHER; note = 2'-O-methylguanosine-3'-phosphate
  modified_base 4: mod_base = OTHER; note = 2'-O-methylguanosine-3'-phosphate
  modified_base 5: mod_base = OTHER; note = 2'-O-methyluridine-3'-phosphate
  modified_base 6: mod_base = OTHER; note = 2'-O-methyluridine-3'-phosphate
  modified_base 7: mod_base = OTHER; note = 2'-O-methyluridine-3'-phosphate
  modified_base 8: mod_base = OTHER; note = 2'-O-methyluridine-3'-phosphate
  modified_base 9: mod_base = OTHER; note = 2'-fluoroguanosine-3'-phosphate
  modified_base 10: mod_base = OTHER; note = 2'-fluorouridine-3'-phosphate
  modified_base 11: mod_base = OTHER; note = 2'-fluoroadenosine-3'-phosphate
  modified_base 12: mod_base = OTHER; note = 2'-O-methylguanosine-3'-phosphate
  modified_base 13: mod_base = OTHER; note = 2'-O-methylcytidine-3'-phosphate
  modified_base 14: mod_base = OTHER; note = 2'-O-methyladenosine-3'-phosphate
  modified_base 15: mod_base = OTHER; note = 2'-O-methyluridine-3'-phosphate
  modified_base 16: mod_base = OTHER; note = 2'-O-methyluridine-3'-phosphate
  modified_base 17: mod_base = OTHER; note = 2'-O-methyluridine-3'-phosphate
  modified_base 18: mod_base = OTHER; note = 2'-O-methyluridine-3'-phosphate
  modified_base 19: mod_base = OTHER; note = 2'-O-methyluridine-3'-phosphate
  modified_base 20: mod_base = OTHER; note = 2'-O-methyladenosine-3'-phosphate
  modified_base 21: mod_base = OTHER; note = 2'-O-methyluridine
tgggttttgtagcatttttat

SEQ ID NO: 1785 - RNA, 23 nt, synthetic construct
  source 1..23: mol_type = other RNA
  modified_base 1: mod_base = OTHER; note = 2'-O-methyladenosine-3'-phosphorothioate
  modified_base 2: mod_base = OTHER; note = 2'-fluorouridine-3'-phosphorothioate
  modified_base 3: mod_base = OTHER; note = 2'-O-methyladenosine-3'-phosphate
  modified_base 4: mod_base = OTHER; note = 2'-O-methyladenosine-3'-phosphate
  modified_base 5: mod_base = OTHER; note = 2'-O-methyladenosine-3'-phosphate
  modified_base 6: mod_base = OTHER; note = 2'-fluoroadenosine-3'-phosphate
  modified_base 7: mod_base = OTHER; note = 2'-O-methyladenosine-3'-phosphate
  modified_base 8: mod_base = OTHER; note = 2'-O-methyluridine-3'-phosphate
  modified_base 9: mod_base = OTHER; note = 2'-O-methylguanosine-3'-phosphate
  modified_base 10: mod_base = OTHER; note = 2'-O-methylcytidine-3'-phosphate
  modified_base 11: mod_base = OTHER; note = 2'-O-methyluridine-3'-phosphate
  modified_base 12: mod_base = OTHER; note = 2'-O-methyladenosine-3'-phosphate
  modified_base 13: mod_base = OTHER; note = 2'-O-methylcytidine-3'-phosphate
  modified_base 14: mod_base = OTHER; note = 2'-fluoroadenosine-3'-phosphate
  modified_base 15: mod_base = OTHER; note = 2'-O-methyladenosine-3'-phosphate
  modified_base 16: mod_base = OTHER; note = 2'-fluoroadenosine-3'-phosphate
  modified_base 17: mod_base = OTHER; note = 2'-O-methyladenosine-3'-phosphate
  modified_base 18: mod_base = OTHER; note = 2'-O-methylcytidine-3'-phosphate
  modified_base 19: mod_base = OTHER; note = 2'-O-methylcytidine-3'-phosphate
  modified_base 20: mod_base = OTHER; note = 2'-O-methylcytidine-3'-phosphate
  modified_base 21: mod_base = OTHER; note = 2'-O-methyladenosine-3'-phosphorothioate
  modified_base 22: mod_base = OTHER; note = 2'-O-methylguanosine-3'-phosphorothioate
  modified_base 23: mod_base = OTHER; note = 2'-O-methyladenosine
ataaaaatgctacaaaacccaga

SEQ ID NO: 1786 - RNA, 21 nt, synthetic construct
  source 1..21: mol_type = other RNA
  modified_base 1: mod_base = OTHER; note = 2'-O-methyluridine-3'-phosphorothioate
  modified_base 2: mod_base = OTHER; note = 2'-O-methylguanosine-3'-phosphorothioate
  modified_base 3: mod_base = OTHER; note = 2'-O-methylguanosine-3'-phosphate
  modified_base 4: mod_base = OTHER; note = 2'-O-methylguanosine-3'-phosphate
  modified_base 5: mod_base = OTHER; note = 2'-O-methyluridine-3'-phosphate
  modified_base 6: mod_base = OTHER; note = 2'-O-methyluridine-3'-phosphate
  modified_base 7: mod_base = OTHER; note = 2'-fluorouridine-3'-phosphate
  modified_base 8: mod_base = OTHER; note = 2'-O-methyluridine-3'-phosphate
  modified_base 9: mod_base = OTHER; note = 2'-fluoroguanosine-3'-phosphate
  modified_base 10: mod_base = OTHER; note = 2'-fluorouridine-3'-phosphate
  modified_base 11: mod_base = OTHER; note = 2'-fluoroadenosine-3'-phosphate
  modified_base 12: mod_base = OTHER; note = 2'-O-methylguanosine-3'-phosphate
  modified_base 13: mod_base = OTHER; note = 2'-O-methylcytidine-3'-phosphate
  modified_base 14: mod_base = OTHER; note = 2'-O-methyladenosine-3'-phosphate
  modified_base 15: mod_base = OTHER; note = 2'-O-methyluridine-3'-phosphate
  modified_base 16: mod_base = OTHER; note = 2'-O-methyluridine-3'-phosphate
  modified_base 17: mod_base = OTHER; note = 2'-O-methyluridine-3'-phosphate
  modified_base 18: mod_base = OTHER; note = 2'-O-methyluridine-3'-phosphate
  modified_base 19: mod_base = OTHER; note = 2'-O-methyluridine-3'-phosphate
  modified_base 20: mod_base = OTHER; note = 2'-O-methyladenosine-3'-phosphate
  modified_base 21: mod_base = OTHER; note = 2'-O-methyluridine
tgggttttgtagcatttttat

SEQ ID NO: 1787 - RNA, 23 nt, synthetic construct
  source 1..23: mol_type = other RNA
  modified_base 1: mod_base = OTHER; note = 2'-O-methyladenosine-3'-phosphorothioate
  modified_base 2: mod_base = OTHER; note = 2'-fluorouridine-3'-phosphorothioate
  modified_base 3: mod_base = OTHER; note = 2'-O-methyladenosine-3'-phosphate
  modified_base 4: mod_base = OTHER; note = 2'-O-methyladenosine-3'-phosphate
  modified_base 5: mod_base = OTHER; note = 2'-O-methyladenosine-3'-phosphate
  modified_base 6: mod_base = OTHER; note = 2'-fluoroadenosine-3'-phosphate
  modified_base 7: mod_base = OTHER; note = 2'-O-methyladenosine-3'-phosphate
  modified_base 8: mod_base = OTHER; note = 2'-fluorouridine-3'-phosphate
  modified_base 9: mod_base = OTHER; note = 2'-fluoroguanosine-3'-phosphate
  modified_base 10: mod_base = OTHER; note = 2'-O-methylcytidine-3'-phosphate
  modified_base 11: mod_base = OTHER; note = 2'-O-methyluridine-3'-phosphate
  modified_base 12: mod_base = OTHER; note = 2'-O-methyladenosine-3'-phosphate
  modified_base 13: mod_base = OTHER; note = 2'-O-methylcytidine-3'-phosphate
  modified_base 14: mod_base = OTHER; note = 2'-fluoroadenosine-3'-phosphate
  modified_base 15: mod_base = OTHER; note = 2'-O-methyladenosine-3'-phosphate
  modified_base 16: mod_base = OTHER; note = 2'-fluoroadenosine-3'-phosphate
  modified_base 17: mod_base = OTHER; note = 2'-O-methyladenosine-3'-phosphate
  modified_base 18: mod_base = OTHER; note = 2'-O-methylcytidine-3'-phosphate
  modified_base 19: mod_base = OTHER; note = 2'-O-methylcytidine-3'-phosphate
  modified_base 20: mod_base = OTHER; note = 2'-O-methylcytidine-3'-phosphate
  modified_base 21: mod_base = OTHER; note = 2'-O-methyladenosine-3'-phosphorothioate
  modified_base 22: mod_base = OTHER; note = 2'-O-methylguanosine-3'-phosphorothioate
  modified_base 23: mod_base = OTHER; note = 2'-O-methyladenosine
ataaaaatgctacaaaacccaga

SEQ ID NO: 1788 - RNA, 21 nt, synthetic construct
  source 1..21: mol_type = other RNA
  modified_base 1: mod_base = OTHER; note = 2'-O-methyluridine-3'-phosphorothioate
  modified_base 2: mod_base = OTHER; note = 2'-O-methylguanosine-3'-phosphorothioate
  modified_base 3: mod_base = OTHER; note = 2'-O-methylguanosine-3'-phosphate
  modified_base 4: mod_base = OTHER; note = 2'-O-methylguanosine-3'-phosphate
  modified_base 5: mod_base = OTHER; note = 2'-O-methyluridine-3'-phosphate
  modified_base 6: mod_base = OTHER; note = 2'-O-methyluridine-3'-phosphate
  modified_base 7: mod_base = OTHER; note = 2'-fluorouridine-3'-phosphate
  modified_base 8: mod_base = OTHER; note = 2'-O-methyluridine-3'-phosphate
  modified_base 9: mod_base = OTHER; note = 2'-fluoroguanosine-3'-phosphate
  modified_base 10: mod_base = OTHER; note = 2'-fluorouridine-3'-phosphate
  modified_base 11: mod_base = OTHER; note = 2'-fluoroadenosine-3'-phosphate
  modified_base 12: mod_base = OTHER; note = 2'-O-methylguanosine-3'-phosphate
  modified_base 13: mod_base = OTHER; note = 2'-O-methylcytidine-3'-phosphate
  modified_base 14: mod_base = OTHER; note = 2'-O-methyladenosine-3'-phosphate
  modified_base 15: mod_base = OTHER; note = 2'-O-methyluridine-3'-phosphate
  modified_base 16: mod_base = OTHER; note = 2'-O-methyluridine-3'-phosphate
  modified_base 17: mod_base = OTHER; note = 2'-O-methyluridine-3'-phosphate
  modified_base 18: mod_base = OTHER; note = 2'-O-methyluridine-3'-phosphate
  modified_base 19: mod_base = OTHER; note = 2'-O-methyluridine-3'-phosphate
  modified_base 20: mod_base = OTHER; note = 2'-O-methyladenosine-3'-phosphate
  modified_base 21: mod_base = OTHER; note = 2'-O-methyluridine
tgggttttgtagcatttttat

SEQ ID NO: 1789 - RNA, 23 nt, synthetic construct
  source 1..23: mol_type = other RNA
  modified_base 1: mod_base = OTHER; note = 2'-O-methyladenosine-3'-phosphorothioate
  modified_base 2: mod_base = OTHER; note = 2'-fluorouridine-3'-phosphorothioate
  modified_base 3: mod_base = OTHER; note = 2'-O-methyladenosine-3'-phosphate
  modified_base 4: mod_base = OTHER; note = 2'-O-methyladenosine-3'-phosphate
  modified_base 5: mod_base = OTHER; note = 2'-O-methyladenosine-3'-phosphate
  modified_base 6: mod_base = OTHER; note = 2'-fluoroadenosine-3'-phosphate
  modified_base 7: mod_base = OTHER; note = 2'-O-methyladenosine-3'-phosphate
  modified_base 8: mod_base = OTHER; note = 2'-O-methyluridine-3'-phosphate
  modified_base 9: mod_base = OTHER; note = 2'-O-methylguanosine-3'-phosphate
  modified_base 10: mod_base = OTHER; note = 2'-O-methylcytidine-3'-phosphate
  modified_base 11: mod_base = OTHER; note = 2'-O-methyluridine-3'-phosphate
  modified_base 12: mod_base = OTHER; note = 2'-O-methyladenosine-3'-phosphate
  modified_base 13: mod_base = OTHER; note = 2'-O-methylcytidine-3'-phosphate
  modified_base 14: mod_base = OTHER; note = 2'-fluoroadenosine-3'-phosphate
  modified_base 15: mod_base = OTHER; note = 2'-O-methyladenosine-3'-phosphate
  modified_base 16: mod_base = OTHER; note = 2'-fluoroadenosine-3'-phosphate
  modified_base 17: mod_base = OTHER; note = 2'-O-methyladenosine-3'-phosphate
  modified_base 18: mod_base = OTHER; note = 2'-O-methylcytidine-3'-phosphate
  modified_base 19: mod_base = OTHER; note = 2'-O-methylcytidine-3'-phosphate
  modified_base 20: mod_base = OTHER; note = 2'-O-methylcytidine-3'-phosphate
  modified_base 21: mod_base = OTHER; note = 2'-O-methyladenosine-3'-phosphorothioate
  modified_base 22: mod_base = OTHER; note = 2'-O-methylguanosine-3'-phosphorothioate
  modified_base 23: mod_base = OTHER; note = 2'-O-methyladenosine
ataaaaatgctacaaaacccaga

SEQ ID NO: 1790 - RNA, 19 nt, synthetic construct
  source 1..19: mol_type = other RNA
  modified_base 1: mod_base = OTHER; note = 2'-O-methylguanosine-3'-phosphate
  modified_base 2: mod_base = OTHER; note = 2'-O-methylguanosine-3'-phosphate
  modified_base 3: mod_base = OTHER; note = 2'-O-methyluridine-3'-phosphate
  modified_base 4: mod_base = OTHER; note = 2'-O-methyluridine-3'-phosphate
  modified_base 5: mod_base = OTHER; note = 2'-O-methyluridine-3'-phosphate
  modified_base 6: mod_base = OTHER; note = 2'-O-methyluridine-3'-phosphate
  modified_base 7: mod_base = OTHER; note = 2'-fluoroguanosine-3'-phosphate
  modified_base 8: mod_base = OTHER; note = 2'-fluorouridine-3'-phosphate
  modified_base 9: mod_base = OTHER; note = 2'-fluoroadenosine-3'-phosphate
  modified_base 10: mod_base = OTHER; note = 2'-O-methylguanosine-3'-phosphate
  modified_base 11: mod_base = OTHER; note = 2'-O-methylcytidine-3'-phosphate
  modified_base 12: mod_base = OTHER; note = 2'-O-methyladenosine-3'-phosphate
  modified_base 13: mod_base = OTHER; note = 2'-O-methyluridine-3'-phosphate
  modified_base 14: mod_base = OTHER; note = 2'-O-methyluridine-3'-phosphate
  modified_base 15: mod_base = OTHER; note = 2'-O-methyluridine-3'-phosphate
  modified_base 16: mod_base = OTHER; note = 2'-O-methyluridine-3'-phosphate
  modified_base 17: mod_base = OTHER; note = 2'-O-methyluridine-3'-phosphate
  modified_base 18: mod_base = OTHER; note = 2'-O-methyladenosine-3'-phosphate
  modified_base 19: mod_base = OTHER; note = 2'-O-methyluridine
ggttttgtagcatttttat

SEQ ID NO: 1791 - RNA, 21 nt, synthetic construct
  source 1..21: mol_type = other RNA
  modified_base 1: mod_base = OTHER; note = 5'-phosphate-2'-O-methyladenosine-3'-phosphate
  modified_base 2: mod_base = OTHER; note = 2'-fluorouridine-3'-phosphate
  modified_base 3: mod_base = OTHER; note = 2'-O-methyladenosine-3'-phosphate
  modified_base 4: mod_base = OTHER; note = 2'-O-methyladenosine-3'-phosphate
  modified_base 5: mod_base = OTHER; note = 2'-O-methyladenosine-3'-phosphate
  modified_base 6: mod_base = OTHER; note = 2'-fluoroadenosine-3'-phosphate
  modified_base 7: mod_base = OTHER; note = 2'-O-methyladenosine-3'-phosphate
  modified_base 8: mod_base = OTHER; note = 2'-O-methyluridine-3'-phosphate
  modified_base 9: mod_base = OTHER; note = 2'-O-methylguanosine-3'-phosphate
  modified_base 10: mod_base = OTHER; note = 2'-O-methylcytidine-3'-phosphate
  modified_base 11: mod_base = OTHER; note = 2'-O-methyluridine-3'-phosphate
  modified_base 12: mod_base = OTHER; note = 2'-O-methyladenosine-3'-phosphate
  modified_base 13: mod_base = OTHER; note = 2'-O-methylcytidine-3'-phosphate
  modified_base 14: mod_base = OTHER; note = 2'-fluoroadenosine-3'-phosphate
  modified_base 15: mod_base = OTHER; note = 2'-O-methyladenosine-3'-phosphate
  modified_base 16: mod_base = OTHER; note = 2'-fluoroadenosine-3'-phosphate
  modified_base 17: mod_base = OTHER; note = 2'-O-methyladenosine-3'-phosphate
  modified_base 18: mod_base = OTHER; note = 2'-O-methylcytidine-3'-phosphate
  modified_base 19: mod_base = OTHER; note = 2'-O-methylcytidine-3'-phosphate
  modified_base 20: mod_base = OTHER; note = 2'-O-methylcytidine-3'-phosphate
  modified_base 21: mod_base = OTHER; note = 2'-O-methyladenosine
ataaaaatgctacaaaaccca

SEQ ID NO: 1792 - RNA, 19 nt, synthetic construct
  source 1..19: mol_type = other RNA
  modified_base 1: mod_base = OTHER; note = 2'-O-methylguanosine-3'-phosphate
  modified_base 2: mod_base = OTHER; note = 2'-O-methylguanosine-3'-phosphate
  modified_base 3: mod_base = OTHER; note = 2'-O-methyluridine-3'-phosphate
  modified_base 4: mod_base = OTHER; note = 2'-O-methyluridine-3'-phosphate
  modified_base 5: mod_base = OTHER; note = 2'-fluorouridine-3'-phosphate
  modified_base 6: mod_base = OTHER; note = 2'-O-methyluridine-3'-phosphate
  modified_base 7: mod_base = OTHER; note = 2'-fluoroguanosine-3'-phosphate
  modified_base 8: mod_base = OTHER; note = 2'-fluorouridine-3'-phosphate
  modified_base 9: mod_base = OTHER; note = 2'-fluoroadenosine-3'-phosphate
  modified_base 10: mod_base = OTHER; note = 2'-O-methylguanosine-3'-phosphate
  modified_base 11: mod_base = OTHER; note = 2'-O-methylcytidine-3'-phosphate
  modified_base 12: mod_base = OTHER; note = 2'-O-methyladenosine-3'-phosphate
  modified_base 13: mod_base = OTHER; note = 2'-O-methyluridine-3'-phosphate
  modified_base 14: mod_base = OTHER; note = 2'-O-methyluridine-3'-phosphate
  modified_base 15: mod_base = OTHER; note = 2'-O-methyluridine-3'-phosphate
  modified_base 16: mod_base = OTHER; note = 2'-O-methyluridine-3'-phosphate
  modified_base 17: mod_base = OTHER; note = 2'-O-methyluridine-3'-phosphate
  modified_base 18: mod_base = OTHER; note = 2'-O-methyladenosine-3'-phosphate
  modified_base 19: mod_base = OTHER; note = 2'-O-methyluridine
ggttttgtagcatttttat

SEQ ID NO: 1793 - RNA, 21 nt, synthetic construct
  source 1..21: mol_type = other RNA
  modified_base 1: mod_base = OTHER; note = 5'-phosphate-2'-O-methyladenosine-3'-phosphate
  modified_base 2: mod_base = OTHER; note = 2'-fluorouridine-3'-phosphate
  modified_base 3: mod_base = OTHER; note = 2'-O-methyladenosine-3'-phosphate
  modified_base 4: mod_base = OTHER; note = 2'-O-methyladenosine-3'-phosphate
  modified_base 5: mod_base = OTHER; note = 2'-O-methyladenosine-3'-phosphate
  modified_base 6: mod_base = OTHER; note = 2'-fluoroadenosine-3'-phosphate
  modified_base 7: mod_base = OTHER; note = 2'-O-methyladenosine-3'-phosphate
  modified_base 8: mod_base = OTHER; note = 2'-fluorouridine-3'-phosphate
  modified_base 9: mod_base = OTHER; note = 2'-fluoroguanosine-3'-phosphate
  modified_base 10: mod_base = OTHER; note = 2'-O-methylcytidine-3'-phosphate
  modified_base 11: mod_base = OTHER; note = 2'-O-methyluridine-3'-phosphate
  modified_base 12: mod_base = OTHER; note = 2'-O-methyladenosine-3'-phosphate
  modified_base 13: mod_base = OTHER; note = 2'-O-methylcytidine-3'-phosphate
  modified_base 14: mod_base = OTHER; note = 2'-fluoroadenosine-3'-phosphate
  modified_base 15: mod_base = OTHER; note = 2'-O-methyladenosine-3'-phosphate
  modified_base 16: mod_base = OTHER; note = 2'-fluoroadenosine-3'-phosphate
  modified_base 17: mod_base = OTHER; note = 2'-O-methyladenosine-3'-phosphate
  modified_base 18: mod_base = OTHER; note = 2'-O-methylcytidine-3'-phosphate
  modified_base 19: mod_base = OTHER; note = 2'-O-methylcytidine-3'-phosphate
  modified_base 20: mod_base = OTHER; note = 2'-O-methylcytidine-3'-phosphate
  modified_base 21: mod_base = OTHER; note = 2'-O-methyladenosine
ataaaaatgctacaaaaccca

SEQ ID NO: 1794 - RNA, 19 nt, synthetic construct
  source 1..19: mol_type = other RNA
  modified_base 1: mod_base = OTHER; note = 2'-O-methylguanosine-3'-phosphate
  modified_base 2: mod_base = OTHER; note = 2'-O-methylguanosine-3'-phosphate
  modified_base 3: mod_base = OTHER; note = 2'-O-methyluridine-3'-phosphate
  modified_base 4: mod_base = OTHER; note = 2'-O-methyluridine-3'-phosphate
  modified_base 5: mod_base = OTHER; note = 2'-fluorouridine-3'-phosphate
  modified_base 6: mod_base = OTHER; note = 2'-O-methyluridine-3'-phosphate
  modified_base 7: mod_base = OTHER; note = 2'-fluoroguanosine-3'-phosphate
  modified_base 8: mod_base = OTHER; note = 2'-fluorouridine-3'-phosphate
  modified_base 9: mod_base = OTHER; note = 2'-fluoroadenosine-3'-phosphate
  modified_base 10: mod_base = OTHER; note = 2'-O-methylguanosine-3'-phosphate
  modified_base 11: mod_base = OTHER; note = 2'-O-methylcytidine-3'-phosphate
  modified_base 12: mod_base = OTHER; note = 2'-O-methyladenosine-3'-phosphate
  modified_base 13: mod_base = OTHER; note = 2'-O-methyluridine-3'-phosphate
  modified_base 14: mod_base = OTHER; note = 2'-O-methyluridine-3'-phosphate
  modified_base 15: mod_base = OTHER; note = 2'-O-methyluridine-3'-phosphate
  modified_base 16: mod_base = OTHER; note = 2'-O-methyluridine-3'-phosphate
  modified_base 17: mod_base = OTHER; note = 2'-O-methyluridine-3'-phosphate
  modified_base 18: mod_base = OTHER; note = 2'-O-methyladenosine-3'-phosphate
  modified_base 19: mod_base = OTHER; note = 2'-O-methyluridine
ggttttgtagcatttttat

SEQ ID NO: 1795 - RNA, 21 nt, synthetic construct
  source 1..21: mol_type = other RNA
  modified_base 1: mod_base = OTHER; note = 5'-phosphate-2'-O-methyladenosine-3'-phosphate
  modified_base 2: mod_base = OTHER; note = 2'-fluorouridine-3'-phosphate
  modified_base 3: mod_base = OTHER; note = 2'-O-methyladenosine-3'-phosphate
  modified_base 4: mod_base = OTHER; note = 2'-O-methyladenosine-3'-phosphate
  modified_base 5: mod_base = OTHER; note = 2'-O-methyladenosine-3'-phosphate
  modified_base 6: mod_base = OTHER; note = 2'-fluoroadenosine-3'-phosphate
  modified_base 7: mod_base = OTHER; note = 2'-O-methyladenosine-3'-phosphate
  modified_base 8: mod_base = OTHER; note = 2'-O-methyluridine-3'-phosphate
  modified_base 9: mod_base = OTHER; note = 2'-O-methylguanosine-3'-phosphate
  modified_base 10: mod_base = OTHER; note = 2'-O-methylcytidine-3'-phosphate
  modified_base 11: mod_base = OTHER; note = 2'-O-methyluridine-3'-phosphate
  modified_base 12: mod_base = OTHER; note = 2'-O-methyladenosine-3'-phosphate
  modified_base 13: mod_base = OTHER; note = 2'-O-methylcytidine-3'-phosphate
  modified_base 14: mod_base = OTHER; note = 2'-fluoroadenosine-3'-phosphate
  modified_base 15: mod_base = OTHER; note = 2'-O-methyladenosine-3'-phosphate
  modified_base 16: mod_base = OTHER; note = 2'-fluoroadenosine-3'-phosphate
  modified_base 17: mod_base = OTHER; note = 2'-O-methyladenosine-3'-phosphate
  modified_base 18: mod_base = OTHER; note = 2'-O-methylcytidine-3'-phosphate
  modified_base 19: mod_base = OTHER; note = 2'-O-methylcytidine-3'-phosphate
  modified_base 20: mod_base = OTHER; note = 2'-O-methylcytidine-3'-phosphate
  modified_base 21: mod_base = OTHER; note = 2'-O-methyladenosine
ataaaaatgctacaaaaccca

SEQ ID NO: 1796 - RNA, 21 nt, synthetic construct
  source 1..21: mol_type = other RNA
  modified_base 1: mod_base = OTHER; note = 2'-O-methyluridine-3'-phosphate
  modified_base 2: mod_base = OTHER; note = 2'-O-methylguanosine-3'-phosphate
  modified_base 3: mod_base = OTHER; note = 2'-O-methylguanosine-3'-phosphate
  modified_base 4: mod_base = OTHER; note = 2'-O-methylguanosine-3'-phosphate
  modified_base 5: mod_base = OTHER; note = 2'-O-methyluridine-3'-phosphate
  modified_base 6: mod_base = OTHER; note = 2'-O-methyluridine-3'-phosphate
  modified_base 7: mod_base = OTHER; note = 2'-O-methyluridine-3'-phosphate
  modified_base 8: mod_base = OTHER; note = 2'-O-methyluridine-3'-phosphate
  modified_base 9: mod_base = OTHER; note = 2'-fluoroguanosine-3'-phosphate
  modified_base 10: mod_base = OTHER; note = 2'-fluorouridine-3'-phosphate
  modified_base 11: mod_base = OTHER; note = 2'-fluoroadenosine-3'-phosphate
  modified_base 12: mod_base = OTHER; note = 2'-O-methylguanosine-3'-phosphate
  modified_base 13: mod_base = OTHER; note = 2'-O-methylcytidine-3'-phosphate
  modified_base 14: mod_base = OTHER; note = 2'-O-methyladenosine-3'-phosphate
  modified_base 15: mod_base = OTHER; note = 2'-O-methyluridine-3'-phosphate
  modified_base 16: mod_base = OTHER; note = 2'-O-methyluridine-3'-phosphate
  modified_base 17: mod_base = OTHER; note = 2'-O-methyluridine-3'-phosphate
  modified_base 18: mod_base = OTHER; note = 2'-O-methyluridine-3'-phosphate
  modified_base 19: mod_base = OTHER; note = 2'-O-methyluridine-3'-phosphate
  modified_base 20: mod_base = OTHER; note = 2'-O-methyladenosine-3'-phosphate
  modified_base 21: mod_base = OTHER; note = 2'-O-methyluridine
tgggttttgtagcatttttat

SEQ ID NO: 1797 - RNA, 23 nt, synthetic construct
  source 1..23: mol_type = other RNA
  modified_base 1: mod_base = OTHER; note = 5'-phosphate-2'-O-methyladenosine-3'-phosphate
  modified_base 2: mod_base = OTHER; note = 2'-fluorouridine-3'-phosphate
  modified_base 3: mod_base = OTHER; note = 2'-O-methyladenosine-3'-phosphate
  modified_base 4: mod_base = OTHER; note = 2'-O-methyladenosine-3'-phosphate
  modified_base 5: mod_base = OTHER; note = 2'-O-methyladenosine-3'-phosphate
  modified_base 6: mod_base = OTHER; note = 2'-fluoroadenosine-3'-phosphate
  modified_base 7: mod_base = OTHER; note = 2'-O-methyladenosine-3'-phosphate
  modified_base 8: mod_base = OTHER; note = 2'-O-methyluridine-3'-phosphate
  modified_base 9: mod_base = OTHER; note = 2'-O-methylguanosine-3'-phosphate
  modified_base 10: mod_base = OTHER; note = 2'-O-methylcytidine-3'-phosphate
  modified_base 11: mod_base = OTHER; note = 2'-O-methyluridine-3'-phosphate
  modified_base 12: mod_base = OTHER; note = 2'-O-methyladenosine-3'-phosphate
  modified_base 13: mod_base = OTHER; note = 2'-O-methylcytidine-3'-phosphate
  modified_base 14: mod_base = OTHER; note = 2'-fluoroadenosine-3'-phosphate
  modified_base 15: mod_base = OTHER; note = 2'-O-methyladenosine-3'-phosphate
  modified_base 16: mod_base = OTHER; note = 2'-fluoroadenosine-3'-phosphate
  modified_base 17: mod_base = OTHER; note = 2'-O-methyladenosine-3'-phosphate
  modified_base 18: mod_base = OTHER; note = 2'-O-methylcytidine-3'-phosphate
  modified_base 19: mod_base = OTHER; note = 2'-O-methylcytidine-3'-phosphate
  modified_base 20: mod_base = OTHER; note = 2'-O-methylcytidine-3'-phosphate
  modified_base 21: mod_base = OTHER; note = 2'-O-methyladenosine-3'-phosphate
  modified_base 22: mod_base = OTHER; note = 2'-O-methylguanosine-3'-phosphate
  modified_base 23: mod_base = OTHER; note = 2'-O-methyladenosine
ataaaaatgctacaaaacccaga

SEQ ID NO: 1798 - RNA, 21 nt, synthetic construct
  source 1..21: mol_type = other RNA
  modified_base 1: mod_base = OTHER; note = 2'-O-methyluridine-3'-phosphate
  modified_base 2: mod_base = OTHER; note = 2'-O-methylguanosine-3'-phosphate
  modified_base 3: mod_base = OTHER; note = 2'-O-methylguanosine-3'-phosphate
  modified_base 4: mod_base = OTHER; note = 2'-O-methylguanosine-3'-phosphate
  modified_base 5: mod_base = OTHER; note = 2'-O-methyluridine-3'-phosphate
  modified_base 6: mod_base = OTHER; note = 2'-O-methyluridine-3'-phosphate
  modified_base 7: mod_base = OTHER; note = 2'-fluorouridine-3'-phosphate
  modified_base 8: mod_base = OTHER; note = 2'-O-methyluridine-3'-phosphate
  modified_base 9: mod_base = OTHER; note = 2'-fluoroguanosine-3'-phosphate
  modified_base 10: mod_base = OTHER; note = 2'-fluorouridine-3'-phosphate
  modified_base 11: mod_base = OTHER; note = 2'-fluoroadenosine-3'-phosphate
  modified_base 12: mod_base = OTHER; note = 2'-O-methylguanosine-3'-phosphate
  modified_base 13: mod_base = OTHER; note = 2'-O-methylcytidine-3'-phosphate
  modified_base 14: mod_base = OTHER; note = 2'-O-methyladenosine-3'-phosphate
  modified_base 15: mod_base = OTHER; note = 2'-O-methyluridine-3'-phosphate
  modified_base 16: mod_base = OTHER; note = 2'-O-methyluridine-3'-phosphate
  modified_base 17: mod_base = OTHER; note = 2'-O-methyluridine-3'-phosphate
  modified_base 18: mod_base = OTHER; note = 2'-O-methyluridine-3'-phosphate
  modified_base 19: mod_base = OTHER; note = 2'-O-methyluridine-3'-phosphate
  modified_base 20: mod_base = OTHER; note = 2'-O-methyladenosine-3'-phosphate
  modified_base 21: mod_base = OTHER; note = 2'-O-methyluridine
tgggttttgtagcatttttat

SEQ ID NO: 1799 - RNA, 23 nt, synthetic construct
  source 1..23: mol_type = other RNA
  modified_base 1: mod_base = OTHER; note = 5'-phosphate-2'-O-methyladenosine-3'-phosphate
  modified_base 2: mod_base = OTHER; note = 2'-fluorouridine-3'-phosphate
  modified_base 3: mod_base = OTHER; note = 2'-O-methyladenosine-3'-phosphate
  modified_base 4: mod_base = OTHER; note = 2'-O-methyladenosine-3'-phosphate
  modified_base 5: mod_base = OTHER; note = 2'-O-methyladenosine-3'-phosphate
  modified_base 6: mod_base = OTHER; note = 2'-fluoroadenosine-3'-phosphate
  modified_base 7: mod_base = OTHER; note = 2'-O-methyladenosine-3'-phosphate
  modified_base 8: mod_base = OTHER; note = 2'-fluorouridine-3'-phosphate
  modified_base 9: mod_base = OTHER; note = 2'-fluoroguanosine-3'-phosphate
  modified_base 10: mod_base = OTHER; note = 2'-O-methylcytidine-3'-phosphate
  modified_base 11: mod_base = OTHER; note = 2'-O-methyluridine-3'-phosphate
  modified_base 12: mod_base = OTHER; note = 2'-O-methyladenosine-3'-phosphate
  modified_base 13: mod_base = OTHER; note = 2'-O-methylcytidine-3'-phosphate
  modified_base 14: mod_base = OTHER; note = 2'-fluoroadenosine-3'-phosphate
  modified_base 15: mod_base = OTHER; note = 2'-O-methyladenosine-3'-phosphate
  modified_base 16: mod_base = OTHER; note = 2'-fluoroadenosine-3'-phosphate
  modified_base 17: mod_base = OTHER; note = 2'-O-methyladenosine-3'-phosphate
  modified_base 18: mod_base = OTHER; note = 2'-O-methylcytidine-3'-phosphate
  modified_base 19: mod_base = OTHER; note = 2'-O-methylcytidine-3'-phosphate
  modified_base 20: mod_base = OTHER; note = 2'-O-methylcytidine-3'-phosphate
  modified_base 21: mod_base = OTHER; note = 2'-O-methyladenosine-3'-phosphate
  modified_base 22: mod_base = OTHER; note = 2'-O-methylguanosine-3'-phosphate
  modified_base 23: mod_base = OTHER; note = 2'-O-methyladenosine
ataaaaatgctacaaaacccaga

SEQ ID NO: 1800 - RNA, 21 nt, synthetic construct
  source 1..21: mol_type = other RNA
  modified_base 1: mod_base = OTHER; note = 2'-O-methyluridine-3'-phosphate
  modified_base 2: mod_base = OTHER; note = 2'-O-methylguanosine-3'-phosphate
  modified_base 3: mod_base = OTHER; note = 2'-O-methylguanosine-3'-phosphate
  modified_base 4: mod_base = OTHER; note = 2'-O-methylguanosine-3'-phosphate
  modified_base 5: mod_base = OTHER; note = 2'-O-methyluridine-3'-phosphate
  modified_base 6: mod_base = OTHER; note = 2'-O-methyluridine-3'-phosphate
  modified_base 7: mod_base = OTHER; note = 2'-fluorouridine-3'-phosphate
  modified_base 8: mod_base = OTHER; note = 2'-O-methyluridine-3'-phosphate
  modified_base 9: mod_base = OTHER; note = 2'-fluoroguanosine-3'-phosphate
  modified_base 10: mod_base = OTHER; note = 2'-fluorouridine-3'-phosphate
  modified_base 11: mod_base = OTHER; note = 2'-fluoroadenosine-3'-phosphate
  modified_base 12: mod_base = OTHER; note = 2'-O-methylguanosine-3'-phosphate
  modified_base 13: mod_base = OTHER; note = 2'-O-methylcytidine-3'-phosphate
  modified_base 14: mod_base = OTHER; note = 2'-O-methyladenosine-3'-phosphate
  modified_base 15: mod_base = OTHER; note = 2'-O-methyluridine-3'-phosphate
  modified_base 16: mod_base = OTHER; note = 2'-O-methyluridine-3'-phosphate
  modified_base 17: mod_base = OTHER; note = 2'-O-methyluridine-3'-phosphate
  modified_base 18: mod_base = OTHER; note = 2'-O-methyluridine-3'-phosphate
  modified_base 19: mod_base = OTHER; note = 2'-O-methyluridine-3'-phosphate
  modified_base 20: mod_base = OTHER; note = 2'-O-methyladenosine-3'-phosphate
  modified_base 21: mod_base = OTHER; note = 2'-O-methyluridine
tgggttttgtagcatttttat

SEQ ID NO: 1801 - RNA, 23 nt, synthetic construct
  source 1..23: mol_type = other RNA
  modified_base 1: mod_base = OTHER; note = 5'-phosphate-2'-O-methyladenosine-3'-phosphate
  modified_base 2: mod_base = OTHER; note = 2'-fluorouridine-3'-phosphate
  modified_base 3: mod_base = OTHER; note = 2'-O-methyladenosine-3'-phosphate
  modified_base 4: mod_base = OTHER; note = 2'-O-methyladenosine-3'-phosphate
  modified_base 5: mod_base = OTHER; note = 2'-O-methyladenosine-3'-phosphate
  modified_base 6: mod_base = OTHER; note = 2'-fluoroadenosine-3'-phosphate
  modified_base 7: mod_base = OTHER; note = 2'-O-methyladenosine-3'-phosphate
  modified_base 8: mod_base = OTHER; note = 2'-O-methyluridine-3'-phosphate
  modified_base 9: mod_base = OTHER; note = 2'-O-methylguanosine-3'-phosphate
  modified_base 10: mod_base = OTHER; note = 2'-O-methylcytidine-3'-phosphate
  modified_base 11: mod_base = OTHER; note = 2'-O-methyluridine-3'-phosphate
  modified_base 12: mod_base = OTHER; note = 2'-O-methyladenosine-3'-phosphate
  modified_base 13: mod_base = OTHER; note = 2'-O-methylcytidine-3'-phosphate
  modified_base 14: mod_base = OTHER; note = 2'-fluoroadenosine-3'-phosphate
  modified_base 15: mod_base = OTHER; note = 2'-O-methyladenosine-3'-phosphate
  modified_base 16: mod_base = OTHER; note = 2'-fluoroadenosine-3'-phosphate
  modified_base 17: mod_base = OTHER; note = 2'-O-methyladenosine-3'-phosphate
  modified_base 18: mod_base = OTHER; note = 2'-O-methylcytidine-3'-phosphate
  modified_base 19: mod_base = OTHER; note = 2'-O-methylcytidine-3'-phosphate
  modified_base 20: mod_base = OTHER; note = 2'-O-methylcytidine-3'-phosphate
  modified_base 21: mod_base = OTHER; note = 2'-O-methyladenosine-3'-phosphate
  modified_base 22: mod_base = OTHER; note = 2'-O-methylguanosine-3'-phosphate
  modified_base 23: mod_base = OTHER; note = 2'-O-methyladenosine-3'-phosphate
ataaaaatgctacaaaacccaga

SEQ ID NO: 1802 - RNA, 19 nt, synthetic construct
  source 1..19: mol_type = other RNA
  modified_base 1: mod_base = OTHER; note = 2'-O-methylguanosine-3'-phosphorothioate
  modified_base 2: mod_base = OTHER; note = 2'-O-methylguanosine-3'-phosphorothioate
  modified_base 3: mod_base = OTHER; note = 2'-O-methyluridine-3'-phosphate
  modified_base 4: mod_base = OTHER; note = 2'-O-methyluridine-3'-phosphate
  modified_base 5: mod_base = OTHER; note = 2'-O-methyluridine-3'-phosphate
  modified_base 6: mod_base = OTHER; note = 2'-O-methyluridine-3'-phosphate
  modified_base 7: mod_base = OTHER; note = 2'-fluoroguanosine-3'-phosphate
  modified_base 8: mod_base = OTHER; note = 2'-fluorouridine-3'-phosphate
  modified_base 9: mod_base = OTHER; note = 2'-fluoroadenosine-3'-phosphate
  modified_base 10: mod_base = OTHER; note = 2'-O-methylguanosine-3'-phosphate
  modified_base 11: mod_base = OTHER; note = 2'-O-methylcytidine-3'-phosphate
  modified_base 12: mod_base = OTHER; note = 2'-O-methyladenosine-3'-phosphate
  modified_base 13: mod_base = OTHER; note = 2'-O-methyluridine-3'-phosphate
  modified_base 14: mod_base = OTHER; note = 2'-O-methyluridine-3'-phosphate
  modified_base 15: mod_base = OTHER; note = 2'-O-methyluridine-3'-phosphate
  modified_base 16: mod_base = OTHER; note = 2'-O-methyluridine-3'-phosphate
  modified_base 17: mod_base = OTHER; note = 2'-O-methyluridine-3'-phosphate
  modified_base 18: mod_base = OTHER; note = 2'-O-methyladenosine-3'-phosphate
  modified_base 19: mod_base = OTHER; note = 2'-O-methyluridine
ggttttgtagcatttttat

SEQ ID NO: 1803 - RNA, 21 nt, synthetic construct
  source 1..21: mol_type = other RNA
  modified_base 1: mod_base = OTHER; note = 5'-phosphate-2'-O-methyladenosine-3'-phosphorothioate
  modified_base 2: mod_base = OTHER; note = 2'-fluorouridine-3'-phosphorothioate
  modified_base 3: mod_base = OTHER; note = 2'-O-methyladenosine-3'-phosphate
  modified_base 4: mod_base = OTHER; note = 2'-O-methyladenosine-3'-phosphate
  modified_base 5: mod_base = OTHER; note = 2'-O-methyladenosine-3'-phosphate
  modified_base 6: mod_base = OTHER; note = 2'-fluoroadenosine-3'-phosphate
  modified_base 7: mod_base = OTHER; note = 2'-O-methyladenosine-3'-phosphate
  modified_base 8: mod_base = OTHER; note = 2'-O-methyluridine-3'-phosphate
  modified_base 9: mod_base = OTHER; note = 2'-O-methylguanosine-3'-phosphate
  modified_base 10: mod_base = OTHER; note = 2'-O-methylcytidine-3'-phosphate
  modified_base 11: mod_base = OTHER; note = 2'-O-methyluridine-3'-phosphate
  modified_base 12: mod_base = OTHER; note = 2'-O-methyladenosine-3'-phosphate
  modified_base 13: mod_base = OTHER; note = 2'-O-methylcytidine-3'-phosphate
  modified_base 14: mod_base = OTHER; note = 2'-fluoroadenosine-3'-phosphate
  modified_base 15: mod_base = OTHER; note = 2'-O-methyladenosine-3'-phosphate
  modified_base 16: mod_base = OTHER; note = 2'-fluoroadenosine-3'-phosphate
  modified_base 17: mod_base = OTHER; note = 2'-O-methyladenosine-3'-phosphate
  modified_base 18: mod_base = OTHER; note = 2'-O-methylcytidine-3'-phosphate
  modified_base 19: mod_base = OTHER; note = 2'-O-methylcytidine-3'-phosphorothioate
  modified_base 20: mod_base = OTHER; note = 2'-O-methylcytidine-3'-phosphorothioate
  modified_base 21: mod_base = OTHER; note = 2'-O-methyladenosine
ataaaaatgctacaaaaccca

SEQ ID NO: 1804 - RNA, 19 nt, synthetic construct
  source 1..19: mol_type = other RNA
  modified_base 1: mod_base = OTHER; note = 2'-O-methylguanosine-3'-phosphorothioate
  modified_base 2: mod_base = OTHER; note = 2'-O-methylguanosine-3'-phosphorothioate
  modified_base 3: mod_base = OTHER; note = 2'-O-methyluridine-3'-phosphate
  modified_base 4: mod_base = OTHER; note = 2'-O-methyluridine-3'-phosphate
  modified_base 5: mod_base = OTHER; note = 2'-fluorouridine-3'-phosphate
  modified_base 6: mod_base = OTHER; note = 2'-O-methyluridine-3'-phosphate
  modified_base 7: mod_base = OTHER; note = 2'-fluoroguanosine-3'-phosphate
  modified_base 8: mod_base = OTHER; note = 2'-fluorouridine-3'-phosphate
  modified_base 9: mod_base = OTHER; note = 2'-fluoroadenosine-3'-phosphate
  modified_base 10: mod_base = OTHER; note = 2'-O-methylguanosine-3'-phosphate
  modified_base 11: mod_base = OTHER; note = 2'-O-methylcytidine-3'-phosphate
  modified_base 12: mod_base = OTHER; note = 2'-O-methyladenosine-3'-phosphate
  modified_base 13: mod_base = OTHER; note = 2'-O-methyluridine-3'-phosphate
  modified_base 14: mod_base = OTHER; note = 2'-O-methyluridine-3'-phosphate
  modified_base 15: mod_base = OTHER; note = 2'-O-methyluridine-3'-phosphate
  modified_base 16: mod_base = OTHER; note = 2'-O-methyluridine-3'-phosphate
  modified_base 17: mod_base = OTHER; note = 2'-O-methyluridine-3'-phosphate
  modified_base 18: mod_base = OTHER; note = 2'-O-methyladenosine-3'-phosphate
  modified_base 19: mod_base = OTHER; note = 2'-O-methyluridine
ggttttgtagcatttttat

SEQ ID NO: 1805 - RNA, 21 nt, synthetic construct
  source 1..21: mol_type = other RNA
  modified_base 1: mod_base = OTHER; note = 5'-phosphate-2'-O-methyladenosine-3'-phosphorothioate
  modified_base 2: mod_base = OTHER; note = 2'-fluorouridine-3'-phosphorothioate
  modified_base 3: mod_base = OTHER; note = 2'-O-methyladenosine-3'-phosphate
  modified_base 4: mod_base = OTHER; note = 2'-O-methyladenosine-3'-phosphate
  modified_base 5: mod_base = OTHER; note = 2'-O-methyladenosine-3'-phosphate
  modified_base 6: mod_base = OTHER; note = 2'-fluoroadenosine-3'-phosphate
  modified_base 7: mod_base = OTHER; note = 2'-O-methyladenosine-3'-phosphate
  modified_base 8: mod_base = OTHER; note = 2'-fluorouridine-3'-phosphate
  modified_base 9: mod_base = OTHER; note = 2'-fluoroguanosine-3'-phosphate
  modified_base 10: mod_base = OTHER; note = 2'-O-methylcytidine-3'-phosphate
  modified_base 11: mod_base = OTHER; note = 2'-O-methyluridine-3'-phosphate
  modified_base 12: mod_base = OTHER; note = 2'-O-methyladenosine-3'-phosphate
  modified_base 13: mod_base = OTHER; note = 2'-O-methylcytidine-3'-phosphate
  modified_base 14: mod_base = OTHER; note = 2'-fluoroadenosine-3'-phosphate
  modified_base 15: mod_base = OTHER; note = 2'-O-methyladenosine-3'-phosphate
  modified_base 16: mod_base = OTHER; note = 2'-fluoroadenosine-3'-phosphate
  modified_base 17: mod_base = OTHER; note = 2'-O-methyladenosine-3'-phosphate
  modified_base 18: mod_base = OTHER; note = 2'-O-methylcytidine-3'-phosphate
  modified_base 19: mod_base = OTHER; note = 2'-O-methylcytidine-3'-phosphorothioate
  modified_base 20: mod_base = OTHER; note = 2'-O-methylcytidine-3'-phosphorothioate
  modified_base 21: mod_base = OTHER; note = 2'-O-methyladenosine
ataaaaatgctacaaaaccca

SEQ ID NO: 1806 - RNA, 19 nt, synthetic construct
  source 1..19: mol_type = other RNA
  modified_base 1: mod_base = OTHER; note = 2'-O-methylguanosine-3'-phosphorothioate
  modified_base 2: mod_base = OTHER; note = 2'-O-methylguanosine-3'-phosphorothioate
  modified_base 3: mod_base = OTHER; note = 2'-O-methyluridine-3'-phosphate
  modified_base 4: mod_base = OTHER; note = 2'-O-methyluridine-3'-phosphate
  modified_base 5: mod_base = OTHER; note = 2'-fluorouridine-3'-phosphate
  modified_base 6: mod_base = OTHER; note = 2'-O-methyluridine-3'-phosphate
  modified_base 7: mod_base = OTHER; note = 2'-fluoroguanosine-3'-phosphate
  modified_base 8: mod_base = OTHER; note = 2'-fluorouridine-3'-phosphate
  modified_base 9: mod_base = OTHER; note = 2'-fluoroadenosine-3'-phosphate
  modified_base 10: mod_base = OTHER; note = 2'-O-methylguanosine-3'-phosphate
  modified_base 11: mod_base = OTHER; note = 2'-O-methylcytidine-3'-phosphate
  modified_base 12: mod_base = OTHER; note = 2'-O-methyladenosine-3'-phosphate
  modified_base 13: mod_base = OTHER; note = 2'-O-methyluridine-3'-phosphate
  modified_base 14: mod_base = OTHER; note = 2'-O-methyluridine-3'-phosphate
  modified_base 15: mod_base = OTHER; note = 2'-O-methyluridine-3'-phosphate
  modified_base 16: mod_base = OTHER; note = 2'-O-methyluridine-3'-phosphate
  modified_base 17: mod_base = OTHER; note = 2'-O-methyluridine-3'-phosphate
  modified_base 18: mod_base = OTHER; note = 2'-O-methyladenosine-3'-phosphate
  modified_base 19: mod_base = OTHER; note = 2'-O-methyluridine
ggttttgtagcatttttat

SEQ ID NO: 1807 - RNA, 21 nt, synthetic construct
  source 1..21: mol_type = other RNA
  modified_base 1: mod_base = OTHER; note = 5'-phosphate-2'-O-methyladenosine-3'-phosphorothioate
  modified_base 2: mod_base = OTHER; note = 2'-fluorouridine-3'-phosphorothioate
  modified_base 3: mod_base = OTHER; note = 2'-O-methyladenosine-3'-phosphate
  modified_base 4: mod_base = OTHER; note = 2'-O-methyladenosine-3'-phosphate
  modified_base 5: mod_base = OTHER; note = 2'-O-methyladenosine-3'-phosphate
  modified_base 6: mod_base = OTHER; note = 2'-fluoroadenosine-3'-phosphate
  modified_base 7: mod_base = OTHER; note = 2'-O-methyladenosine-3'-phosphate
  modified_base 8: mod_base = OTHER; note = 2'-O-methyluridine-3'-phosphate
  modified_base 9: mod_base = OTHER; note = 2'-O-methylguanosine-3'-phosphate
  modified_base 10: mod_base = OTHER; note = 2'-O-methylcytidine-3'-phosphate
  modified_base 11: mod_base = OTHER; note = 2'-O-methyluridine-3'-phosphate
  modified_base 12: mod_base = OTHER; note = 2'-O-methyladenosine-3'-phosphate
  modified_base 13: mod_base = OTHER; note = 2'-O-methylcytidine-3'-phosphate
  modified_base 14: mod_base = OTHER; note = 2'-fluoroadenosine-3'-phosphate
  modified_base 15: mod_base = OTHER; note = 2'-O-methyladenosine-3'-phosphate
  modified_base 16: mod_base = OTHER; note = 2'-fluoroadenosine-3'-phosphate
  modified_base 17: mod_base = OTHER; note = 2'-O-methyladenosine-3'-phosphate
  modified_base 18: mod_base = OTHER; note = 2'-O-methylcytidine-3'-phosphate
  modified_base 19: mod_base = OTHER; note = 2'-O-methylcytidine-3'-phosphorothioate
  modified_base 20: mod_base = OTHER; note = 2'-O-methylcytidine-3'-phosphorothioate
  modified_base 21: mod_base = OTHER; note = 2'-O-methyladenosine
ataaaaatgctacaaaaccca

SEQ ID NO: 1808 - RNA, 21 nt, synthetic construct
  source 1..21: mol_type = other RNA
  modified_base 1: mod_base = OTHER; note = 2'-O-methyluridine-3'-phosphorothioate
  modified_base 2: mod_base = OTHER; note = 2'-O-methylguanosine-3'-phosphorothioate
  modified_base 3: mod_base = OTHER; note = 2'-O-methylguanosine-3'-phosphate
  modified_base 4: mod_base = OTHER; note = 2'-O-methylguanosine-3'-phosphate
  modified_base 5: mod_base = OTHER; note = 2'-O-methyluridine-3'-phosphate
  modified_base 6: mod_base = OTHER; note = 2'-O-methyluridine-3'-phosphate
  modified_base 7: mod_base = OTHER; note = 2'-O-methyluridine-3'-phosphate
  modified_base 8: mod_base = OTHER; note = 2'-O-methyluridine-3'-phosphate
  modified_base 9: mod_base = OTHER; note = 2'-fluoroguanosine-3'-phosphate
  modified_base 10: mod_base = OTHER; note = 2'-fluorouridine-3'-phosphate
  modified_base 11: mod_base = OTHER; note = 2'-fluoroadenosine-3'-phosphate
  modified_base 12: mod_base = OTHER; note = 2'-O-methylguanosine-3'-phosphate
  modified_base 13: mod_base = OTHER; note = 2'-O-methylcytidine-3'-phosphate
  modified_base 14: mod_base = OTHER; note = 2'-O-methyladenosine-3'-phosphate
  modified_base 15: mod_base = OTHER; note = 2'-O-methyluridine-3'-phosphate
  modified_base 16: mod_base = OTHER; note = 2'-O-methyluridine-3'-phosphate
  modified_base 17: mod_base = OTHER; note = 2'-O-methyluridine-3'-phosphate
  modified_base 18: mod_base = OTHER; note = 2'-O-methyluridine-3'-phosphate
  modified_base 19: mod_base = OTHER; note = 2'-O-methyluridine-3'-phosphate
  modified_base 20: mod_base = OTHER; note = 2'-O-methyladenosine-3'-phosphate
  modified_base 21: mod_base = OTHER; note = 2'-O-methyluridine
tgggttttgtagcatttttat

SEQ ID NO: 1809 - RNA, 23 nt, synthetic construct
  source 1..23: mol_type = other RNA
  modified_base 1: mod_base = OTHER; note = 5'-phosphate-2'-O-methyladenosine-3'-phosphorothioate
  modified_base 2: mod_base = OTHER; note = 2'-fluorouridine-3'-phosphorothioate
  modified_base 3: mod_base = OTHER; note = 2'-O-methyladenosine-3'-phosphate
  modified_base 4: mod_base = OTHER; note = 2'-O-methyladenosine-3'-phosphate
  modified_base 5: mod_base = OTHER; note = 2'-O-methyladenosine-3'-phosphate
  modified_base 6: mod_base = OTHER; note = 2'-fluoroadenosine-3'-phosphate
  modified_base 7: mod_base = OTHER; note = 2'-O-methyladenosine-3'-phosphate
  modified_base 8: mod_base = OTHER; note = 2'-O-methyluridine-3'-phosphate
  modified_base 9: mod_base = OTHER; note = 2'-O-methylguanosine-3'-phosphate
  modified_base 10: mod_base = OTHER; note = 2'-O-methylcytidine-3'-phosphate
  modified_base 11: mod_base = OTHER; note = 2'-O-methyluridine-3'-phosphate
  modified_base 12: mod_base = OTHER; note = 2'-O-methyladenosine-3'-phosphate
  modified_base 13: mod_base = OTHER; note = 2'-O-methylcytidine-3'-phosphate
  modified_base 14: mod_base = OTHER; note = 2'-fluoroadenosine-3'-phosphate
  modified_base 15: mod_base = OTHER; note = 2'-O-methyladenosine-3'-phosphate
  modified_base 16: mod_base = OTHER; note = 2'-fluoroadenosine-3'-phosphate
  modified_base 17: mod_base = OTHER; note = 2'-O-methyladenosine-3'-phosphate
  modified_base 18: mod_base = OTHER; note = 2'-O-methylcytidine-3'-phosphate
  modified_base 19: mod_base = OTHER; note = 2'-O-methylcytidine-3'-phosphate
  modified_base 20: mod_base = OTHER; note = 2'-O-methylcytidine-3'-phosphate
  modified_base 21: mod_base = OTHER; note = 2'-O-methyladenosine-3'-phosphorothioate
  modified_base 22: mod_base = OTHER; note = 2'-O-methylguanosine-3'-phosphorothioate
  modified_base 23: mod_base = OTHER; note = 2'-O-methyladenosine
ataaaaatgctacaaaacccaga

SEQ ID NO: 1810 - RNA, 21 nt, synthetic construct
  source 1..21: mol_type = other RNA
  modified_base 1: mod_base = OTHER; note = 2'-O-methyluridine-3'-phosphorothioate
  modified_base 2: mod_base = OTHER; note = 2'-O-methylguanosine-3'-phosphorothioate
  modified_base 3: mod_base = OTHER; note = 2'-O-methylguanosine-3'-phosphate
  modified_base 4: mod_base = OTHER; note = 2'-O-methylguanosine-3'-phosphate
  modified_base 5: mod_base = OTHER; note = 2'-O-methyluridine-3'-phosphate
  modified_base 6: mod_base = OTHER; note = 2'-O-methyluridine-3'-phosphate
  modified_base 7: mod_base = OTHER; note = 2'-fluorouridine-3'-phosphate
  modified_base 8: mod_base = OTHER; note = 2'-O-methyluridine-3'-phosphate
  modified_base 9: mod_base = OTHER; note = 2'-fluoroguanosine-3'-phosphate
  modified_base 10: mod_base = OTHER; note = 2'-fluorouridine-3'-phosphate
  modified_base 11: mod_base = OTHER; note = 2'-fluoroadenosine-3'-phosphate
  modified_base 12: mod_base = OTHER; note = 2'-O-methylguanosine-3'-phosphate
  modified_base 13: mod_base = OTHER; note = 2'-O-methylcytidine-3'-phosphate
  modified_base 14: mod_base = OTHER; note = 2'-O-methyladenosine-3'-phosphate
  modified_base 15: mod_base = OTHER; note = 2'-O-methyluridine-3'-phosphate
  modified_base 16: mod_base = OTHER; note = 2'-O-methyluridine-3'-phosphate
  modified_base 17: mod_base = OTHER; note = 2'-O-methyluridine-3'-phosphate
  modified_base 18: mod_base = OTHER; note = 2'-O-methyluridine-3'-phosphate
  modified_base 19: mod_base = OTHER; note = 2'-O-methyluridine-3'-phosphate
  modified_base 20: mod_base = OTHER; note = 2'-O-methyladenosine-3'-phosphate
  modified_base 21: mod_base = OTHER; note = 2'-O-methyluridine
tgggttttgtagcatttttat

SEQ ID NO: 1811 - RNA, 23 nt, synthetic construct
  source 1..23: mol_type = other RNA
  modified_base 1: mod_base = OTHER; note = 5'-phosphate-2'-O-methyladenosine-3'-phosphorothioate
  modified_base 2: mod_base = OTHER; note = 2'-fluorouridine-3'-phosphorothioate
  modified_base 3: mod_base = OTHER; note = 2'-O-methyladenosine-3'-phosphate
  modified_base 4: mod_base = OTHER; note = 2'-O-methyladenosine-3'-phosphate
  modified_base 5: mod_base = OTHER; note = 2'-O-methyladenosine-3'-phosphate
  modified_base 6: mod_base = OTHER; note = 2'-fluoroadenosine-3'-phosphate
  modified_base 7: mod_base = OTHER; note = 2'-O-methyladenosine-3'-phosphate
  modified_base 8: mod_base = OTHER; note = 2'-fluorouridine-3'-phosphate
  modified_base 9: mod_base = OTHER; note = 2'-fluoroguanosine-3'-phosphate
  modified_base 10: mod_base = OTHER; note = 2'-O-methylcytidine-3'-phosphate
  modified_base 11: mod_base = OTHER; note = 2'-O-methyluridine-3'-phosphate
  modified_base 12: mod_base = OTHER; note = 2'-O-methyladenosine-3'-phosphate
  modified_base 13: mod_base = OTHER; note = 2'-O-methylcytidine-3'-phosphate
  modified_base 14: mod_base = OTHER; note = 2'-fluoroadenosine-3'-phosphate
  modified_base 15: mod_base = OTHER; note = 2'-O-methyladenosine-3'-phosphate
  modified_base 16: mod_base = OTHER; note = 2'-fluoroadenosine-3'-phosphate
  modified_base 17: mod_base = OTHER; note = 2'-O-methyladenosine-3'-phosphate
  modified_base 18: mod_base = OTHER; note = 2'-O-methylcytidine-3'-phosphate
  modified_base 19: mod_base = OTHER; note = 2'-O-methylcytidine-3'-phosphate
  modified_base 20: mod_base = OTHER; note = 2'-O-methylcytidine-3'-phosphate
  modified_base 21: mod_base = OTHER; note = 2'-O-methyladenosine-3'-phosphorothioate
  modified_base 22: mod_base = OTHER; note = 2'-O-methylguanosine-3'-phosphorothioate
  modified_base 23: mod_base = OTHER; note = 2'-O-methyladenosine
ataaaaatgctacaaaacccaga

SEQ ID NO: 1812 - RNA, 21 nt, synthetic construct
  source 1..21: mol_type = other RNA
  modified_base 1: mod_base = OTHER; note = 2'-O-methyluridine-3'-phosphorothioate
  modified_base 2: mod_base = OTHER; note = 2'-O-methylguanosine-3'-phosphorothioate
  modified_base 3: mod_base = OTHER; note = 2'-O-methylguanosine-3'-phosphate
  modified_base 4: mod_base = OTHER; note = 2'-O-methylguanosine-3'-phosphate
  modified_base 5: mod_base = OTHER; note = 2'-O-methyluridine-3'-phosphate
  modified_base 6: mod_base = OTHER; note = 2'-O-methyluridine-3'-phosphate
  modified_base 7: mod_base = OTHER; note = 2'-fluorouridine-3'-phosphate
  modified_base 8: mod_base = OTHER; note = 2'-O-methyluridine-3'-phosphate
  modified_base 9: mod_base = OTHER; note = 2'-fluoroguanosine-3'-phosphate
  modified_base 10: mod_base = OTHER; note = 2'-fluorouridine-3'-phosphate
  modified_base 11: mod_base = OTHER; note = 2'-fluoroadenosine-3'-phosphate
  modified_base 12: mod_base = OTHER; note = 2'-O-methylguanosine-3'-phosphate
  modified_base 13: mod_base = OTHER; note = 2'-O-methylcytidine-3'-phosphate
  modified_base 14: mod_base = OTHER; note = 2'-O-methyladenosine-3'-phosphate
  modified_base 15: mod_base = OTHER; note = 2'-O-methyluridine-3'-phosphate
  modified_base 16: mod_base = OTHER; note = 2'-O-methyluridine-3'-phosphate
  modified_base 17: mod_base = OTHER; note = 2'-O-methyluridine-3'-phosphate
  modified_base 18: mod_base = OTHER; note = 2'-O-methyluridine-3'-phosphate
  modified_base 19: mod_base = OTHER; note = 2'-O-methyluridine-3'-phosphate
  modified_base 20: mod_base = OTHER; note = 2'-O-methyladenosine-3'-phosphate
  modified_base 21: mod_base = OTHER; note = 2'-O-methyluridine
tgggttttgtagcatttttat

SEQ ID NO: 1813 - RNA, 23 nt, synthetic construct
  source 1..23: mol_type = other RNA
  modified_base 1: mod_base = OTHER; note = 5'-phosphate-2'-O-methyladenosine-3'-phosphorothioate
  modified_base 2: mod_base = OTHER; note = 2'-fluorouridine-3'-phosphorothioate
  modified_base 3: mod_base = OTHER; note = 2'-O-methyladenosine-3'-phosphate
  modified_base 4: mod_base = OTHER; note = 2'-O-methyladenosine-3'-phosphate
  modified_base 5: mod_base = OTHER; note = 2'-O-methyladenosine-3'-phosphate
  modified_base 6: mod_base = OTHER; note = 2'-fluoroadenosine-3'-phosphate
  modified_base 7: mod_base = OTHER; note = 2'-O-methyladenosine-3'-phosphate
  modified_base 8: mod_base = OTHER; note = 2'-O-methyluridine-3'-phosphate
  modified_base 9: mod_base = OTHER; note = 2'-O-methylguanosine-3'-phosphate
  modified_base 10: mod_base = OTHER; note = 2'-O-methylcytidine-3'-phosphate
  modified_base 11: mod_base = OTHER; note = 2'-O-methyluridine-3'-phosphate
  modified_base 12: mod_base = OTHER; note = 2'-O-methyladenosine-3'-phosphate
  modified_base 13: mod_base = OTHER; note = 2'-O-methylcytidine-3'-phosphate
  modified_base 14: mod_base = OTHER; note = 2'-fluoroadenosine-3'-phosphate
  modified_base 15: mod_base = OTHER; note = 2'-O-methyladenosine-3'-phosphate
  modified_base 16: mod_base = OTHER; note = 2'-fluoroadenosine-3'-phosphate
  modified_base 17: mod_base = OTHER; note = 2'-O-methyladenosine-3'-phosphate
  modified_base 18: mod_base = OTHER; note = 2'-O-methylcytidine-3'-phosphate
  modified_base 19: mod_base = OTHER; note = 2'-O-methylcytidine-3'-phosphate
  modified_base 20: mod_base = OTHER; note = 2'-O-methylcytidine-3'-phosphate
  modified_base 21: mod_base = OTHER; note = 2'-O-methyladenosine-3'-phosphorothioate
  modified_base 22: mod_base = OTHER; note = 2'-O-methylguanosine-3'-phosphorothioate
  modified_base 23: mod_base = OTHER; note = 2'-O-methyladenosine
ataaaaatgctacaaaacccaga

SEQ ID NO: 1814 - RNA, 19 nt, synthetic construct
  source 1..19: mol_type = other RNA
gtgactttttaaaataaaa

SEQ ID NO: 1815 - RNA, 21 nt, synthetic construct
  source 1..21: mol_type = other RNA
ttttattttaaaaagtcacca

SEQ ID NO: 1816 - RNA, 21 nt, synthetic construct
  source 1..21: mol_type = other RNA
tggtgactttttaaaataaaa

SEQ ID NO: 1817 - RNA, 23 nt, synthetic construct
  source 1..23: mol_type = other RNA
ttttattttaaaaagtcaccata

SEQ ID NO: 1818 - RNA, 19 nt, synthetic construct
  source 1..19: mol_type = other RNA
  modified_base 1: mod_base = OTHER; note = 2'-O-methylguanosine-3'-phosphate
  modified_base 2: mod_base = OTHER; note = 2'-O-methyluridine-3'-phosphate
  modified_base 3: mod_base = OTHER; note = 2'-O-methylguanosine-3'-phosphate
  modified_base 4: mod_base = OTHER; note = 2'-O-methyladenosine-3'-phosphate
  modified_base 5: mod_base = OTHER; note = 2'-O-methylcytidine-3'-phosphate
  modified_base 6: mod_base = OTHER; note = 2'-O-methyluridine-3'-phosphate
  modified_base 7: mod_base = OTHER; note = 2'-fluorouridine-3'-phosphate
  modified_base 8: mod_base = OTHER; note = 2'-fluorouridine-3'-phosphate
  modified_base 9: mod_base = OTHER; note = 2'-fluorouridine-3'-phosphate
  modified_base 10: mod_base = OTHER; note = 2'-O-methyluridine-3'-phosphate
  modified_base 11: mod_base = OTHER; note = 2'-O-methyladenosine-3'-phosphate
  modified_base 12: mod_base = OTHER; note = 2'-O-methyladenosine-3'-phosphate
  modified_base 13: mod_base = OTHER; note = 2'-O-methyladenosine-3'-phosphate
  modified_base 14: mod_base = OTHER; note = 2'-O-methyladenosine-3'-phosphate
  modified_base 15: mod_base = OTHER; note = 2'-O-methyluridine-3'-phosphate
  modified_base 16: mod_base = OTHER; note = 2'-O-methyladenosine-3'-phosphate
  modified_base 17: mod_base = OTHER; note = 2'-O-methyladenosine-3'-phosphate
  modified_base 18: mod_base = OTHER; note = 2'-O-methyladenosine-3'-phosphate
  modified_base 19: mod_base = OTHER; note = 2'-O-methyladenosine
gtgactttttaaaataaaa

SEQ ID NO: 1819 - RNA, 21 nt, synthetic construct
  source 1..21: mol_type = other RNA
  modified_base 1: mod_base = OTHER; note = 2'-O-methyluridine-3'-phosphate
  modified_base 2: mod_base = OTHER; note = 2'-fluorouridine-3'-phosphate
  modified_base 3: mod_base = OTHER; note = 2'-O-methyluridine-3'-phosphate
  modified_base 4: mod_base = OTHER; note = 2'-O-methyluridine-3'-phosphate
  modified_base 5: mod_base = OTHER; note = 2'-O-methyladenosine-3'-phosphate
  modified_base 6: mod_base = OTHER; note = 2'-fluorouridine-3'-phosphate
  modified_base 7: mod_base = OTHER; note = 2'-O-methyluridine-3'-phosphate
  modified_base 8: mod_base = OTHER; note = 2'-O-methyluridine-3'-phosphate
  modified_base 9: mod_base = OTHER; note = 2'-O-methyluridine-3'-phosphate
  modified_base 10: mod_base = OTHER; note = 2'-O-methyladenosine-3'-phosphate
  modified_base 11: mod_base = OTHER; note = 2'-O-methyladenosine-3'-phosphate
  modified_base 12: mod_base = OTHER; note = 2'-O-methyladenosine-3'-phosphate
  modified_base 13: mod_base = OTHER; note = 2'-O-methyladenosine-3'-phosphate
  modified_base 14: mod_base = OTHER; note = 2'-fluoroadenosine-3'-phosphate
  modified_base 15: mod_base = OTHER; note = 2'-O-methylguanosine-3'-phosphate
  modified_base 16: mod_base = OTHER; note = 2'-fluorouridine-3'-phosphate
  modified_base 17: mod_base = OTHER; note = 2'-O-methylcytidine-3'-phosphate
  modified_base 18: mod_base = OTHER; note = 2'-O-methyladenosine-3'-phosphate
  modified_base 19: mod_base = OTHER; note = 2'-O-methylcytidine-3'-phosphate
  modified_base 20: mod_base = OTHER; note = 2'-O-methylcytidine-3'-phosphate
  modified_base 21: mod_base = OTHER; note = 2'-O-methyladenosine
ttttattttaaaaagtcacca

SEQ ID NO: 1820 - RNA, 19 nt, synthetic construct
  source 1..19: mol_type = other RNA
  modified_base 1: mod_base = OTHER; note = 2'-O-methylguanosine-3'-phosphate
  modified_base 2: mod_base = OTHER; note = 2'-O-methyluridine-3'-phosphate
  modified_base 3: mod_base = OTHER; note = 2'-O-methylguanosine-3'-phosphate
  modified_base 4: mod_base = OTHER; note = 2'-O-methyladenosine-3'-phosphate
  modified_base 5: mod_base = OTHER; note = 2'-fluorocytidine-3'-phosphate
  modified_base 6: mod_base = OTHER; note = 2'-O-methyluridine-3'-phosphate
  modified_base 7: mod_base = OTHER; note = 2'-fluorouridine-3'-phosphate
  modified_base 8: mod_base = OTHER; note = 2'-fluorouridine-3'-phosphate
  modified_base 9: mod_base = OTHER; note = 2'-fluorouridine-3'-phosphate
  modified_base 10: mod_base = OTHER; note = 2'-O-methyluridine-3'-phosphate
  modified_base 11: mod_base = OTHER; note = 2'-O-methyladenosine-3'-phosphate
  modified_base 12: mod_base = OTHER; note = 2'-O-methyladenosine-3'-phosphate
  modified_base 13: mod_base = OTHER; note = 2'-O-methyladenosine-3'-phosphate
  modified_base 14: mod_base = OTHER; note = 2'-O-methyladenosine-3'-phosphate
  modified_base 15: mod_base = OTHER; note = 2'-O-methyluridine-3'-phosphate
  modified_base 16: mod_base = OTHER; note = 2'-O-methyladenosine-3'-phosphate
  modified_base 17: mod_base = OTHER; note = 2'-O-methyladenosine-3'-phosphate
  modified_base 18: mod_base = OTHER; note = 2'-O-methyladenosine-3'-phosphate
  modified_base 19: mod_base = OTHER; note = 2'-O-methyladenosine
gtgactttttaaaataaaa

SEQ ID NO: 1821 - RNA, 21 nt, synthetic construct
  source 1..21: mol_type = other RNA
  modified_base 1: mod_base = OTHER; note = 2'-O-methyluridine-3'-phosphate
  modified_base 2: mod_base = OTHER; note = 2'-fluorouridine-3'-phosphate
  modified_base 3: mod_base = OTHER; note = 2'-O-methyluridine-3'-phosphate
  modified_base 4: mod_base = OTHER; note = 2'-O-methyluridine-3'-phosphate
  modified_base 5: mod_base = OTHER; note = 2'-O-methyladenosine-3'-phosphate
  modified_base 6: mod_base = OTHER; note = 2'-fluorouridine-3'-phosphate
  modified_base 7: mod_base = OTHER; note = 2'-O-methyluridine-3'-phosphate
  modified_base 8: mod_base = OTHER; note = 2'-fluorouridine-3'-phosphate
  modified_base 9: mod_base = OTHER; note = 2'-fluorouridine-3'-phosphate
  modified_base 10: mod_base = OTHER; note = 2'-O-methyladenosine-3'-phosphate
  modified_base 11: mod_base = OTHER; note = 2'-O-methyladenosine-3'-phosphate
  modified_base 12: mod_base = OTHER; note = 2'-O-methyladenosine-3'-phosphate
  modified_base 13: mod_base = OTHER; note = 2'-O-methyladenosine-3'-phosphate
  modified_base 14: mod_base = OTHER; note = 2'-fluoroadenosine-3'-phosphate
  modified_base 15: mod_base = OTHER; note = 2'-O-methylguanosine-3'-phosphate
  modified_base 16: mod_base = OTHER; note = 2'-fluorouridine-3'-phosphate
  modified_base 17: mod_base = OTHER; note = 2'-O-methylcytidine-3'-phosphate
  modified_base 18: mod_base = OTHER; note = 2'-O-methyladenosine-3'-phosphate
  modified_base 19: mod_base = OTHER; note = 2'-O-methylcytidine-3'-phosphate
  modified_base 20: mod_base = OTHER; note = 2'-O-methylcytidine-3'-phosphate
  modified_base 21: mod_base = OTHER; note = 2'-O-methyladenosine
ttttattttaaaaagtcacca

SEQ ID NO: 1822 - RNA, 19 nt, synthetic construct
  source 1..19: mol_type = other RNA
  modified_base 1: mod_base = OTHER; note = 2'-O-methylguanosine-3'-phosphate
  modified_base 2: mod_base = OTHER; note = 2'-O-methyluridine-3'-phosphate
  modified_base 3: mod_base = OTHER; note = 2'-O-methylguanosine-3'-phosphate
  modified_base 4: mod_base = OTHER; note = 2'-O-methyladenosine-3'-phosphate
  modified_base 5: mod_base = OTHER; note = 2'-fluorocytidine-3'-phosphate
  modified_base 6: mod_base = OTHER; note = 2'-O-methyluridine-3'-phosphate
  modified_base 7: mod_base = OTHER; note = 2'-fluorouridine-3'-phosphate
  modified_base 8: mod_base = OTHER; note = 2'-fluorouridine-3'-phosphate
  modified_base 9: mod_base = OTHER; note = 2'-fluorouridine-3'-phosphate
  modified_base 10: mod_base = OTHER; note = 2'-O-methyluridine-3'-phosphate
  modified_base 11: mod_base = OTHER; note = 2'-O-methyladenosine-3'-phosphate
  modified_base 12: mod_base = OTHER; note = 2'-O-methyladenosine-3'-phosphate
  modified_base 13: mod_base = OTHER; note = 2'-O-methyladenosine-3'-phosphate
  modified_base 14: mod_base = OTHER; note = 2'-O-methyladenosine-3'-phosphate
  modified_base 15: mod_base = OTHER; note = 2'-O-methyluridine-3'-phosphate
  modified_base 16: mod_base = OTHER; note = 2'-O-methyladenosine-3'-phosphate
  modified_base 17: mod_base = OTHER; note = 2'-O-methyladenosine-3'-phosphate
  modified_base 18: mod_base = OTHER; note = 2'-O-methyladenosine-3'-phosphate
  modified_base 19: mod_base = OTHER; note = 2'-O-methyladenosine
gtgactttttaaaataaaa

SEQ ID NO: 1823 - RNA, 21 nt, synthetic construct
  source 1..21: mol_type = other RNA
  modified_base 1: mod_base = OTHER; note = 2'-O-methyluridine-3'-phosphate
  modified_base 2: mod_base = OTHER; note = 2'-fluorouridine-3'-phosphate
  modified_base 3: mod_base = OTHER; note = 2'-O-methyluridine-3'-phosphate
  modified_base 4: mod_base = OTHER; note = 2'-O-methyluridine-3'-phosphate
  modified_base 5: mod_base = OTHER; note = 2'-O-methyladenosine-3'-phosphate
  modified_base 6: mod_base = OTHER; note = 2'-fluorouridine-3'-phosphate
  modified_base 7: mod_base = OTHER; note = 2'-O-methyluridine-3'-phosphate
  modified_base 8: mod_base = OTHER; note = 2'-O-methyluridine-3'-phosphate
  modified_base 9: mod_base = OTHER; note = 2'-O-methyluridine-3'-phosphate
  modified_base 10: mod_base = OTHER; note = 2'-O-methyladenosine-3'-phosphate
  modified_base 11: mod_base = OTHER; note = 2'-O-methyladenosine-3'-phosphate
  modified_base 12: mod_base = OTHER; note = 2'-O-methyladenosine-3'-phosphate
  modified_base 13: mod_base = OTHER; note = 2'-O-methyladenosine-3'-phosphate
  modified_base 14: mod_base = OTHER; note = 2'-fluoroadenosine-3'-phosphate
  modified_base 15: mod_base = OTHER; note = 2'-O-methylguanosine-3'-phosphate
  modified_base 16: mod_base = OTHER; note = 2'-fluorouridine-3'-phosphate
  modified_base 17: mod_base = OTHER; note = 2'-O-methylcytidine-3'-phosphate
  modified_base 18: mod_base = OTHER; note = 2'-O-methyladenosine-3'-phosphate
  modified_base 19: mod_base = OTHER; note = 2'-O-methylcytidine-3'-phosphate
  modified_base 20: mod_base = OTHER; note = 2'-O-methylcytidine-3'-phosphate
  modified_base 21: mod_base = OTHER; note = 2'-O-methyladenosine
ttttattttaaaaagtcacca

SEQ ID NO: 1824 - RNA, 21 nt, synthetic construct
  source 1..21: mol_type = other RNA
  modified_base 1: mod_base = OTHER; note = 2'-O-methyluridine-3'-phosphate
  modified_base 2: mod_base = OTHER; note = 2'-O-methylguanosine-3'-phosphate
  modified_base 3: mod_base = OTHER; note = 2'-O-methylguanosine-3'-phosphate
  modified_base 4: mod_base = OTHER; note = 2'-O-methyluridine-3'-phosphate
  modified_base 5: mod_base = OTHER; note = 2'-O-methylguanosine-3'-phosphate
  modified_base 6: mod_base = OTHER; note = 2'-O-methyladenosine-3'-phosphate
  modified_base 7: mod_base = OTHER; note = 2'-O-methylcytidine-3'-phosphate
  modified_base 8: mod_base = OTHER; note = 2'-O-methyluridine-3'-phosphate
  modified_base 9: mod_base = OTHER; note = 2'-fluorouridine-3'-phosphate
  modified_base 10: mod_base = OTHER; note = 2'-fluorouridine-3'-phosphate
  modified_base 11: mod_base = OTHER; note = 2'-fluorouridine-3'-phosphate
  modified_base 12: mod_base = OTHER; note = 2'-O-methyluridine-3'-phosphate
  modified_base 13: mod_base = OTHER; note = 2'-O-methyladenosine-3'-phosphate
  modified_base 14: mod_base = OTHER; note = 2'-O-methyladenosine-3'-phosphate
  modified_base 15: mod_base = OTHER; note = 2'-O-methyladenosine-3'-phosphate
  modified_base 16: mod_base = OTHER; note = 2'-O-methyladenosine-3'-phosphate
  modified_base 17: mod_base = OTHER; note = 2'-O-methyluridine-3'-phosphate
  modified_base 18: mod_base = OTHER; note = 2'-O-methyladenosine-3'-phosphate
  modified_base 19: mod_base = OTHER; note = 2'-O-methyladenosine-3'-phosphate
  modified_base 20: mod_base = OTHER; note = 2'-O-methyladenosine-3'-phosphate
  modified_base 21: mod_base = OTHER; note = 2'-O-methyladenosine
tggtgactttttaaaataaaa

SEQ ID NO: 1825 - RNA, 23 nt, synthetic construct
  source 1..23: mol_type = other RNA
  modified_base 1: mod_base = OTHER; note = 2'-O-methyluridine-3'-phosphate
  modified_base 2: mod_base = OTHER; note = 2'-fluorouridine-3'-phosphate
  modified_base 3: mod_base = OTHER; note = 2'-O-methyluridine-3'-phosphate
  modified_base 4: mod_base = OTHER; note = 2'-O-methyluridine-3'-phosphate
  modified_base 5: mod_base = OTHER; note = 2'-O-methyladenosine-3'-phosphate
  modified_base 6: mod_base = OTHER; note = 2'-fluorouridine-3'-phosphate
  modified_base 7: mod_base = OTHER; note = 2'-O-methyluridine-3'-phosphate
  modified_base 8: mod_base = OTHER; note = 2'-O-methyluridine-3'-phosphate
  modified_base 9: mod_base = OTHER; note = 2'-O-methyluridine-3'-phosphate
  modified_base 10: mod_base = OTHER; note = 2'-O-methyladenosine-3'-phosphate
  modified_base 11: mod_base = OTHER; note = 2'-O-methyladenosine-3'-phosphate
  modified_base 12: mod_base = OTHER; note = 2'-O-methyladenosine-3'-phosphate
  modified_base 13: mod_base = OTHER; note = 2'-O-methyladenosine-3'-phosphate
  modified_base 14: mod_base = OTHER; note = 2'-fluoroadenosine-3'-phosphate
  modified_base 15: mod_base = OTHER; note = 2'-O-methylguanosine-3'-phosphate
  modified_base 16: mod_base = OTHER; note = 2'-fluorouridine-3'-phosphate
  modified_base 17: mod_base = OTHER; note = 2'-O-methylcytidine-3'-phosphate
  modified_base 18: mod_base = OTHER; note = 2'-O-methyladenosine-3'-phosphate
  modified_base 19: mod_base = OTHER; note = 2'-O-methylcytidine-3'-phosphate
  modified_base 20: mod_base = OTHER; note = 2'-O-methylcytidine-3'-phosphate
  modified_base 21: mod_base = OTHER; note = 2'-O-methyladenosine-3'-phosphate
  modified_base 22: mod_base = OTHER; note = 2'-O-methyluridine-3'-phosphate
  modified_base 23: mod_base = OTHER; note = 2'-O-methyladenosine
ttttattttaaaaagtcaccata

SEQ ID NO: 1826 - RNA, 21 nt, synthetic construct
  source 1..21: mol_type = other RNA
  modified_base 1: mod_base = OTHER; note = 2'-O-methyluridine-3'-phosphate
  modified_base 2: mod_base = OTHER; note = 2'-O-methylguanosine-3'-phosphate
  modified_base 3: mod_base = OTHER; note = 2'-O-methylguanosine-3'-phosphate
  modified_base 4: mod_base = OTHER; note = 2'-O-methyluridine-3'-phosphate
  modified_base 5: mod_base = OTHER; note = 2'-O-methylguanosine-3'-phosphate
  modified_base 6: mod_base = OTHER; note = 2'-O-methyladenosine-3'-phosphate
  modified_base 7: mod_base = OTHER; note = 2'-fluorocytidine-3'-phosphate
  modified_base 8: mod_base = OTHER; note = 2'-O-methyluridine-3'-phosphate
  modified_base 9: mod_base = OTHER; note = 2'-fluorouridine-3'-phosphate
  modified_base 10: mod_base = OTHER; note = 2'-fluorouridine-3'-phosphate
  modified_base 11: mod_base = OTHER; note = 2'-fluorouridine-3'-phosphate
  modified_base 12: mod_base = OTHER; note = 2'-O-methyluridine-3'-phosphate
  modified_base 13: mod_base = OTHER; note = 2'-O-methyladenosine-3'-phosphate
  modified_base 14: mod_base = OTHER; note = 2'-O-methyladenosine-3'-phosphate
  modified_base 15: mod_base = OTHER; note = 2'-O-methyladenosine-3'-phosphate
  modified_base 16: mod_base = OTHER; note = 2'-O-methyladenosine-3'-phosphate
  modified_base 17: mod_base = OTHER; note = 2'-O-methyluridine-3'-phosphate
  modified_base 18: mod_base = OTHER; note = 2'-O-methyladenosine-3'-phosphate
  modified_base 19: mod_base = OTHER; note = 2'-O-methyladenosine-3'-phosphate
  modified_base 20: mod_base = OTHER; note = 2'-O-methyladenosine-3'-phosphate
  modified_base 21: mod_base = OTHER; note = 2'-O-methyladenosine
tggtgactttttaaaataaaa

SEQ ID NO: 1827 - RNA, 23 nt, synthetic construct
  source 1..23: mol_type = other RNA
  modified_base 1: mod_base = OTHER; note = 2'-O-methyluridine-3'-phosphate
  modified_base 2: mod_base = OTHER; note = 2'-fluorouridine-3'-phosphate
  modified_base 3: mod_base = OTHER; note = 2'-O-methyluridine-3'-phosphate
  modified_base 4: mod_base = OTHER; note = 2'-O-methyluridine-3'-phosphate
  modified_base 5: mod_base = OTHER; note = 2'-O-methyladenosine-3'-phosphate
  modified_base 6: mod_base = OTHER; note = 2'-fluorouridine-3'-phosphate
  modified_base 7: mod_base = OTHER; note = 2'-O-methyluridine-3'-phosphate
  modified_base 8: mod_base = OTHER; note = 2'-fluorouridine-3'-phosphate
  modified_base 9: mod_base = OTHER; note = 2'-fluorouridine-3'-phosphate
  modified_base 10: mod_base = OTHER; note = 2'-O-methyladenosine-3'-phosphate
  modified_base 11: mod_base = OTHER; note = 2'-O-methyladenosine-3'-phosphate
  modified_base 12: mod_base = OTHER; note = 2'-O-methyladenosine-3'-phosphate
  modified_base 13: mod_base = OTHER; note = 2'-O-methyladenosine-3'-phosphate
  modified_base 14: mod_base = OTHER; note = 2'-fluoroadenosine-3'-phosphate
  modified_base 15: mod_base = OTHER; note = 2'-O-methylguanosine-3'-phosphate
  modified_base 16: mod_base = OTHER; note = 2'-fluorouridine-3'-phosphate
  modified_base 17: mod_base = OTHER; note = 2'-O-methylcytidine-3'-phosphate
  modified_base 18: mod_base = OTHER; note = 2'-O-methyladenosine-3'-phosphate
  modified_base 19: mod_base = OTHER; note = 2'-O-methylcytidine-3'-phosphate
  modified_base 20: mod_base = OTHER; note = 2'-O-methylcytidine-3'-phosphate
  modified_base 21: mod_base = OTHER; note = 2'-O-methyladenosine-3'-phosphate
  modified_base 22: mod_base = OTHER; note = 2'-O-methyluridine-3'-phosphate
  modified_base 23: mod_base = OTHER; note = 2'-O-methyladenosine
ttttattttaaaaagtcaccata

SEQ ID NO: 1828 - RNA, 21 nt, synthetic construct
  source 1..21: mol_type = other RNA
  modified_base 1: mod_base = OTHER; note = 2'-O-methyluridine-3'-phosphate
  modified_base 2: mod_base = OTHER; note = 2'-O-methylguanosine-3'-phosphate
  modified_base 3: mod_base = OTHER; note = 2'-O-methylguanosine-3'-phosphate
  modified_base 4: mod_base = OTHER; note = 2'-O-methyluridine-3'-phosphate
  modified_base 5: mod_base = OTHER; note = 2'-O-methylguanosine-3'-phosphate
  modified_base 6: mod_base = OTHER; note = 2'-O-methyladenosine-3'-phosphate
  modified_base 7: mod_base = OTHER; note = 2'-fluorocytidine-3'-phosphate
  modified_base 8: mod_base = OTHER; note = 2'-O-methyluridine-3'-phosphate
  modified_base 9: mod_base = OTHER; note = 2'-fluorouridine-3'-phosphate
  modified_base 10: mod_base = OTHER; note = 2'-fluorouridine-3'-phosphate
  modified_base 11: mod_base = OTHER; note = 2'-fluorouridine-3'-phosphate
  modified_base 12: mod_base = OTHER; note = 2'-O-methyluridine-3'-phosphate
  modified_base 13: mod_base = OTHER; note = 2'-O-methyladenosine-3'-phosphate
  modified_base 14: mod_base = OTHER; note = 2'-O-methyladenosine-3'-phosphate
  modified_base 15: mod_base = OTHER; note = 2'-O-methyladenosine-3'-phosphate
  modified_base 16: mod_base = OTHER; note = 2'-O-methyladenosine-3'-phosphate
  modified_base 17: mod_base = OTHER; note = 2'-O-methyluridine-3'-phosphate
  modified_base 18: mod_base = OTHER; note = 2'-O-methyladenosine-3'-phosphate
  modified_base 19: mod_base = OTHER; note = 2'-O-methyladenosine-3'-phosphate
  modified_base 20: mod_base = OTHER; note = 2'-O-methyladenosine-3'-phosphate
  modified_base 21: mod_base = OTHER; note = 2'-O-methyladenosine
tggtgactttttaaaataaaa

SEQ ID NO: 1829 - RNA, 23 nt, synthetic construct
  source 1..23: mol_type = other RNA
  modified_base 1: mod_base = OTHER; note = 2'-O-methyluridine-3'-phosphate
  modified_base 2: mod_base = OTHER; note = 2'-fluorouridine-3'-phosphate
  modified_base 3: mod_base = OTHER; note = 2'-O-methyluridine-3'-phosphate
  modified_base 4: mod_base = OTHER; note = 2'-O-methyluridine-3'-phosphate
  modified_base 5: mod_base = OTHER; note = 2'-O-methyladenosine-3'-phosphate
  modified_base 6: mod_base = OTHER; note = 2'-fluorouridine-3'-phosphate
  modified_base 7: mod_base = OTHER; note = 2'-O-methyluridine-3'-phosphate
  modified_base 8: mod_base = OTHER; note = 2'-O-methyluridine-3'-phosphate
  modified_base 9: mod_base = OTHER; note = 2'-O-methyluridine-3'-phosphate
  modified_base 10: mod_base = OTHER; note = 2'-O-methyladenosine-3'-phosphate
  modified_base 11: mod_base = OTHER; note = 2'-O-methyladenosine-3'-phosphate
  modified_base 12: mod_base = OTHER; note = 2'-O-methyladenosine-3'-phosphate
  modified_base 13: mod_base = OTHER; note = 2'-O-methyladenosine-3'-phosphate
  modified_base 14: mod_base = OTHER; note = 2'-fluoroadenosine-3'-phosphate
  modified_base 15: mod_base = OTHER; note = 2'-O-methylguanosine-3'-phosphate
  modified_base 16: mod_base = OTHER; note = 2'-fluorouridine-3'-phosphate
  modified_base 17: mod_base = OTHER; note = 2'-O-methylcytidine-3'-phosphate
  modified_base 18: mod_base = OTHER; note = 2'-O-methyladenosine-3'-phosphate
  modified_base 19: mod_base = OTHER; note = 2'-O-methylcytidine-3'-phosphate
  modified_base 20: mod_base = OTHER; note = 2'-O-methylcytidine-3'-phosphate
  modified_base 21: mod_base = OTHER; note = 2'-O-methyladenosine-3'-phosphate
  modified_base 22: mod_base = OTHER; note = 2'-O-methyluridine-3'-phosphate
  modified_base 23: mod_base = OTHER; note = 2'-O-methyladenosine
ttttattttaaaaagtcaccata

SEQ ID NO: 1830 - RNA, 19 nt, synthetic construct
  source 1..19: mol_type = other RNA
  modified_base 1: mod_base = OTHER; note = 2'-O-methylguanosine-3'-phosphorothioate
  modified_base 2: mod_base = OTHER; note = 2'-O-methyluridine-3'-phosphorothioate
  modified_base 3: mod_base = OTHER; note = 2'-O-methylguanosine-3'-phosphate
  modified_base 4: mod_base = OTHER; note = 2'-O-methyladenosine-3'-phosphate
  modified_base 5: mod_base = OTHER; note = 2'-O-methylcytidine-3'-phosphate
  modified_base 6: mod_base = OTHER; note = 2'-O-methyluridine-3'-phosphate
  modified_base 7: mod_base = OTHER; note = 2'-fluorouridine-3'-phosphate
  modified_base 8: mod_base = OTHER; note = 2'-fluorouridine-3'-phosphate
  modified_base 9: mod_base = OTHER; note = 2'-fluorouridine-3'-phosphate
  modified_base 10: mod_base = OTHER; note = 2'-O-methyluridine-3'-phosphate
  modified_base 11: mod_base = OTHER; note = 2'-O-methyladenosine-3'-phosphate
  modified_base 12: mod_base = OTHER; note = 2'-O-methyladenosine-3'-phosphate
  modified_base 13: mod_base = OTHER; note = 2'-O-methyladenosine-3'-phosphate
  modified_base 14: mod_base = OTHER; note = 2'-O-methyladenosine-3'-phosphate
  modified_base 15: mod_base = OTHER; note = 2'-O-methyluridine-3'-phosphate
  modified_base 16: mod_base = OTHER; note = 2'-O-methyladenosine-3'-phosphate
  modified_base 17: mod_base = OTHER; note = 2'-O-methyladenosine-3'-phosphate
  modified_base 18: mod_base = OTHER; note = 2'-O-methyladenosine-3'-phosphate
  modified_base 19: mod_base = OTHER; note = 2'-O-methyladenosine
gtgactttttaaaataaaa

SEQ ID NO: 1831 - RNA, 21 nt, synthetic construct
  source 1..21: mol_type = other RNA
  modified_base 1: mod_base = OTHER; note = 2'-O-methyluridine-3'-phosphorothioate
  modified_base 2: mod_base = OTHER; note = 2'-fluorouridine-3'-phosphorothioate
  modified_base 3: mod_base = OTHER; note = 2'-O-methyluridine-3'-phosphate
  modified_base 4: mod_base = OTHER; note = 2'-O-methyluridine-3'-phosphate
  modified_base 5: mod_base = OTHER; note = 2'-O-methyladenosine-3'-phosphate
  modified_base 6: mod_base = OTHER; note = 2'-fluorouridine-3'-phosphate
  modified_base 7: mod_base = OTHER; note = 2'-O-methyluridine-3'-phosphate
  modified_base 8: mod_base = OTHER; note = 2'-O-methyluridine-3'-phosphate
  modified_base 9: mod_base = OTHER; note = 2'-O-methyluridine-3'-phosphate
  modified_base 10: mod_base = OTHER; note = 2'-O-methyladenosine-3'-phosphate
  modified_base 11: mod_base = OTHER; note = 2'-O-methyladenosine-3'-phosphate
  modified_base 12: mod_base = OTHER; note = 2'-O-methyladenosine-3'-phosphate
  modified_base 13: mod_base = OTHER; note = 2'-O-methyladenosine-3'-phosphate
  modified_base 14: mod_base = OTHER; note = 2'-fluoroadenosine-3'-phosphate
  modified_base 15: mod_base = OTHER; note = 2'-O-methylguanosine-3'-phosphate
  modified_base 16: mod_base = OTHER; note = 2'-fluorouridine-3'-phosphate
  modified_base 17: mod_base = OTHER; note = 2'-O-methylcytidine-3'-phosphate
  modified_base 18: mod_base = OTHER; note = 2'-O-methyladenosine-3'-phosphate
  modified_base 19: mod_base = OTHER; note = 2'-O-methylcytidine-3'-phosphorothioate
  modified_base 20: mod_base = OTHER; note = 2'-O-methylcytidine-3'-phosphorothioate
  modified_base 21: mod_base = OTHER; note = 2'-O-methyladenosine
ttttattttaaaaagtcacca

SEQ ID NO: 1832 - RNA, 19 nt, synthetic construct
  source 1..19: mol_type = other RNA
  modified_base 1: mod_base = OTHER; note = 2'-O-methylguanosine-3'-phosphorothioate
  modified_base 2: mod_base = OTHER; note = 2'-O-methyluridine-3'-phosphorothioate
  modified_base 3: mod_base = OTHER; note = 2'-O-methylguanosine-3'-phosphate
  modified_base 4: mod_base = OTHER; note = 2'-O-methyladenosine-3'-phosphate
  modified_base 5: mod_base = OTHER; note = 2'-fluorocytidine-3'-phosphate
  modified_base 6: mod_base = OTHER; note = 2'-O-methyluridine-3'-phosphate
  modified_base 7: mod_base = OTHER; note = 2'-fluorouridine-3'-phosphate
  modified_base 8: mod_base = OTHER; note = 2'-fluorouridine-3'-phosphate
  modified_base 9: mod_base = OTHER; note = 2'-fluorouridine-3'-phosphate
  modified_base 10: mod_base = OTHER; note = 2'-O-methyluridine-3'-phosphate
  modified_base 11: mod_base = OTHER; note = 2'-O-methyladenosine-3'-phosphate
  modified_base 12: mod_base = OTHER; note = 2'-O-methyladenosine-3'-phosphate
  modified_base 13: mod_base = OTHER; note = 2'-O-methyladenosine-3'-phosphate
  modified_base 14: mod_base = OTHER; note = 2'-O-methyladenosine-3'-phosphate
  modified_base 15: mod_base = OTHER; note = 2'-O-methyluridine-3'-phosphate
  modified_base 16: mod_base = OTHER; note = 2'-O-methyladenosine-3'-phosphate
  modified_base 17: mod_base = OTHER; note = 2'-O-methyladenosine-3'-phosphate
  modified_base 18: mod_base = OTHER; note = 2'-O-methyladenosine-3'-phosphate
  modified_base 19: mod_base = OTHER; note = 2'-O-methyladenosine
gtgactttttaaaataaaa

SEQ ID NO: 1833 - RNA, 21 nt, synthetic construct
  source 1..21: mol_type = other RNA
  modified_base 1: mod_base = OTHER; note = 2'-O-methyluridine-3'-phosphorothioate
  modified_base 2: mod_base = OTHER; note = 2'-fluorouridine-3'-phosphorothioate
  modified_base 3: mod_base = OTHER; note = 2'-O-methyluridine-3'-phosphate
  modified_base 4: mod_base = OTHER; note = 2'-O-methyluridine-3'-phosphate
  modified_base 5: mod_base = OTHER; note = 2'-O-methyladenosine-3'-phosphate
  modified_base 6: mod_base = OTHER; note = 2'-fluorouridine-3'-phosphate
  modified_base 7: mod_base = OTHER; note = 2'-O-methyluridine-3'-phosphate
  modified_base 8: mod_base = OTHER; note = 2'-fluorouridine-3'-phosphate
  modified_base 9: mod_base = OTHER; note = 2'-fluorouridine-3'-phosphate
  modified_base 10: mod_base = OTHER; note = 2'-O-methyladenosine-3'-phosphate
  modified_base 11: mod_base = OTHER; note = 2'-O-methyladenosine-3'-phosphate
  modified_base 12: mod_base = OTHER; note = 2'-O-methyladenosine-3'-phosphate
  modified_base 13: mod_base = OTHER; note = 2'-O-methyladenosine-3'-phosphate
  modified_base 14: mod_base = OTHER; note = 2'-fluoroadenosine-3'-phosphate
  modified_base 15: mod_base = OTHER; note = 2'-O-methylguanosine-3'-phosphate
  modified_base 16: mod_base = OTHER; note = 2'-fluorouridine-3'-phosphate
  modified_base 17: mod_base = OTHER; note = 2'-O-methylcytidine-3'-phosphate
  modified_base 18: mod_base = OTHER; note = 2'-O-methyladenosine-3'-phosphate
  modified_base 19: mod_base = OTHER; note = 2'-O-methylcytidine-3'-phosphorothioate
  modified_base 20: mod_base = OTHER; note = 2'-O-methylcytidine-3'-phosphorothioate
  modified_base 21: mod_base = OTHER; note = 2'-O-methyladenosine
ttttattttaaaaagtcacca

SEQ ID NO: 1834 - RNA, 19 nt, synthetic construct
  source 1..19: mol_type = other RNA
  modified_base 1: mod_base = OTHER; note = 2'-O-methylguanosine-3'-phosphorothioate
  modified_base 2: mod_base = OTHER; note = 2'-O-methyluridine-3'-phosphorothioate
  modified_base 3: mod_base = OTHER; note = 2'-O-methylguanosine-3'-phosphate
  modified_base 4: mod_base = OTHER; note = 2'-O-methyladenosine-3'-phosphate
  modified_base 5: mod_base = OTHER; note = 2'-fluorocytidine-3'-phosphate
  modified_base 6: mod_base = OTHER; note = 2'-O-methyluridine-3'-phosphate
  modified_base 7: mod_base = OTHER; note = 2'-fluorouridine-3'-phosphate
  modified_base 8: mod_base = OTHER; note = 2'-fluorouridine-3'-phosphate
  modified_base 9: mod_base = OTHER; note = 2'-fluorouridine-3'-phosphate
  modified_base 10: mod_base = OTHER; note = 2'-O-methyluridine-3'-phosphate
  modified_base 11: mod_base = OTHER; note = 2'-O-methyladenosine-3'-phosphate
  modified_base 12: mod_base = OTHER; note = 2'-O-methyladenosine-3'-phosphate
  modified_base 13: mod_base = OTHER; note = 2'-O-methyladenosine-3'-phosphate
  modified_base 14: mod_base = OTHER; note = 2'-O-methyladenosine-3'-phosphate
  modified_base 15: mod_base = OTHER; note = 2'-O-methyluridine-3'-phosphate
  modified_base 16: mod_base = OTHER; note = 2'-O-methyladenosine-3'-phosphate
  modified_base 17: mod_base = OTHER; note = 2'-O-methyladenosine-3'-phosphate
  modified_base 18: mod_base = OTHER; note = 2'-O-methyladenosine-3'-phosphate
  modified_base 19: mod_base = OTHER; note = 2'-O-methyladenosine
gtgactttttaaaataaaa

SEQ ID NO: 1835 - RNA, 21 nt, synthetic construct
  source 1..21: mol_type = other RNA
  modified_base 1: mod_base = OTHER; note = 2'-O-methyluridine-3'-phosphorothioate
  modified_base 2: mod_base = OTHER; note = 2'-fluorouridine-3'-phosphorothioate
  modified_base 3: mod_base = OTHER; note = 2'-O-methyluridine-3'-phosphate
  modified_base 4: mod_base = OTHER; note = 2'-O-methyluridine-3'-phosphate
  modified_base 5: mod_base = OTHER; note = 2'-O-methyladenosine-3'-phosphate
  modified_base 6: mod_base = OTHER; note = 2'-fluorouridine-3'-phosphate
  modified_base 7: mod_base = OTHER; note = 2'-O-methyluridine-3'-phosphate
  modified_base 8: mod_base = OTHER; note = 2'-O-methyluridine-3'-phosphate
  modified_base 9: mod_base = OTHER; note = 2'-O-methyluridine-3'-phosphate
  modified_base 10: mod_base = OTHER; note = 2'-O-methyladenosine-3'-phosphate
  modified_base 11: mod_base = OTHER; note = 2'-O-methyladenosine-3'-phosphate
  modified_base 12: mod_base = OTHER; note = 2'-O-methyladenosine-3'-phosphate
  modified_base 13: mod_base = OTHER; note = 2'-O-methyladenosine-3'-phosphate
  modified_base 14: mod_base = OTHER; note = 2'-fluoroadenosine-3'-phosphate
  modified_base 15: mod_base = OTHER; note = 2'-O-methylguanosine-3'-phosphate
  modified_base 16: mod_base = OTHER; note = 2'-fluorouridine-3'-phosphate
  modified_base 17: mod_base = OTHER; note = 2'-O-methylcytidine-3'-phosphate
  modified_base 18: mod_base = OTHER; note = 2'-O-methyladenosine-3'-phosphate
  modified_base 19: mod_base = OTHER; note = 2'-O-methylcytidine-3'-phosphorothioate
  modified_base 20: mod_base = OTHER; note = 2'-O-methylcytidine-3'-phosphorothioate
  modified_base 21: mod_base = OTHER; note = 2'-O-methyladenosine
ttttattttaaaaagtcacca

SEQ ID NO: 1836 - RNA, 21 nt, synthetic construct
  source 1..21: mol_type = other RNA
  modified_base 1: mod_base = OTHER; note = 2'-O-methyluridine-3'-phosphorothioate
  modified_base 2: mod_base = OTHER; note = 2'-O-methylguanosine-3'-phosphorothioate
  modified_base 3: mod_base = OTHER; note = 2'-O-methylguanosine-3'-phosphate
  modified_base 4: mod_base = OTHER; note = 2'-O-methyluridine-3'-phosphate
  modified_base 5: mod_base = OTHER; note = 2'-O-methylguanosine-3'-phosphate
  modified_base 6: mod_base = OTHER; note = 2'-O-methyladenosine-3'-phosphate
  modified_base 7: mod_base = OTHER; note = 2'-O-methylcytidine-3'-phosphate
  modified_base 8: mod_base = OTHER; note = 2'-O-methyluridine-3'-phosphate
  modified_base 9: mod_base = OTHER; note = 2'-fluorouridine-3'-phosphate
  modified_base 10: mod_base = OTHER; note = 2'-fluorouridine-3'-phosphate
  modified_base 11: mod_base = OTHER; note = 2'-fluorouridine-3'-phosphate
  modified_base 12: mod_base = OTHER; note = 2'-O-methyluridine-3'-phosphate
  modified_base 13: mod_base = OTHER; note = 2'-O-methyladenosine-3'-phosphate
  modified_base 14: mod_base = OTHER; note = 2'-O-methyladenosine-3'-phosphate
  modified_base 15: mod_base = OTHER; note = 2'-O-methyladenosine-3'-phosphate
  modified_base 16: mod_base = OTHER; note = 2'-O-methyladenosine-3'-phosphate
  modified_base 17: mod_base = OTHER; note = 2'-O-methyluridine-3'-phosphate
  modified_base 18: mod_base = OTHER; note = 2'-O-methyladenosine-3'-phosphate
  modified_base 19: mod_base = OTHER; note = 2'-O-methyladenosine-3'-phosphate
  modified_base 20: mod_base = OTHER; note = 2'-O-methyladenosine-3'-phosphate
  modified_base 21: mod_base = OTHER; note = 2'-O-methyladenosine
tggtgactttttaaaataaaa

SEQ ID NO: 1837 - RNA, 23 nt, synthetic construct
  source 1..23: mol_type = other RNA
  modified_base 1: mod_base = OTHER; note = 2'-O-methyluridine-3'-phosphorothioate
  modified_base 2: mod_base = OTHER; note = 2'-fluorouridine-3'-phosphorothioate
  modified_base 3: mod_base = OTHER; note = 2'-O-methyluridine-3'-phosphate
  modified_base 4: mod_base = OTHER; note = 2'-O-methyluridine-3'-phosphate
  modified_base 5: mod_base = OTHER; note = 2'-O-methyladenosine-3'-phosphate
  modified_base 6: mod_base = OTHER; note = 2'-fluorouridine-3'-phosphate
  modified_base 7: mod_base = OTHER; note = 2'-O-methyluridine-3'-phosphate
  modified_base 8: mod_base = OTHER; note = 2'-O-methyluridine-3'-phosphate
  modified_base 9: mod_base = OTHER; note = 2'-O-methyluridine-3'-phosphate
  modified_base 10: mod_base = OTHER; note = 2'-O-methyladenosine-3'-phosphate
  modified_base 11: mod_base = OTHER; note = 2'-O-methyladenosine-3'-phosphate
  modified_base 12: mod_base = OTHER; note = 2'-O-methyladenosine-3'-phosphate
  modified_base 13: mod_base = OTHER; note = 2'-O-methyladenosine-3'-phosphate
  modified_base 14: mod_base = OTHER; note = 2'-fluoroadenosine-3'-phosphate
  modified_base 15: mod_base = OTHER; note = 2'-O-methylguanosine-3'-phosphate
  modified_base 16: mod_base = OTHER; note = 2'-fluorouridine-3'-phosphate
  modified_base 17: mod_base = OTHER; note = 2'-O-methylcytidine-3'-phosphate
  modified_base 18: mod_base = OTHER; note = 2'-O-methyladenosine-3'-phosphate
  modified_base 19: mod_base = OTHER; note = 2'-O-methylcytidine-3'-phosphate
  modified_base 20: mod_base = OTHER; note = 2'-O-methylcytidine-3'-phosphate
  modified_base 21: mod_base = OTHER; note = 2'-O-methyladenosine-3'-phosphorothioate
  modified_base 22: mod_base = OTHER; note = 2'-O-methyluridine-3'-phosphorothioate
  modified_base 23: mod_base = OTHER; note = 2'-O-methyladenosine
ttttattttaaaaagtcaccata

SEQ ID NO: 1838 - RNA, 21 nt, synthetic construct
  source 1..21: mol_type = other RNA
  modified_base 1: mod_base = OTHER; note = 2'-O-methyluridine-3'-phosphorothioate
  modified_base 2: mod_base = OTHER; note = 2'-O-methylguanosine-3'-phosphorothioate
  modified_base 3: mod_base = OTHER; note = 2'-O-methylguanosine-3'-phosphate
  modified_base 4: mod_base = OTHER; note = 2'-O-methyluridine-3'-phosphate
  modified_base 5: mod_base = OTHER; note = 2'-O-methylguanosine-3'-phosphate
  modified_base 6: mod_base = OTHER; note = 2'-O-methyladenosine-3'-phosphate
  modified_base 7: mod_base = OTHER; note = 2'-fluorocytidine-3'-phosphate
  modified_base 8: mod_base = OTHER; note = 2'-O-methyluridine-3'-phosphate
  modified_base 9: mod_base = OTHER; note = 2'-fluorouridine-3'-phosphate
  modified_base 10: mod_base = OTHER; note = 2'-fluorouridine-3'-phosphate
  modified_base 11: mod_base = OTHER; note = 2'-fluorouridine-3'-phosphate
  modified_base 12: mod_base = OTHER; note = 2'-O-methyluridine-3'-phosphate
  modified_base 13: mod_base = OTHER; note = 2'-O-methyladenosine-3'-phosphate
  modified_base 14: mod_base = OTHER; note = 2'-O-methyladenosine-3'-phosphate
  modified_base 15: mod_base = OTHER; note = 2'-O-methyladenosine-3'-phosphate
  modified_base 16: mod_base = OTHER; note = 2'-O-methyladenosine-3'-phosphate
  modified_base 17: mod_base = OTHER; note = 2'-O-methyluridine-3'-phosphate
  modified_base 18: mod_base = OTHER; note = 2'-O-methyladenosine-3'-phosphate
  modified_base 19: mod_base = OTHER; note = 2'-O-methyladenosine-3'-phosphate
  modified_base 20: mod_base = OTHER; note = 2'-O-methyladenosine-3'-phosphate
  modified_base 21: mod_base = OTHER; note = 2'-O-methyladenosine
tggtgactttttaaaataaaa

SEQ ID NO: 1839 - RNA, 23 nt, synthetic construct
  source 1..23: mol_type = other RNA
  modified_base 1: mod_base = OTHER; note = 2'-O-methyluridine-3'-phosphorothioate
  modified_base 2: mod_base = OTHER; note = 2'-fluorouridine-3'-phosphorothioate
  modified_base 3: mod_base = OTHER; note = 2'-O-methyluridine-3'-phosphate
  modified_base 4: mod_base = OTHER; note = 2'-O-methyluridine-3'-phosphate
  modified_base 5: mod_base = OTHER; note = 2'-O-methyladenosine-3'-phosphate
  modified_base 6: mod_base = OTHER; note = 2'-fluorouridine-3'-phosphate
  modified_base 7: mod_base = OTHER; note = 2'-O-methyluridine-3'-phosphate
  modified_base 8: mod_base = OTHER; note = 2'-fluorouridine-3'-phosphate
  modified_base 9: mod_base = OTHER; note = 2'-fluorouridine-3'-phosphate
  modified_base 10: mod_base = OTHER; note = 2'-O-methyladenosine-3'-phosphate
  modified_base 11: mod_base = OTHER; note = 2'-O-methyladenosine-3'-phosphate
  modified_base 12: mod_base = OTHER; note = 2'-O-methyladenosine-3'-phosphate
  modified_base 13: mod_base = OTHER; note = 2'-O-methyladenosine-3'-phosphate
  modified_base 14: mod_base = OTHER; note = 2'-fluoroadenosine-3'-phosphate
  modified_base 15: mod_base = OTHER; note = 2'-O-methylguanosine-3'-phosphate
  modified_base 16: mod_base = OTHER; note = 2'-fluorouridine-3'-phosphate
  modified_base 17: mod_base = OTHER; note = 2'-O-methylcytidine-3'-phosphate
  modified_base 18: mod_base = OTHER; note = 2'-O-methyladenosine-3'-phosphate
  modified_base 19: mod_base = OTHER; note = 2'-O-methylcytidine-3'-phosphate
  modified_base 20: mod_base = OTHER; note = 2'-O-methylcytidine-3'-phosphate
  modified_base 21: mod_base = OTHER; note = 2'-O-methyladenosine-3'-phosphorothioate
  modified_base 22: mod_base = OTHER; note = 2'-O-methyluridine-3'-phosphorothioate
  modified_base 23: mod_base = OTHER; note = 2'-O-methyladenosine
ttttattttaaaaagtcaccata

SEQ ID NO: 1840 - RNA, 21 nt, synthetic construct
  source 1..21: mol_type = other RNA
  modified_base 1: mod_base = OTHER; note = 2'-O-methyluridine-3'-phosphorothioate
  modified_base 2: mod_base = OTHER; note = 2'-O-methylguanosine-3'-phosphorothioate
  modified_base 3: mod_base = OTHER; note = 2'-O-methylguanosine-3'-phosphate
  modified_base 4: mod_base = OTHER; note = 2'-O-methyluridine-3'-phosphate
  modified_base 5: mod_base = OTHER; note = 2'-O-methylguanosine-3'-phosphate
  modified_base 6: mod_base = OTHER; note = 2'-O-methyladenosine-3'-phosphate
  modified_base 7: mod_base = OTHER; note = 2'-fluorocytidine-3'-phosphate
  modified_base 8: mod_base = OTHER; note = 2'-O-methyluridine-3'-phosphate
  modified_base 9: mod_base = OTHER; note = 2'-fluorouridine-3'-phosphate
  modified_base 10: mod_base = OTHER; note = 2'-fluorouridine-3'-phosphate
  modified_base 11: mod_base = OTHER; note = 2'-fluorouridine-3'-phosphate
  modified_base 12: mod_base = OTHER; note = 2'-O-methyluridine-3'-phosphate
  modified_base 13: mod_base = OTHER; note = 2'-O-methyladenosine-3'-phosphate
  modified_base 14: mod_base = OTHER; note = 2'-O-methyladenosine-3'-phosphate
  modified_base 15: mod_base = OTHER; note = 2'-O-methyladenosine-3'-phosphate
  modified_base 16: mod_base = OTHER; note = 2'-O-methyladenosine-3'-phosphate
  modified_base 17: mod_base = OTHER; note = 2'-O-methyluridine-3'-phosphate
  modified_base 18: mod_base = OTHER; note = 2'-O-methyladenosine-3'-phosphate
  modified_base 19: mod_base = OTHER; note = 2'-O-methyladenosine-3'-phosphate
  modified_base 20: mod_base = OTHER; note = 2'-O-methyladenosine-3'-phosphate
  modified_base 21: mod_base = OTHER; note = 2'-O-methyladenosine
tggtgactttttaaaataaaa

SEQ ID NO: 1841 - RNA, 23 nt, synthetic construct
  source 1..23: mol_type = other RNA
  modified_base 1: mod_base = OTHER; note = 2'-O-methyluridine-3'-phosphorothioate
  modified_base 2: mod_base = OTHER; note = 2'-fluorouridine-3'-phosphorothioate
  modified_base 3: mod_base = OTHER; note = 2'-O-methyluridine-3'-phosphate
  modified_base 4: mod_base = OTHER; note = 2'-O-methyluridine-3'-phosphate
  modified_base 5: mod_base = OTHER; note = 2'-O-methyladenosine-3'-phosphate
  modified_base 6: mod_base = OTHER; note = 2'-fluorouridine-3'-phosphate
  modified_base 7: mod_base = OTHER; note = 2'-O-methyluridine-3'-phosphate
  modified_base 8: mod_base = OTHER; note = 2'-O-methyluridine-3'-phosphate
  modified_base 9: mod_base = OTHER; note = 2'-O-methyluridine-3'-phosphate
  modified_base 10: mod_base = OTHER; note = 2'-O-methyladenosine-3'-phosphate
  modified_base 11: mod_base = OTHER; note = 2'-O-methyladenosine-3'-phosphate
  modified_base 12: mod_base = OTHER; note = 2'-O-methyladenosine-3'-phosphate
  modified_base 13: mod_base = OTHER; note = 2'-O-methyladenosine-3'-phosphate
  modified_base 14: mod_base = OTHER; note = 2'-fluoroadenosine-3'-phosphate
  modified_base 15: mod_base = OTHER; note = 2'-O-methylguanosine-3'-phosphate
  modified_base 16: mod_base = OTHER; note = 2'-fluorouridine-3'-phosphate
  modified_base 17: mod_base = OTHER; note = 2'-O-methylcytidine-3'-phosphate
  modified_base 18: mod_base = OTHER; note = 2'-O-methyladenosine-3'-phosphate
  modified_base 19: mod_base = OTHER; note = 2'-O-methylcytidine-3'-phosphate
  modified_base 20: mod_base = OTHER; note = 2'-O-methylcytidine-3'-phosphate
  modified_base 21: mod_base = OTHER; note = 2'-O-methyladenosine-3'-phosphorothioate
  modified_base 22: mod_base = OTHER; note = 2'-O-methyluridine-3'-phosphorothioate
  modified_base 23: mod_base = OTHER; note = 2'-O-methyladenosine
ttttattttaaaaagtcaccata

SEQ ID NO: 1842 - RNA, 19 nt, synthetic construct
  source 1..19: mol_type = other RNA
  modified_base 1: mod_base = OTHER; note = 2'-O-methylguanosine-3'-phosphate
  modified_base 2: mod_base = OTHER; note = 2'-O-methyluridine-3'-phosphate
  modified_base 3: mod_base = OTHER; note = 2'-O-methylguanosine-3'-phosphate
  modified_base 4: mod_base = OTHER; note = 2'-O-methyladenosine-3'-phosphate
  modified_base 5: mod_base = OTHER; note = 2'-O-methylcytidine-3'-phosphate
  modified_base 6: mod_base = OTHER; note = 2'-O-methyluridine-3'-phosphate
  modified_base 7: mod_base = OTHER; note = 2'-fluorouridine-3'-phosphate
  modified_base 8: mod_base = OTHER; note = 2'-fluorouridine-3'-phosphate
  modified_base 9: mod_base = OTHER; note = 2'-fluorouridine-3'-phosphate
  modified_base 10: mod_base = OTHER; note = 2'-O-methyluridine-3'-phosphate
  modified_base 11: mod_base = OTHER; note = 2'-O-methyladenosine-3'-phosphate
  modified_base 12: mod_base = OTHER; note = 2'-O-methyladenosine-3'-phosphate
  modified_base 13: mod_base = OTHER; note = 2'-O-methyladenosine-3'-phosphate
  modified_base 14: mod_base = OTHER; note = 2'-O-methyladenosine-3'-phosphate
  modified_base 15: mod_base = OTHER; note = 2'-O-methyluridine-3'-phosphate
  modified_base 16: mod_base = OTHER; note = 2'-O-methyladenosine-3'-phosphate
  modified_base 17: mod_base = OTHER; note = 2'-O-methyladenosine-3'-phosphate
  modified_base 18: mod_base = OTHER; note = 2'-O-methyladenosine-3'-phosphate
  modified_base 19: mod_base = OTHER; note = 2'-O-methyladenosine
gtgactttttaaaataaaa

SEQ ID NO: 1843 - RNA, 21 nt, synthetic construct
  source 1..21: mol_type = other RNA
  modified_base 1: mod_base = OTHER; note = 5'-phosphate-2'-O-methyluridine-3'-phosphate
  modified_base 2: mod_base = OTHER; note = 2'-fluorouridine-3'-phosphate
  modified_base 3: mod_base = OTHER; note = 2'-O-methyluridine-3'-phosphate
  modified_base 4: mod_base = OTHER; note = 2'-O-methyluridine-3'-phosphate
  modified_base 5: mod_base = OTHER; note = 2'-O-methyladenosine-3'-phosphate
  modified_base 6: mod_base = OTHER; note = 2'-fluorouridine-3'-phosphate
  modified_base 7: mod_base = OTHER; note = 2'-O-methyluridine-3'-phosphate
  modified_base 8: mod_base = OTHER; note = 2'-O-methyluridine-3'-phosphate
  modified_base 9: mod_base = OTHER; note = 2'-O-methyluridine-3'-phosphate
  modified_base 10: mod_base = OTHER; note = 2'-O-methyladenosine-3'-phosphate
  modified_base 11: mod_base = OTHER; note = 2'-O-methyladenosine-3'-phosphate
  modified_base 12: mod_base = OTHER; note = 2'-O-methyladenosine-3'-phosphate
  modified_base 13: mod_base = OTHER; note = 2'-O-methyladenosine-3'-phosphate
  modified_base 14: mod_base = OTHER; note = 2'-fluoroadenosine-3'-phosphate
  modified_base 15: mod_base = OTHER; note = 2'-O-methylguanosine-3'-phosphate
  modified_base 16: mod_base = OTHER; note = 2'-fluorouridine-3'-phosphate
  modified_base 17: mod_base = OTHER; note = 2'-O-methylcytidine-3'-phosphate
  modified_base 18: mod_base = OTHER; note = 2'-O-methyladenosine-3'-phosphate
  modified_base 19: mod_base = OTHER; note = 2'-O-methylcytidine-3'-phosphate
  modified_base 20: mod_base = OTHER; note = 2'-O-methylcytidine-3'-phosphate
  modified_base 21: mod_base = OTHER; note = 2'-O-methyladenosine
ttttattttaaaaagtcacca

SEQ ID NO: 1844 - RNA, 19 nt, synthetic construct
  source 1..19: mol_type = other RNA
  modified_base 1: mod_base = OTHER; note = 2'-O-methylguanosine-3'-phosphate
  modified_base 2: mod_base = OTHER; note = 2'-O-methyluridine-3'-phosphate
  modified_base 3: mod_base = OTHER; note = 2'-O-methylguanosine-3'-phosphate
  modified_base 4: mod_base = OTHER; note = 2'-O-methyladenosine-3'-phosphate
  modified_base 5: mod_base = OTHER; note = 2'-fluorocytidine-3'-phosphate
  modified_base 6: mod_base = OTHER; note = 2'-O-methyluridine-3'-phosphate
  modified_base 7: mod_base = OTHER; note = 2'-fluorouridine-3'-phosphate
  modified_base 8: mod_base = OTHER; note = 2'-fluorouridine-3'-phosphate
  modified_base 9: mod_base = OTHER; note = 2'-fluorouridine-3'-phosphate
  modified_base 10: mod_base = OTHER; note = 2'-O-methyluridine-3'-phosphate
  modified_base 11: mod_base = OTHER; note = 2'-O-methyladenosine-3'-phosphate
  modified_base 12: mod_base = OTHER; note = 2'-O-methyladenosine-3'-phosphate
  modified_base 13: mod_base = OTHER; note = 2'-O-methyladenosine-3'-phosphate
  modified_base 14: mod_base = OTHER; note = 2'-O-methyladenosine-3'-phosphate
  modified_base 15: mod_base = OTHER; note = 2'-O-methyluridine-3'-phosphate
  modified_base 16: mod_base = OTHER; note = 2'-O-methyladenosine-3'-phosphate
  modified_base 17: mod_base = OTHER; note = 2'-O-methyladenosine-3'-phosphate
  modified_base 18: mod_base = OTHER; note = 2'-O-methyladenosine-3'-phosphate
  modified_base 19: mod_base = OTHER; note = 2'-O-methyladenosine
gtgactttttaaaataaaa

SEQ ID NO: 1845 - RNA, 21 nt, synthetic construct
  source 1..21: mol_type = other RNA
  modified_base 1: mod_base = OTHER; note = 5'-phosphate-2'-O-methyluridine-3'-phosphate
  modified_base 2: mod_base = OTHER; note = 2'-fluorouridine-3'-phosphate
  modified_base 3: mod_base = OTHER; note = 2'-O-methyluridine-3'-phosphate
  modified_base 4: mod_base = OTHER; note = 2'-O-methyluridine-3'-phosphate
  modified_base 5: mod_base = OTHER; note = 2'-O-methyladenosine-3'-phosphate
  modified_base 6: mod_base = OTHER; note = 2'-fluorouridine-3'-phosphate
  modified_base 7: mod_base = OTHER; note = 2'-O-methyluridine-3'-phosphate
  modified_base 8: mod_base = OTHER; note = 2'-fluorouridine-3'-phosphate
  modified_base 9: mod_base = OTHER; note = 2'-fluorouridine-3'-phosphate
  modified_base 10: mod_base = OTHER; note = 2'-O-methyladenosine-3'-phosphate
  modified_base 11: mod_base = OTHER; note = 2'-O-methyladenosine-3'-phosphate
  modified_base 12: mod_base = OTHER; note = 2'-O-methyladenosine-3'-phosphate
  modified_base 13: mod_base = OTHER; note = 2'-O-methyladenosine-3'-phosphate
  modified_base 14: mod_base = OTHER; note = 2'-fluoroadenosine-3'-phosphate
  modified_base 15: mod_base = OTHER; note = 2'-O-methylguanosine-3'-phosphate
  modified_base 16: mod_base = OTHER; note = 2'-fluorouridine-3'-phosphate
  modified_base 17: mod_base = OTHER; note = 2'-O-methylcytidine-3'-phosphate
  modified_base 18: mod_base = OTHER; note = 2'-O-methyladenosine-3'-phosphate
  modified_base 19: mod_base = OTHER; note = 2'-O-methylcytidine-3'-phosphate
  modified_base 20: mod_base = OTHER; note = 2'-O-methylcytidine-3'-phosphate
  modified_base 21: mod_base = OTHER; note = 2'-O-methyladenosine
ttttattttaaaaagtcacca

SEQ ID NO: 1846 - RNA, 19 nt, synthetic construct
  source 1..19: mol_type = other RNA
  modified_base 1: mod_base = OTHER; note = 2'-O-methylguanosine-3'-phosphate
  modified_base 2: mod_base = OTHER; note = 2'-O-methyluridine-3'-phosphate
  modified_base 3: mod_base = OTHER; note = 2'-O-methylguanosine-3'-phosphate
  modified_base 4: mod_base = OTHER; note = 2'-O-methyladenosine-3'-phosphate
  modified_base 5: mod_base = OTHER; note = 2'-fluorocytidine-3'-phosphate
  modified_base 6: mod_base = OTHER; note = 2'-O-methyluridine-3'-phosphate
  modified_base 7: mod_base = OTHER; note = 2'-fluorouridine-3'-phosphate
  modified_base 8: mod_base = OTHER; note = 2'-fluorouridine-3'-phosphate
  modified_base 9: mod_base = OTHER; note = 2'-fluorouridine-3'-phosphate
  modified_base 10: mod_base = OTHER; note = 2'-O-methyluridine-3'-phosphate
  modified_base 11: mod_base = OTHER; note = 2'-O-methyladenosine-3'-phosphate
  modified_base 12: mod_base = OTHER; note = 2'-O-methyladenosine-3'-phosphate
  modified_base 13: mod_base = OTHER; note = 2'-O-methyladenosine-3'-phosphate
  modified_base 14: mod_base = OTHER; note = 2'-O-methyladenosine-3'-phosphate
  modified_base 15: mod_base = OTHER; note = 2'-O-methyluridine-3'-phosphate
  modified_base 16: mod_base = OTHER; note = 2'-O-methyladenosine-3'-phosphate
  modified_base 17: mod_base = OTHER; note = 2'-O-methyladenosine-3'-phosphate
  modified_base 18: mod_base = OTHER; note = 2'-O-methyladenosine-3'-phosphate
  modified_base 19: mod_base = OTHER; note = 2'-O-methyladenosine
gtgactttttaaaataaaa

SEQ ID NO: 1847 - RNA, 21 nt, synthetic construct
  source 1..21: mol_type = other RNA
  modified_base 1: mod_base = OTHER; note = 5'-phosphate-2'-O-methyluridine-3'-phosphate
  modified_base 2: mod_base = OTHER; note = 2'-fluorouridine-3'-phosphate
  modified_base 3: mod_base = OTHER; note = 2'-O-methyluridine-3'-phosphate
  modified_base 4: mod_base = OTHER; note = 2'-O-methyluridine-3'-phosphate
  modified_base 5: mod_base = OTHER; note = 2'-O-methyladenosine-3'-phosphate
  modified_base 6: mod_base = OTHER; note = 2'-fluorouridine-3'-phosphate
  modified_base 7: mod_base = OTHER; note = 2'-O-methyluridine-3'-phosphate
  modified_base 8: mod_base = OTHER; note = 2'-O-methyluridine-3'-phosphate
  modified_base 9: mod_base = OTHER; note = 2'-O-methyluridine-3'-phosphate
  modified_base 10: mod_base = OTHER; note = 2'-O-methyladenosine-3'-phosphate
  modified_base 11: mod_base = OTHER; note = 2'-O-methyladenosine-3'-phosphate
  modified_base 12: mod_base = OTHER; note = 2'-O-methyladenosine-3'-phosphate
  modified_base 13: mod_base = OTHER; note = 2'-O-methyladenosine-3'-phosphate
  modified_base 14: mod_base = OTHER; note = 2'-fluoroadenosine-3'-phosphate
  modified_base 15: mod_base = OTHER; note = 2'-O-methylguanosine-3'-phosphate
  modified_base 16: mod_base = OTHER; note = 2'-fluorouridine-3'-phosphate
  modified_base 17: mod_base = OTHER; note = 2'-O-methylcytidine-3'-phosphate
  modified_base 18: mod_base = OTHER; note = 2'-O-methyladenosine-3'-phosphate
  modified_base 19: mod_base = OTHER; note = 2'-O-methylcytidine-3'-phosphate
  modified_base 20: mod_base = OTHER; note = 2'-O-methylcytidine-3'-phosphate
  modified_base 21: mod_base = OTHER; note = 2'-O-methyladenosine
ttttattttaaaaagtcacca

SEQ ID NO: 1848 - RNA, 21 nt, synthetic construct
  source 1..21: mol_type = other RNA
  modified_base 1: mod_base = OTHER; note = 2'-O-methyluridine-3'-phosphate
  modified_base 2: mod_base = OTHER; note = 2'-O-methylguanosine-3'-phosphate
  modified_base 3: mod_base = OTHER; note = 2'-O-methylguanosine-3'-phosphate
  modified_base 4: mod_base = OTHER; note = 2'-O-methyluridine-3'-phosphate
  modified_base 5: mod_base = OTHER; note = 2'-O-methylguanosine-3'-phosphate
  modified_base 6: mod_base = OTHER; note = 2'-O-methyladenosine-3'-phosphate
  modified_base 7: mod_base = OTHER; note = 2'-O-methylcytidine-3'-phosphate
  modified_base 8: mod_base = OTHER; note = 2'-O-methyluridine-3'-phosphate
  modified_base 9: mod_base = OTHER; note = 2'-fluorouridine-3'-phosphate
  modified_base 10: mod_base = OTHER; note = 2'-fluorouridine-3'-phosphate
  modified_base 11: mod_base = OTHER; note = 2'-fluorouridine-3'-phosphate
  modified_base 12: mod_base = OTHER; note = 2'-O-methyluridine-3'-phosphate
  modified_base 13: mod_base = OTHER; note = 2'-O-methyladenosine-3'-phosphate
  modified_base 14: mod_base = OTHER; note = 2'-O-methyladenosine-3'-phosphate
  modified_base 15: mod_base = OTHER; note = 2'-O-methyladenosine-3'-phosphate
  modified_base 16: mod_base = OTHER; note = 2'-O-methyladenosine-3'-phosphate
  modified_base 17: mod_base = OTHER; note = 2'-O-methyluridine-3'-phosphate
  modified_base 18: mod_base = OTHER; note = 2'-O-methyladenosine-3'-phosphate
  modified_base 19: mod_base = OTHER; note = 2'-O-methyladenosine-3'-phosphate
  modified_base 20: mod_base = OTHER; note = 2'-O-methyladenosine-3'-phosphate
  modified_base 21: mod_base = OTHER; note = 2'-O-methyladenosine
tggtgactttttaaaataaaa

SEQ ID NO: 1849 - RNA, 23 nt, synthetic construct
  source 1..23: mol_type = other RNA
  modified_base 1: mod_base = OTHER; note = 5'-phosphate-2'-O-methyluridine-3'-phosphate
  modified_base 2: mod_base = OTHER; note = 2'-fluorouridine-3'-phosphate
  modified_base 3: mod_base = OTHER; note = 2'-O-methyluridine-3'-phosphate
  modified_base 4: mod_base = OTHER; note = 2'-O-methyluridine-3'-phosphate
  modified_base 5: mod_base = OTHER; note = 2'-O-methyladenosine-3'-phosphate
  modified_base 6: mod_base = OTHER; note = 2'-fluorouridine-3'-phosphate
  modified_base 7: mod_base = OTHER; note = 2'-O-methyluridine-3'-phosphate
  modified_base 8: mod_base = OTHER; note = 2'-O-methyluridine-3'-phosphate
  modified_base 9: mod_base = OTHER; note = 2'-O-methyluridine-3'-phosphate
  modified_base 10: mod_base = OTHER; note = 2'-O-methyladenosine-3'-phosphate
  modified_base 11: mod_base = OTHER; note = 2'-O-methyladenosine-3'-phosphate
  modified_base 12: mod_base = OTHER; note = 2'-O-methyladenosine-3'-phosphate
  modified_base 13: mod_base = OTHER; note = 2'-O-methyladenosine-3'-phosphate
  modified_base 14: mod_base = OTHER; note = 2'-fluoroadenosine-3'-phosphate
  modified_base 15: mod_base = OTHER; note = 2'-O-methylguanosine-3'-phosphate
  modified_base 16: mod_base = OTHER; note = 2'-fluorouridine-3'-phosphate
  modified_base 17: mod_base = OTHER; note = 2'-O-methylcytidine-3'-phosphate
  modified_base 18: mod_base = OTHER; note = 2'-O-methyladenosine-3'-phosphate
  modified_base 19: mod_base = OTHER; note = 2'-O-methylcytidine-3'-phosphate
  modified_base 20: mod_base = OTHER; note = 2'-O-methylcytidine-3'-phosphate
  modified_base 21: mod_base = OTHER; note = 2'-O-methyladenosine-3'-phosphate
  modified_base 22: mod_base = OTHER; note = 2'-O-methyluridine-3'-phosphate
  modified_base 23: mod_base = OTHER; note = 2'-O-methyladenosine
ttttattttaaaaagtcaccata

SEQ ID NO: 1850 - RNA, 21 nt, synthetic construct
  source 1..21: mol_type = other RNA
  modified_base 1: mod_base = OTHER; note = 2'-O-methyluridine-3'-phosphate
  modified_base 2: mod_base = OTHER; note = 2'-O-methylguanosine-3'-phosphate
  modified_base 3: mod_base = OTHER; note = 2'-O-methylguanosine-3'-phosphate
  modified_base 4: mod_base = OTHER; note = 2'-O-methyluridine-3'-phosphate
  modified_base 5: mod_base = OTHER; note = 2'-O-methylguanosine-3'-phosphate
  modified_base 6: mod_base = OTHER; note = 2'-O-methyladenosine-3'-phosphate
  modified_base 7: mod_base = OTHER; note = 2'-fluorocytidine-3'-phosphate
  modified_base 8: mod_base = OTHER; note = 2'-O-methyluridine-3'-phosphate
  modified_base 9: mod_base = OTHER; note = 2'-fluorouridine-3'-phosphate
  modified_base 10: mod_base = OTHER; note = 2'-fluorouridine-3'-phosphate
  modified_base 11: mod_base = OTHER; note = 2'-fluorouridine-3'-phosphate
  modified_base 12: mod_base = OTHER; note = 2'-O-methyluridine-3'-phosphate
  modified_base 13: mod_base = OTHER; note = 2'-O-methyladenosine-3'-phosphate
  modified_base 14: mod_base = OTHER; note = 2'-O-methyladenosine-3'-phosphate
  modified_base 15: mod_base = OTHER; note = 2'-O-methyladenosine-3'-phosphate
  modified_base 16: mod_base = OTHER; note = 2'-O-methyladenosine-3'-phosphate
  modified_base 17: mod_base = OTHER; note = 2'-O-methyluridine-3'-phosphate
  modified_base 18: mod_base = OTHER; note = 2'-O-methyladenosine-3'-phosphate
  modified_base 19: mod_base = OTHER; note = 2'-O-methyladenosine-3'-phosphate
  modified_base 20: mod_base = OTHER; note = 2'-O-methyladenosine-3'-phosphate
  modified_base 21: mod_base = OTHER; note = 2'-O-methyladenosine
tggtgactttttaaaataaaa

SEQ ID NO: 1851 - RNA, 23 nt, synthetic construct
  source 1..23: mol_type = other RNA
  modified_base 1: mod_base = OTHER; note = 5'-phosphate-2'-O-methyluridine-3'-phosphate
  modified_base 2: mod_base = OTHER; note = 2'-fluorouridine-3'-phosphate
  modified_base 3: mod_base = OTHER; note = 2'-O-methyluridine-3'-phosphate
  modified_base 4: mod_base = OTHER; note = 2'-O-methyluridine-3'-phosphate
  modified_base 5: mod_base = OTHER; note = 2'-O-methyladenosine-3'-phosphate
  modified_base 6: mod_base = OTHER; note = 2'-fluorouridine-3'-phosphate
  modified_base 7: mod_base = OTHER; note = 2'-O-methyluridine-3'-phosphate
  modified_base 8: mod_base = OTHER; note = 2'-fluorouridine-3'-phosphate
  modified_base 9: mod_base = OTHER; note = 2'-fluorouridine-3'-phosphate
  modified_base 10: mod_base = OTHER; note = 2'-O-methyladenosine-3'-phosphate
  modified_base 11: mod_base = OTHER; note = 2'-O-methyladenosine-3'-phosphate
  modified_base 12: mod_base = OTHER; note = 2'-O-methyladenosine-3'-phosphate
  modified_base 13: mod_base = OTHER; note = 2'-O-methyladenosine-3'-phosphate
  modified_base 14: mod_base = OTHER; note = 2'-fluoroadenosine-3'-phosphate
  modified_base 15: mod_base = OTHER; note = 2'-O-methylguanosine-3'-phosphate
  modified_base 16: mod_base = OTHER; note = 2'-fluorouridine-3'-phosphate
  modified_base 17: mod_base = OTHER; note = 2'-O-methylcytidine-3'-phosphate
  modified_base 18: mod_base = OTHER; note = 2'-O-methyladenosine-3'-phosphate
  modified_base 19: mod_base = OTHER; note = 2'-O-methylcytidine-3'-phosphate
  modified_base 20: mod_base = OTHER; note = 2'-O-methylcytidine-3'-phosphate
  modified_base 21: mod_base = OTHER; note = 2'-O-methyladenosine-3'-phosphate
  modified_base 22: mod_base = OTHER; note = 2'-O-methyluridine-3'-phosphate
  modified_base 23: mod_base = OTHER; note = 2'-O-methyladenosine
ttttattttaaaaagtcaccata

SEQ ID NO: 1852 - RNA, 21 nt, synthetic construct
  source 1..21: mol_type = other RNA
  modified_base 1: mod_base = OTHER; note = 2'-O-methyluridine-3'-phosphate
  modified_base 2: mod_base = OTHER; note = 2'-O-methylguanosine-3'-phosphate
  modified_base 3: mod_base = OTHER; note = 2'-O-methylguanosine-3'-phosphate
  modified_base 4: mod_base = OTHER; note = 2'-O-methyluridine-3'-phosphate
  modified_base 5: mod_base = OTHER; note = 2'-O-methylguanosine-3'-phosphate
  modified_base 6: mod_base = OTHER; note = 2'-O-methyladenosine-3'-phosphate
  modified_base 7: mod_base = OTHER; note = 2'-fluorocytidine-3'-phosphate
  modified_base 8: mod_base = OTHER; note = 2'-O-methyluridine-3'-phosphate
  modified_base 9: mod_base = OTHER; note = 2'-fluorouridine-3'-phosphate
  modified_base 10: mod_base = OTHER; note = 2'-fluorouridine-3'-phosphate
  modified_base 11: mod_base = OTHER; note = 2'-fluorouridine-3'-phosphate
  modified_base 12: mod_base = OTHER; note = 2'-O-methyluridine-3'-phosphate
  modified_base 13: mod_base = OTHER; note = 2'-O-methyladenosine-3'-phosphate
  modified_base 14: mod_base = OTHER; note = 2'-O-methyladenosine-3'-phosphate
  modified_base 15: mod_base = OTHER; note = 2'-O-methyladenosine-3'-phosphate
  modified_base 16: mod_base = OTHER; note = 2'-O-methyladenosine-3'-phosphate
  modified_base 17: mod_base = OTHER; note = 2'-O-methyluridine-3'-phosphate
  modified_base 18: mod_base = OTHER; note = 2'-O-methyladenosine-3'-phosphate
  modified_base 19: mod_base = OTHER; note = 2'-O-methyladenosine-3'-phosphate
  modified_base 20: mod_base = OTHER; note = 2'-O-methyladenosine-3'-phosphate
  modified_base 21: mod_base = OTHER; note = 2'-O-methyladenosine
tggtgactttttaaaataaaa

SEQ ID NO: 1853 - RNA, 23 nt, synthetic construct
  source 1..23: mol_type = other RNA
  modified_base 1: mod_base = OTHER; note = 5'-phosphate-2'-O-methyluridine-3'-phosphate
  modified_base 2: mod_base = OTHER; note = 2'-fluorouridine-3'-phosphate
  modified_base 3: mod_base = OTHER; note = 2'-O-methyluridine-3'-phosphate
  modified_base 4: mod_base = OTHER; note = 2'-O-methyluridine-3'-phosphate
  modified_base 5: mod_base = OTHER; note = 2'-O-methyladenosine-3'-phosphate
  modified_base 6: mod_base = OTHER; note = 2'-fluorouridine-3'-phosphate
  modified_base 7: mod_base = OTHER; note = 2'-O-methyluridine-3'-phosphate
  modified_base 8: mod_base = OTHER; note = 2'-O-methyluridine-3'-phosphate
  modified_base 9: mod_base = OTHER; note = 2'-O-methyluridine-3'-phosphate
  modified_base 10: mod_base = OTHER; note = 2'-O-methyladenosine-3'-phosphate
  modified_base 11: mod_base = OTHER; note = 2'-O-methyladenosine-3'-phosphate
  modified_base 12: mod_base = OTHER; note = 2'-O-methyladenosine-3'-phosphate
  modified_base 13: mod_base = OTHER; note = 2'-O-methyladenosine-3'-phosphate
  modified_base 14: mod_base = OTHER; note = 2'-fluoroadenosine-3'-phosphate
  modified_base 15: mod_base = OTHER; note = 2'-O-methylguanosine-3'-phosphate
  modified_base 16: mod_base = OTHER; note = 2'-fluorouridine-3'-phosphate
  modified_base 17: mod_base = OTHER; note = 2'-O-methylcytidine-3'-phosphate
  modified_base 18: mod_base = OTHER; note = 2'-O-methyladenosine-3'-phosphate
  modified_base 19: mod_base = OTHER; note = 2'-O-methylcytidine-3'-phosphate
  modified_base 20: mod_base = OTHER; note = 2'-O-methylcytidine-3'-phosphate
  modified_base 21: mod_base = OTHER; note = 2'-O-methyladenosine-3'-phosphate
  modified_base 22: mod_base = OTHER; note = 2'-O-methyluridine-3'-phosphate
  modified_base 23: mod_base = OTHER; note = 2'-O-methyladenosine
ttttattttaaaaagtcaccata

SEQ ID NO: 1854 - RNA, 19 nt, synthetic construct
  source 1..19: mol_type = other RNA
  modified_base 1: mod_base = OTHER; note = 2'-O-methylguanosine-3'-phosphorothioate
  modified_base 2: mod_base = OTHER; note = 2'-O-methyluridine-3'-phosphorothioate
  modified_base 3: mod_base = OTHER; note = 2'-O-methylguanosine-3'-phosphate
  modified_base 4: mod_base = OTHER; note = 2'-O-methyladenosine-3'-phosphate
  modified_base 5: mod_base = OTHER; note = 2'-O-methylcytidine-3'-phosphate
  modified_base 6: mod_base = OTHER; note = 2'-O-methyluridine-3'-phosphate
  modified_base 7: mod_base = OTHER; note = 2'-fluorouridine-3'-phosphate
  modified_base 8: mod_base = OTHER; note = 2'-fluorouridine-3'-phosphate
  modified_base 9: mod_base = OTHER; note = 2'-fluorouridine-3'-phosphate
  modified_base 10: mod_base = OTHER; note = 2'-O-methyluridine-3'-phosphate
  modified_base 11: mod_base = OTHER; note = 2'-O-methyladenosine-3'-phosphate
  modified_base 12: mod_base = OTHER; note = 2'-O-methyladenosine-3'-phosphate
  modified_base 13: mod_base = OTHER; note = 2'-O-methyladenosine-3'-phosphate
  modified_base 14: mod_base = OTHER; note = 2'-O-methyladenosine-3'-phosphate
  modified_base 15: mod_base = OTHER; note = 2'-O-methyluridine-3'-phosphate
  modified_base 16: mod_base = OTHER; note = 2'-O-methyladenosine-3'-phosphate
  modified_base 17: mod_base = OTHER; note = 2'-O-methyladenosine-3'-phosphate
  modified_base 18: mod_base = OTHER; note = 2'-O-methyladenosine-3'-phosphate
  modified_base 19: mod_base = OTHER; note = 2'-O-methyladenosine
gtgactttttaaaataaaa

SEQ ID NO: 1855 - RNA, 21 nt, synthetic construct
  source 1..21: mol_type = other RNA
  modified_base 1: mod_base = OTHER; note = 5'-phosphate-2'-O-methyluridine-3'-phosphorothioate
  modified_base 2: mod_base = OTHER; note = 2'-fluorouridine-3'-phosphorothioate
  modified_base 3: mod_base = OTHER; note = 2'-O-methyluridine-3'-phosphate
  modified_base 4: mod_base = OTHER; note = 2'-O-methyluridine-3'-phosphate
  modified_base 5: mod_base = OTHER; note = 2'-O-methyladenosine-3'-phosphate
  modified_base 6: mod_base = OTHER; note = 2'-fluorouridine-3'-phosphate
  modified_base 7: mod_base = OTHER; note = 2'-O-methyluridine-3'-phosphate
  modified_base 8: mod_base = OTHER; note = 2'-O-methyluridine-3'-phosphate
  modified_base 9: mod_base = OTHER; note = 2'-O-methyluridine-3'-phosphate
  modified_base 10: mod_base = OTHER; note = 2'-O-methyladenosine-3'-phosphate
  modified_base 11: mod_base = OTHER; note = 2'-O-methyladenosine-3'-phosphate
  modified_base 12: mod_base = OTHER; note = 2'-O-methyladenosine-3'-phosphate
  modified_base 13: mod_base = OTHER; note = 2'-O-methyladenosine-3'-phosphate
  modified_base 14: mod_base = OTHER; note = 2'-fluoroadenosine-3'-phosphate
  modified_base 15: mod_base = OTHER; note = 2'-O-methylguanosine-3'-phosphate
  modified_base 16: mod_base = OTHER; note = 2'-fluorouridine-3'-phosphate
  modified_base 17: mod_base = OTHER; note = 2'-O-methylcytidine-3'-phosphate
  modified_base 18: mod_base = OTHER; note = 2'-O-methyladenosine-3'-phosphate
  modified_base 19: mod_base = OTHER; note = 2'-O-methylcytidine-3'-phosphorothioate
  modified_base 20: mod_base = OTHER; note = 2'-O-methylcytidine-3'-phosphorothioate
  modified_base 21: mod_base = OTHER; note = 2'-O-methyladenosine
ttttattttaaaaagtcacca

SEQ ID NO: 1856 - RNA, 19 nt, synthetic construct
  source 1..19: mol_type = other RNA
  modified_base 1: mod_base = OTHER; note = 2'-O-methylguanosine-3'-phosphorothioate
  modified_base 2: mod_base = OTHER; note = 2'-O-methyluridine-3'-phosphorothioate
  modified_base 3: mod_base = OTHER; note = 2'-O-methylguanosine-3'-phosphate
  modified_base 4: mod_base = OTHER; note = 2'-O-methyladenosine-3'-phosphate
  modified_base 5: mod_base = OTHER; note = 2'-fluorocytidine-3'-phosphate
  modified_base 6: mod_base = OTHER; note = 2'-O-methyluridine-3'-phosphate
  modified_base 7: mod_base = OTHER; note = 2'-fluorouridine-3'-phosphate
  modified_base 8: mod_base = OTHER; note = 2'-fluorouridine-3'-phosphate
  modified_base 9: mod_base = OTHER; note = 2'-fluorouridine-3'-phosphate
  modified_base 10: mod_base = OTHER; note = 2'-O-methyluridine-3'-phosphate
  modified_base 11: mod_base = OTHER; note = 2'-O-methyladenosine-3'-phosphate
  modified_base 12: mod_base = OTHER; note = 2'-O-methyladenosine-3'-phosphate
  modified_base 13: mod_base = OTHER; note = 2'-O-methyladenosine-3'-phosphate
  modified_base 14: mod_base = OTHER; note = 2'-O-methyladenosine-3'-phosphate
  modified_base 15: mod_base = OTHER; note = 2'-O-methyluridine-3'-phosphate
  modified_base 16: mod_base = OTHER; note = 2'-O-methyladenosine-3'-phosphate
  modified_base 17: mod_base = OTHER; note = 2'-O-methyladenosine-3'-phosphate
  modified_base 18: mod_base = OTHER; note = 2'-O-methyladenosine-3'-phosphate
  modified_base 19: mod_base = OTHER; note = 2'-O-methyladenosine
gtgactttttaaaataaaa

SEQ ID NO: 1857 - RNA, 21 nt, synthetic construct
  source 1..21: mol_type = other RNA
  modified_base 1: mod_base = OTHER; note = 5'-phosphate-2'-O-methyluridine-3'-phosphorothioate
  modified_base 2: mod_base = OTHER; note = 2'-fluorouridine-3'-phosphorothioate
  modified_base 3: mod_base = OTHER; note = 2'-O-methyluridine-3'-phosphate
  modified_base 4: mod_base = OTHER; note = 2'-O-methyluridine-3'-phosphate
  modified_base 5: mod_base = OTHER; note = 2'-O-methyladenosine-3'-phosphate
  modified_base 6: mod_base = OTHER; note = 2'-fluorouridine-3'-phosphate
  modified_base 7: mod_base = OTHER; note = 2'-O-methyluridine-3'-phosphate
  modified_base 8: mod_base = OTHER; note = 2'-fluorouridine-3'-phosphate
  modified_base 9: mod_base = OTHER; note = 2'-fluorouridine-3'-phosphate
  modified_base 10: mod_base = OTHER; note = 2'-O-methyladenosine-3'-phosphate
  modified_base 11: mod_base = OTHER; note = 2'-O-methyladenosine-3'-phosphate
  modified_base 12: mod_base = OTHER; note = 2'-O-methyladenosine-3'-phosphate
  modified_base 13: mod_base = OTHER; note = 2'-O-methyladenosine-3'-phosphate
  modified_base 14: mod_base = OTHER; note = 2'-fluoroadenosine-3'-phosphate
  modified_base 15: mod_base = OTHER; note = 2'-O-methylguanosine-3'-phosphate
  modified_base 16: mod_base = OTHER; note = 2'-fluorouridine-3'-phosphate
  modified_base 17: mod_base = OTHER; note = 2'-O-methylcytidine-3'-phosphate
  modified_base 18: mod_base = OTHER; note = 2'-O-methyladenosine-3'-phosphate
  modified_base 19: mod_base = OTHER; note = 2'-O-methylcytidine-3'-phosphorothioate
  modified_base 20: mod_base = OTHER; note = 2'-O-methylcytidine-3'-phosphorothioate
  modified_base 21: mod_base = OTHER; note = 2'-O-methyladenosine
ttttattttaaaaagtcacca

SEQ ID NO: 1858 - RNA, 19 nt, synthetic construct
  source 1..19: mol_type = other RNA
  modified_base 1: mod_base = OTHER; note = 2'-O-methylguanosine-3'-phosphorothioate
  modified_base 2: mod_base = OTHER; note = 2'-O-methyluridine-3'-phosphorothioate
  modified_base 3: mod_base = OTHER; note = 2'-O-methylguanosine-3'-phosphate
  modified_base 4: mod_base = OTHER; note = 2'-O-methyladenosine-3'-phosphate
  modified_base 5: mod_base = OTHER; note = 2'-fluorocytidine-3'-phosphate
  modified_base 6: mod_base = OTHER; note = 2'-O-methyluridine-3'-phosphate
  modified_base 7: mod_base = OTHER; note = 2'-fluorouridine-3'-phosphate
  modified_base 8: mod_base = OTHER; note = 2'-fluorouridine-3'-phosphate
  modified_base 9: mod_base = OTHER; note = 2'-fluorouridine-3'-phosphate
  modified_base 10: mod_base = OTHER; note = 2'-O-methyluridine-3'-phosphate
  modified_base 11: mod_base = OTHER; note = 2'-O-methyladenosine-3'-phosphate
  modified_base 12: mod_base = OTHER; note = 2'-O-methyladenosine-3'-phosphate
  modified_base 13: mod_base = OTHER; note = 2'-O-methyladenosine-3'-phosphate
  modified_base 14: mod_base = OTHER; note = 2'-O-methyladenosine-3'-phosphate
  modified_base 15: mod_base = OTHER; note = 2'-O-methyluridine-3'-phosphate
  modified_base 16: mod_base = OTHER; note = 2'-O-methyladenosine-3'-phosphate
  modified_base 17: mod_base = OTHER; note = 2'-O-methyladenosine-3'-phosphate
  modified_base 18: mod_base = OTHER; note = 2'-O-methyladenosine-3'-phosphate
  modified_base 19: mod_base = OTHER; note = 2'-O-methyladenosine
gtgactttttaaaataaaa

SEQ ID NO: 1859 - RNA, 21 nt, synthetic construct
  source 1..21: mol_type = other RNA
  modified_base 1: mod_base = OTHER; note = 5'-phosphate-2'-O-methyluridine-3'-phosphorothioate
  modified_base 2: mod_base = OTHER; note = 2'-fluorouridine-3'-phosphorothioate
  modified_base 3: mod_base = OTHER; note = 2'-O-methyluridine-3'-phosphate
  modified_base 4: mod_base = OTHER; note = 2'-O-methyluridine-3'-phosphate
  modified_base 5: mod_base = OTHER; note = 2'-O-methyladenosine-3'-phosphate
  modified_base 6: mod_base = OTHER; note = 2'-fluorouridine-3'-phosphate
  modified_base 7: mod_base = OTHER; note = 2'-O-methyluridine-3'-phosphate
  modified_base 8: mod_base = OTHER; note = 2'-O-methyluridine-3'-phosphate
  modified_base 9: mod_base = OTHER; note = 2'-O-methyluridine-3'-phosphate
  modified_base 10: mod_base = OTHER; note = 2'-O-methyladenosine-3'-phosphate
  modified_base 11: mod_base = OTHER; note = 2'-O-methyladenosine-3'-phosphate
  modified_base 12: mod_base = OTHER; note = 2'-O-methyladenosine-3'-phosphate
  modified_base 13: mod_base = OTHER; note = 2'-O-methyladenosine-3'-phosphate
  modified_base 14: mod_base = OTHER; note = 2'-fluoroadenosine-3'-phosphate
  modified_base 15: mod_base = OTHER; note = 2'-O-methylguanosine-3'-phosphate
  modified_base 16: mod_base = OTHER; note = 2'-fluorouridine-3'-phosphate
  modified_base 17: mod_base = OTHER; note = 2'-O-methylcytidine-3'-phosphate
  modified_base 18: mod_base = OTHER; note = 2'-O-methyladenosine-3'-phosphate
  modified_base 19: mod_base = OTHER; note = 2'-O-methylcytidine-3'-phosphorothioate
  modified_base 20: mod_base = OTHER; note = 2'-O-methylcytidine-3'-phosphorothioate
  modified_base 21: mod_base = OTHER; note = 2'-O-methyladenosine
ttttattttaaaaagtcacca

SEQ ID NO: 1860 - RNA, 21 nt, synthetic construct
  source 1..21: mol_type = other RNA
  modified_base 1: mod_base = OTHER; note = 2'-O-methyluridine-3'-phosphorothioate
  modified_base 2: mod_base = OTHER; note = 2'-O-methylguanosine-3'-phosphorothioate
  modified_base 3: mod_base = OTHER; note = 2'-O-methylguanosine-3'-phosphate
  modified_base 4: mod_base = OTHER; note = 2'-O-methyluridine-3'-phosphate
  modified_base 5: mod_base = OTHER; note = 2'-O-methylguanosine-3'-phosphate
  modified_base 6: mod_base = OTHER; note = 2'-O-methyladenosine-3'-phosphate
  modified_base 7: mod_base = OTHER; note = 2'-O-methylcytidine-3'-phosphate
  modified_base 8: mod_base = OTHER; note = 2'-O-methyluridine-3'-phosphate
  modified_base 9: mod_base = OTHER; note = 2'-fluorouridine-3'-phosphate
  modified_base 10: mod_base = OTHER; note = 2'-fluorouridine-3'-phosphate
  modified_base 11: mod_base = OTHER; note = 2'-fluorouridine-3'-phosphate
  modified_base 12: mod_base = OTHER; note = 2'-O-methyluridine-3'-phosphate
  modified_base 13: mod_base = OTHER; note = 2'-O-methyladenosine-3'-phosphate
  modified_base 14: mod_base = OTHER; note = 2'-O-methyladenosine-3'-phosphate
  modified_base 15: mod_base = OTHER; note = 2'-O-methyladenosine-3'-phosphate
  modified_base 16: mod_base = OTHER; note = 2'-O-methyladenosine-3'-phosphate
  modified_base 17: mod_base = OTHER; note = 2'-O-methyluridine-3'-phosphate
  modified_base 18: mod_base = OTHER; note = 2'-O-methyladenosine-3'-phosphate
  modified_base 19: mod_base = OTHER; note = 2'-O-methyladenosine-3'-phosphate
  modified_base 20: mod_base = OTHER; note = 2'-O-methyladenosine-3'-phosphate
  modified_base 21: mod_base = OTHER; note = 2'-O-methyladenosine
tggtgactttttaaaataaaa

SEQ ID NO: 1861 - RNA, 23 nt, synthetic construct
  source 1..23: mol_type = other RNA
  modified_base 1: mod_base = OTHER; note = 5'-phosphate-2'-O-methyluridine-3'-phosphorothioate
  modified_base 2: mod_base = OTHER; note = 2'-fluorouridine-3'-phosphorothioate
  modified_base 3: mod_base = OTHER; note = 2'-O-methyluridine-3'-phosphate
  modified_base 4: mod_base = OTHER; note = 2'-O-methyluridine-3'-phosphate
  modified_base 5: mod_base = OTHER; note = 2'-O-methyladenosine-3'-phosphate
  modified_base 6: mod_base = OTHER; note = 2'-fluorouridine-3'-phosphate
  modified_base 7: mod_base = OTHER; note = 2'-O-methyluridine-3'-phosphate
  modified_base 8: mod_base = OTHER; note = 2'-O-methyluridine-3'-phosphate
  modified_base 9: mod_base = OTHER; note = 2'-O-methyluridine-3'-phosphate
  modified_base 10: mod_base = OTHER; note = 2'-O-methyladenosine-3'-phosphate
  modified_base 11: mod_base = OTHER; note = 2'-O-methyladenosine-3'-phosphate
  modified_base 12: mod_base = OTHER; note = 2'-O-methyladenosine-3'-phosphate
  modified_base 13: mod_base = OTHER; note = 2'-O-methyladenosine-3'-phosphate
  modified_base 14: mod_base = OTHER; note = 2'-fluoroadenosine-3'-phosphate
  modified_base 15: mod_base = OTHER; note = 2'-O-methylguanosine-3'-phosphate
  modified_base 16: mod_base = OTHER; note = 2'-fluorouridine-3'-phosphate
  modified_base 17: mod_base = OTHER; note = 2'-O-methylcytidine-3'-phosphate
  modified_base 18: mod_base = OTHER; note = 2'-O-methyladenosine-3'-phosphate
  modified_base 19: mod_base = OTHER; note = 2'-O-methylcytidine-3'-phosphate
  modified_base 20: mod_base = OTHER; note = 2'-O-methylcytidine-3'-phosphate
  modified_base 21: mod_base = OTHER; note = 2'-O-methyladenosine-3'-phosphorothioate
  modified_base 22: mod_base = OTHER; note = 2'-O-methyluridine-3'-phosphorothioate
  modified_base 23: mod_base = OTHER; note = 2'-O-methyladenosine
ttttattttaaaaagtcaccata

SEQ ID NO: 1862 - RNA, 21 nt, synthetic construct
  source 1..21: mol_type = other RNA
  modified_base 1: mod_base = OTHER; note = 2'-O-methyluridine-3'-phosphorothioate
  modified_base 2: mod_base = OTHER; note = 2'-O-methylguanosine-3'-phosphorothioate
  modified_base 3: mod_base = OTHER; note = 2'-O-methylguanosine-3'-phosphate
  modified_base 4: mod_base = OTHER; note = 2'-O-methyluridine-3'-phosphate
  modified_base 5: mod_base = OTHER; note = 2'-O-methylguanosine-3'-phosphate
  modified_base 6: mod_base = OTHER; note = 2'-O-methyladenosine-3'-phosphate
  modified_base 7: mod_base = OTHER; note = 2'-fluorocytidine-3'-phosphate
  modified_base 8: mod_base = OTHER; note = 2'-O-methyluridine-3'-phosphate
  modified_base 9: mod_base = OTHER; note = 2'-fluorouridine-3'-phosphate
  modified_base 10: mod_base = OTHER; note = 2'-fluorouridine-3'-phosphate
  modified_base 11: mod_base = OTHER; note = 2'-fluorouridine-3'-phosphate
  modified_base 12: mod_base = OTHER; note = 2'-O-methyluridine-3'-phosphate
  modified_base 13: mod_base = OTHER; note = 2'-O-methyladenosine-3'-phosphate
  modified_base 14: mod_base = OTHER; note = 2'-O-methyladenosine-3'-phosphate
  modified_base 15: mod_base = OTHER; note = 2'-O-methyladenosine-3'-phosphate
  modified_base 16: mod_base = OTHER; note = 2'-O-methyladenosine-3'-phosphate
  modified_base 17: mod_base = OTHER; note = 2'-O-methyluridine-3'-phosphate
  modified_base 18: mod_base = OTHER; note = 2'-O-methyladenosine-3'-phosphate
  modified_base 19: mod_base = OTHER; note = 2'-O-methyladenosine-3'-phosphate
  modified_base 20: mod_base = OTHER; note = 2'-O-methyladenosine-3'-phosphate
  modified_base 21: mod_base = OTHER; note = 2'-O-methyladenosine
tggtgactttttaaaataaaa

SEQ ID NO: 1863 - RNA, 23 nt, synthetic construct
  source 1..23: mol_type = other RNA
  modified_base 1: mod_base = OTHER; note = 5'-phosphate-2'-O-methyluridine-3'-phosphorothioate
  modified_base 2: mod_base = OTHER; note = 2'-fluorouridine-3'-phosphorothioate
  modified_base 3: mod_base = OTHER; note = 2'-O-methyluridine-3'-phosphate
  modified_base 4: mod_base = OTHER; note = 2'-O-methyluridine-3'-phosphate
  modified_base 5: mod_base = OTHER; note = 2'-O-methyladenosine-3'-phosphate
  modified_base 6: mod_base = OTHER; note = 2'-fluorouridine-3'-phosphate
  modified_base 7: mod_base = OTHER; note = 2'-O-methyluridine-3'-phosphate
  modified_base 8: mod_base = OTHER; note = 2'-fluorouridine-3'-phosphate
  modified_base 9: mod_base = OTHER; note = 2'-fluorouridine-3'-phosphate
  modified_base 10: mod_base = OTHER; note = 2'-O-methyladenosine-3'-phosphate
  modified_base 11: mod_base = OTHER; note = 2'-O-methyladenosine-3'-phosphate
  modified_base 12: mod_base = OTHER; note = 2'-O-methyladenosine-3'-phosphate
  modified_base 13: mod_base = OTHER; note = 2'-O-methyladenosine-3'-phosphate
  modified_base 14: mod_base = OTHER; note = 2'-fluoroadenosine-3'-phosphate
  modified_base 15: mod_base = OTHER; note = 2'-O-methylguanosine-3'-phosphate
  modified_base 16: mod_base = OTHER; note = 2'-fluorouridine-3'-phosphate
  modified_base 17: mod_base = OTHER; note = 2'-O-methylcytidine-3'-phosphate
  modified_base 18: mod_base = OTHER; note = 2'-O-methyladenosine-3'-phosphate
  modified_base 19: mod_base = OTHER; note = 2'-O-methylcytidine-3'-phosphate
  modified_base 20: mod_base = OTHER; note = 2'-O-methylcytidine-3'-phosphate
  modified_base 21: mod_base = OTHER; note = 2'-O-methyladenosine-3'-phosphorothioate
  modified_base 22: mod_base = OTHER; note = 2'-O-methyluridine-3'-phosphorothioate
  modified_base 23: mod_base = OTHER; note = 2'-O-methyladenosine
ttttattttaaaaagtcaccata

SEQ ID NO: 1864 - RNA, 21 nt, synthetic construct
  source 1..21: mol_type = other RNA
  modified_base 1: mod_base = OTHER; note = 2'-O-methyladenosine-3'-phosphorothioate
  modified_base 2: mod_base = OTHER; note = 2'-O-methylguanosine-3'-phosphorothioate
  modified_base 3: mod_base = OTHER; note = 2'-O-methyladenosine-3'-phosphate
  modified_base 4: mod_base = OTHER; note = 2'-O-methylcytidine-3'-phosphate
  modified_base 5: mod_base = OTHER; note = 2'-O-methylcytidine-3'-phosphate
  modified_base 6: mod_base = OTHER; note = 2'-O-methyluridine-3'-phosphate
  modified_base 7: mod_base = OTHER; note = 2'-fluoroguanosine-3'-phosphate
  modified_base 8: mod_base = OTHER; note = 2'-O-methyluridine-3'-phosphate
  modified_base 9: mod_base = OTHER; note = 2'-fluorouridine-3'-phosphate
  modified_base 10: mod_base = OTHER; note = 2'-O-methyluridine-3'-phosphate
  modified_base 11: mod_base = OTHER; note = 2'-fluorouridine-3'-phosphate
  modified_base 12: mod_base = OTHER; note = 2'-O-methylguanosine-3'-phosphate
  modified_base 13: mod_base = OTHER; note = 2'-O-methylcytidine-3'-phosphate
  modified_base 14: mod_base = OTHER; note = 2'-O-methyluridine-3'-phosphate
  modified_base 15: mod_base = OTHER; note = 2'-O-methyluridine-3'-phosphate
  modified_base 16: mod_base = OTHER; note = 2'-O-methyluridine-3'-phosphate
  modified_base 17: mod_base = OTHER; note = 2'-O-methyluridine-3'-phosphate
  modified_base 18: mod_base = OTHER; note = 2'-O-methylguanosine-3'-phosphate
  modified_base 19: mod_base = OTHER; note = 2'-O-methyluridine-3'-phosphate
  modified_base 20: mod_base = OTHER; note = 2'-O-methyladenosine-3'-phosphate
  modified_base 21: mod_base = OTHER; note = 2'-O-methyladenosine-3'-phosphate
agacctgttttgcttttgtaa

SEQ ID NO: 1865 - RNA, 23 nt, synthetic construct
  source 1..23: mol_type = other RNA
  modified_base 1: mod_base = OTHER; note = 2'-O-methyluridine-3'-phosphorothioate
  modified_base 2: mod_base = OTHER; note = 2'-fluorouridine-3'-phosphorothioate
  modified_base 3: mod_base = OTHER; note = 2'-O-methyladenosine-3'-phosphate
  modified_base 4: mod_base = OTHER; note = 2'-O-methylcytidine-3'-phosphate
  modified_base 5: mod_base = OTHER; note = 2'-O-methyladenosine-3'-phosphate
  modified_base 6: mod_base = OTHER; note = 2'-O-methyladenosine-3'-phosphate
  modified_base 7: mod_base = OTHER; note = 2'-O-methyladenosine-3'-phosphate
  modified_base 8: mod_base = OTHER; note = 2'-O-methyladenosine-3'-phosphate
  modified_base 9: mod_base = OTHER; note = 2'-O-methylguanosine-3'-phosphate
  modified_base 10: mod_base = OTHER; note = 2'-O-methylcytidine-3'-phosphate
  modified_base 11: mod_base = OTHER; note = 2'-O-methyladenosine-3'-phosphate
  modified_base 12: mod_base = OTHER; note = 2'-fluoroadenosine-3'-phosphate
  modified_base 13: mod_base = OTHER; note = 2'-O-methyladenosine-3'-phosphate
  modified_base 14: mod_base = OTHER; note = 2'-fluoroadenosine-3'-phosphate
  modified_base 15: mod_base = OTHER; note = 2'-O-methylcytidine-3'-phosphate
  modified_base 16: mod_base = OTHER; note = 2'-fluoroadenosine-3'-phosphate
  modified_base 17: mod_base = OTHER; note = 2'-O-methylguanosine-3'-phosphate
  modified_base 18: mod_base = OTHER; note = 2'-O-methylguanosine-3'-phosphate
  modified_base 19: mod_base = OTHER; note = 2'-O-methyluridine-3'-phosphate
  modified_base 20: mod_base = OTHER; note = 2'-O-methylcytidine-3'-phosphate
  modified_base 21: mod_base = OTHER; note = 2'-O-methyluridine-3'-phosphorothioate
  modified_base 22: mod_base = OTHER; note = 2'-O-methyladenosine-3'-phosphorothioate
  modified_base 23: mod_base = OTHER; note = 2'-O-methylguanosine-3'-phosphate
ttacaaaagcaaaacaggtctag

SEQ ID NO: 1866 - RNA, 21 nt, synthetic construct
  source 1..21: mol_type = other RNA
  modified_base 1: mod_base = OTHER; note = 2'-O-methyluridine-3'-phosphorothioate
  modified_base 2: mod_base = OTHER; note = 2'-O-methyluridine-3'-phosphorothioate
  modified_base 3: mod_base = OTHER; note = 2'-O-methyluridine-3'-phosphate
  modified_base 4: mod_base = OTHER; note = 2'-O-methyluridine-3'-phosphate
  modified_base 5: mod_base = OTHER; note = 2'-O-methylguanosine-3'-phosphate
  modified_base 6: mod_base = OTHER; note = 2'-O-methylcytidine-3'-phosphate
  modified_base 7: mod_base = OTHER; note = 2'-fluorouridine-3'-phosphate
  modified_base 8: mod_base = OTHER; note = 2'-O-methyluridine-3'-phosphate
  modified_base 9: mod_base = OTHER; note = 2'-fluorouridine-3'-phosphate
  modified_base 10: mod_base = OTHER; note = 2'-O-methyluridine-3'-phosphate
  modified_base 11: mod_base = OTHER; note = 2'-fluoroguanosine-3'-phosphate
  modified_base 12: mod_base = OTHER; note = 2'-O-methyluridine-3'-phosphate
  modified_base 13: mod_base = OTHER; note = 2'-O-methyladenosine-3'-phosphate
  modified_base 14: mod_base = OTHER; note = 2'-O-methyladenosine-3'-phosphate
  modified_base 15: mod_base = OTHER; note = 2'-O-methylcytidine-3'-phosphate
  modified_base 16: mod_base = OTHER; note = 2'-O-methyluridine-3'-phosphate
  modified_base 17: mod_base = OTHER; note = 2'-O-methyluridine-3'-phosphate
  modified_base 18: mod_base = OTHER; note = 2'-O-methylguanosine-3'-phosphate
  modified_base 19: mod_base = OTHER; note = 2'-O-methyladenosine-3'-phosphate
  modified_base 20: mod_base = OTHER; note = 2'-O-methyladenosine-3'-phosphate
  modified_base 21: mod_base = OTHER; note = 2'-O-methyladenosine-3'-phosphate
ttttgcttttgtaacttgaaa

SEQ ID NO: 1867 - RNA, 23 nt, synthetic construct
  source 1..23: mol_type = other RNA
  modified_base 1: mod_base = OTHER; note = 2'-O-methyluridine-3'-phosphorothioate
  modified_base 2: mod_base = OTHER; note = 2'-fluorouridine-3'-phosphorothioate
  modified_base 3: mod_base = OTHER; note = 2'-O-methyluridine-3'-phosphate
  modified_base 4: mod_base = OTHER; note = 2'-O-methylcytidine-3'-phosphate
  modified_base 5: mod_base = OTHER; note = 2'-O-methyladenosine-3'-phosphate
  modified_base 6: mod_base = OTHER; note = 2'-O-methyladenosine-3'-phosphate
  modified_base 7: mod_base = OTHER; note = 2'-O-methylguanosine-3'-phosphate
  modified_base 8: mod_base = OTHER; note = 2'-O-methyluridine-3'-phosphate
  modified_base 9: mod_base = OTHER; note = 2'-O-methyluridine-3'-phosphate
  modified_base 10: mod_base = OTHER; note = 2'-O-methyladenosine-3'-phosphate
  modified_base 11: mod_base = OTHER; note = 2'-O-methylcytidine-3'-phosphate
  modified_base 12: mod_base = OTHER; note = 2'-fluoroadenosine-3'-phosphate
  modified_base 13: mod_base = OTHER; note = 2'-O-methyladenosine-3'-phosphate
  modified_base 14: mod_base = OTHER; note = 2'-fluoroadenosine-3'-phosphate
  modified_base 15: mod_base = OTHER; note = 2'-O-methyladenosine-3'-phosphate
  modified_base 16: mod_base = OTHER; note = 2'-fluoroguanosine-3'-phosphate
  modified_base 17: mod_base = OTHER; note = 2'-O-methylcytidine-3'-phosphate
  modified_base 18: mod_base = OTHER; note = 2'-O-methyladenosine-3'-phosphate
  modified_base 19: mod_base = OTHER; note = 2'-O-methyladenosine-3'-phosphate
  modified_base 20: mod_base = OTHER; note = 2'-O-methyladenosine-3'-phosphate
  modified_base 21: mod_base = OTHER; note = 2'-O-methyladenosine-3'-phosphorothioate
  modified_base 22: mod_base = OTHER; note = 2'-O-methylcytidine-3'-phosphorothioate
  modified_base 23: mod_base = OTHER; note = 2'-O-methyladenosine-3'-phosphate
tttcaagttacaaaagcaaaaca

SEQ ID NO: 1868 - RNA, 21 nt, synthetic construct
  source 1..21: mol_type = other RNA
  modified_base 1: mod_base = OTHER; note = 2'-O-methylcytidine-3'-phosphorothioate
  modified_base 2: mod_base = OTHER; note = 2'-O-methyluridine-3'-phosphorothioate
  modified_base 3: mod_base = OTHER; note = 2'-O-methyluridine-3'-phosphate
  modified_base 4: mod_base = OTHER; note = 2'-O-methyluridine-3'-phosphate
  modified_base 5: mod_base = OTHER; note = 2'-O-methyluridine-3'-phosphate
  modified_base 6: mod_base = OTHER; note = 2'-O-methylguanosine-3'-phosphate
  modified_base 7: mod_base = OTHER; note = 2'-fluorouridine-3'-phosphate
  modified_base 8: mod_base = OTHER; note = 2'-O-methyladenosine-3'-phosphate
  modified_base 9: mod_base = OTHER; note = 2'-fluoroadenosine-3'-phosphate
  modified_base 10: mod_base = OTHER; note = 2'-O-methylcytidine-3'-phosphate
  modified_base 11: mod_base = OTHER; note = 2'-fluorouridine-3'-phosphate
  modified_base 12: mod_base = OTHER; note = 2'-O-methyluridine-3'-phosphate
  modified_base 13: mod_base = OTHER; note = 2'-O-methylguanosine-3'-phosphate
  modified_base 14: mod_base = OTHER; note = 2'-O-methyladenosine-3'-phosphate
  modified_base 15: mod_base = OTHER; note = 2'-O-methyladenosine-3'-phosphate
  modified_base 16: mod_base = OTHER; note = 2'-O-methylguanosine-3'-phosphate
  modified_base 17: mod_base = OTHER; note = 2'-O-methyladenosine-3'-phosphate
  modified_base 18: mod_base = OTHER; note = 2'-O-methyluridine-3'-phosphate
  modified_base 19: mod_base = OTHER; note = 2'-O-methyladenosine-3'-phosphate
  modified_base 20: mod_base = OTHER; note = 2'-O-methyluridine-3'-phosphate
  modified_base 21: mod_base = OTHER; note = 2'-O-methyluridine
cttttgtaacttgaagatatt

SEQ ID NO: 1869 - RNA, 23 nt, synthetic construct
  source 1..23: mol_type = other RNA
  modified_base 1: mod_base = OTHER; note = 2'-O-methyladenosine-3'-phosphorothioate
  modified_base 2: mod_base = OTHER; note = 2'-fluoroadenosine-3'-phosphorothioate
  modified_base 3: mod_base = OTHER; note = 2'-O-methyluridine-3'-phosphate
  modified_base 4: mod_base = OTHER; note = 2'-O-methyladenosine-3'-phosphate
  modified_base 5: mod_base = OTHER; note = 2'-O-methyluridine-3'-phosphate
  modified_base 6: mod_base = OTHER; note = 2'-O-methylcytidine-3'-phosphate
  modified_base 7: mod_base = OTHER; note = 2'-O-methyluridine-3'-phosphate
  modified_base 8: mod_base = OTHER; note = 2'-O-methyluridine-3'-phosphate
  modified_base 9: mod_base = OTHER; note = 2'-O-methylcytidine-3'-phosphate
  modified_base 10: mod_base = OTHER; note = 2'-O-methyladenosine-3'-phosphate
  modified_base 11: mod_base = OTHER; note = 2'-O-methyladenosine-3'-phosphate
  modified_base 12: mod_base = OTHER; note = 2'-fluoroguanosine-3'-phosphate
  modified_base 13: mod_base = OTHER; note = 2'-O-methyluridine-3'-phosphate
  modified_base 14: mod_base = OTHER; note = 2'-fluorouridine-3'-phosphate
  modified_base 15: mod_base = OTHER; note = 2'-O-methyladenosine-3'-phosphate
  modified_base 16: mod_base = OTHER; note = 2'-fluorocytidine-3'-phosphate
  modified_base 17: mod_base = OTHER; note = 2'-O-methyladenosine-3'-phosphate
  modified_base 18: mod_base = OTHER; note = 2'-O-methyladenosine-3'-phosphate
  modified_base 19: mod_base = OTHER; note = 2'-O-methyladenosine-3'-phosphate
  modified_base 20: mod_base = OTHER; note = 2'-O-methyladenosine-3'-phosphate
  modified_base 21: mod_base = OTHER; note = 2'-O-methylguanosine-3'-phosphorothioate
  modified_base 22: mod_base = OTHER; note = 2'-O-methylcytidine-3'-phosphorothioate
  modified_base 23: mod_base = OTHER; note = 2'-O-methyladenosine
aatatcttcaagttacaaaagca

SEQ ID NO: 1870 - RNA, 21 nt, synthetic construct
  source 1..21: mol_type = other RNA
  modified_base 1: mod_base = OTHER; note = 2'-O-methyluridine-3'-phosphorothioate
  modified_base 2: mod_base = OTHER; note = 2'-O-methyluridine-3'-phosphorothioate
  modified_base 3: mod_base = OTHER; note = 2'-O-methyluridine-3'-phosphate
  modified_base 4: mod_base = OTHER; note = 2'-O-methyluridine-3'-phosphate
  modified_base 5: mod_base = OTHER; note = 2'-O-methylguanosine-3'-phosphate
  modified_base 6: mod_base = OTHER; note = 2'-O-methyluridine-3'-phosphate
  modified_base 7: mod_base = OTHER; note = 2'-fluoroadenosine-3'-phosphate
  modified_base 8: mod_base = OTHER; note = 2'-O-methylguanosine-3'-phosphate
  modified_base 9: mod_base = OTHER; note = 2'-fluorocytidine-3'-phosphate
  modified_base 10: mod_base = OTHER; note = 2'-O-methyladenosine-3'-phosphate
  modified_base 11: mod_base = OTHER; note = 2'-fluorouridine-3'-phosphate
  modified_base 12: mod_base = OTHER; note = 2'-O-methyluridine-3'-phosphate
  modified_base 13: mod_base = OTHER; note = 2'-O-methyluridine-3'-phosphate
  modified_base 14: mod_base = OTHER; note = 2'-O-methyluridine-3'-phosphate
  modified_base 15: mod_base = OTHER; note = 2'-O-methyluridine-3'-phosphate
  modified_base 16: mod_base = OTHER; note = 2'-O-methyladenosine-3'-phosphate
  modified_base 17: mod_base = OTHER; note = 2'-O-methyluridine-3'-phosphate
  modified_base 18: mod_base = OTHER; note = 2'-O-methyluridine-3'-phosphate
  modified_base 19: mod_base = OTHER; note = 2'-O-methyladenosine-3'-phosphate
  modified_base 20: mod_base = OTHER; note = 2'-O-methyladenosine-3'-phosphate
  modified_base 21: mod_base = OTHER; note = 2'-O-methyluridine
ttttgtagcatttttattaat

SEQ ID NO: 1871 - RNA, 23 nt, synthetic construct
  source 1..23: mol_type = other RNA
  modified_base 1: mod_base = OTHER; note = 2'-O-methyladenosine-3'-phosphorothioate
  modified_base 2: mod_base = OTHER; note = 2'-fluorouridine-3'-phosphorothioate
  modified_base 3: mod_base = OTHER; note = 2'-O-methyluridine-3'-phosphate
  modified_base 4: mod_base = OTHER; note = 2'-O-methyladenosine-3'-phosphate
  modified_base 5: mod_base = OTHER; note = 2'-O-methyladenosine-3'-phosphate
  modified_base 6: mod_base = OTHER; note = 2'-O-methyluridine-3'-phosphate
  modified_base 7: mod_base = OTHER; note = 2'-O-methyladenosine-3'-phosphate
  modified_base 8: mod_base = OTHER; note = 2'-O-methyladenosine-3'-phosphate
  modified_base 9: mod_base = OTHER; note = 2'-O-methyladenosine-3'-phosphate
  modified_base 10: mod_base = OTHER; note = 2'-O-methyladenosine-3'-phosphate
  modified_base 11: mod_base = OTHER; note = 2'-O-methyladenosine-3'-phosphate
  modified_base 12: mod_base = OTHER; note = 2'-fluorouridine-3'-phosphate
  modified_base 13: mod_base = OTHER; note = 2'-O-methylguanosine-3'-phosphate
  modified_base 14: mod_base = OTHER; note = 2'-fluorocytidine-3'-phosphate
  modified_base 15: mod_base = OTHER; note = 2'-O-methyluridine-3'-phosphate
  modified_base 16: mod_base = OTHER; note = 2'-fluoroadenosine-3'-phosphate
  modified_base 17: mod_base = OTHER; note = 2'-O-methylcytidine-3'-phosphate
  modified_base 18: mod_base = OTHER; note = 2'-O-methyladenosine-3'-phosphate
  modified_base 19: mod_base = OTHER; note = 2'-O-methyladenosine-3'-phosphate
  modified_base 20: mod_base = OTHER; note = 2'-O-methyladenosine-3'-phosphate
  modified_base 21: mod_base = OTHER; note = 2'-O-methyladenosine-3'-phosphorothioate
  modified_base 22: mod_base = OTHER; note = 2'-O-methylcytidine-3'-phosphorothioate
  modified_base 23: mod_base = OTHER; note = 2'-O-methylcytidine
attaataaaaatgctacaaaacc

SEQ ID NO: 1872 - RNA, 21 nt, synthetic construct
  source 1..21: mol_type = other RNA
  modified_base 1: mod_base = OTHER; note = 2'-O-methyluridine-3'-phosphorothioate
  modified_base 2: mod_base = OTHER; note = 2'-O-methyluridine-3'-phosphorothioate
  modified_base 3: mod_base = OTHER; note = 2'-O-methylguanosine-3'-phosphate
  modified_base 4: mod_base = OTHER; note = 2'-O-methyluridine-3'-phosphate
  modified_base 5: mod_base = OTHER; note = 2'-O-methyladenosine-3'-phosphate
  modified_base 6: mod_base = OTHER; note = 2'-O-methylguanosine-3'-phosphate
  modified_base 7: mod_base = OTHER; note = 2'-fluorocytidine-3'-phosphate
  modified_base 8: mod_base = OTHER; note = 2'-O-methyladenosine-3'-phosphate
  modified_base 9: mod_base = OTHER; note = 2'-fluorouridine-3'-phosphate
  modified_base 10: mod_base = OTHER; note = 2'-O-methyluridine-3'-phosphate
  modified_base 11: mod_base = OTHER; note = 2'-fluorouridine-3'-phosphate
  modified_base 12: mod_base = OTHER; note = 2'-O-methyluridine-3'-phosphate
  modified_base 13: mod_base = OTHER; note = 2'-O-methyluridine-3'-phosphate
  modified_base 14: mod_base = OTHER; note = 2'-O-methyladenosine-3'-phosphate
  modified_base 15: mod_base = OTHER; note = 2'-O-methyluridine-3'-phosphate
  modified_base 16: mod_base = OTHER; note = 2'-O-methyluridine-3'-phosphate
  modified_base 17: mod_base = OTHER; note = 2'-O-methyladenosine-3'-phosphate
  modified_base 18: mod_base = OTHER; note = 2'-O-methyladenosine-3'-phosphate
  modified_base 19: mod_base = OTHER; note = 2'-O-methyluridine-3'-phosphate
  modified_base 20: mod_base = OTHER; note = 2'-O-methyladenosine-3'-phosphate
  modified_base 21: mod_base = OTHER; note = 2'-O-methyluridine
ttgtagcatttttattaatat

SEQ ID NO: 1873 - RNA, 23 nt, synthetic construct
  source 1..23: mol_type = other RNA
  modified_base 1: mod_base = OTHER; note = 2'-O-methyladenosine-3'-phosphorothioate
  modified_base 2: mod_base = OTHER; note = 2'-fluorouridine-3'-phosphorothioate
  modified_base 3: mod_base = OTHER; note = 2'-O-methyladenosine-3'-phosphate
  modified_base 4: mod_base = OTHER; note = 2'-O-methyluridine-3'-phosphate
  modified_base 5: mod_base = OTHER; note = 2'-O-methyluridine-3'-phosphate
  modified_base 6: mod_base = OTHER; note = 2'-O-methyladenosine-3'-phosphate
  modified_base 7: mod_base = OTHER; note = 2'-O-methyladenosine-3'-phosphate
  modified_base 8: mod_base = OTHER; note = 2'-O-methyluridine-3'-phosphate
  modified_base 9: mod_base = OTHER; note = 2'-O-methyladenosine-3'-phosphate
  modified_base 10: mod_base = OTHER; note = 2'-O-methyladenosine-3'-phosphate
  modified_base 11: mod_base = OTHER; note = 2'-O-methyladenosine-3'-phosphate
  modified_base 12: mod_base = OTHER; note = 2'-fluoroadenosine-3'-phosphate
  modified_base 13: mod_base = OTHER; note = 2'-O-methyladenosine-3'-phosphate
  modified_base 14: mod_base = OTHER; note = 2'-fluorouridine-3'-phosphate
  modified_base 15: mod_base = OTHER; note = 2'-O-methylguanosine-3'-phosphate
  modified_base 16: mod_base = OTHER; note = 2'-fluorocytidine-3'-phosphate
  modified_base 17: mod_base = OTHER; note = 2'-O-methyluridine-3'-phosphate
  modified_base 18: mod_base = OTHER; note = 2'-O-methyladenosine-3'-phosphate
  modified_base 19: mod_base = OTHER; note = 2'-O-methylcytidine-3'-phosphate
  modified_base 20: mod_base = OTHER; note = 2'-O-methyladenosine-3'-phosphate
  modified_base 21: mod_base = OTHER; note = 2'-O-methyladenosine-3'-phosphorothioate
  modified_base 22: mod_base = OTHER; note = 2'-O-methyladenosine-3'-phosphorothioate
  modified_base 23: mod_base = OTHER; note = 2'-O-methyladenosine
atattaataaaaatgctacaaaa

SEQ ID NO: 1874 - DNA, 21 bp, synthetic construct
  source 1..21: mol_type = other DNA
  modified_base 1: mod_base = OTHER; note = 2'-O-methylcytidine-3'-phosphorothioate
  modified_base 2: mod_base = OTHER; note = 2'-O-methyluridine-3'-phosphorothioate
  modified_base 3: mod_base = OTHER; note = 2'-O-methyladenosine-3'-phosphate
  modified_base 4: mod_base = OTHER; note = 2'-O-methylguanosine-3'-phosphate
  modified_base 5: mod_base = OTHER; note = 2'-O-methyladenosine-3'-phosphate
  modified_base 6: mod_base = OTHER; note = 2'-O-methylcytidine-3'-phosphate
  modified_base 7: mod_base = OTHER; note = 2'-fluorocytidine-3'-phosphate
  modified_base 8: mod_base = OTHER; note = 2'-O-methyluridine-3'-phosphate
  modified_base 9: mod_base = OTHER; note = 2'-fluoroguanosine-3'-phosphate
  modified_base 10: mod_base = OTHER; note = 2'-O-methyluridine-3'-phosphate
  modified_base 12: mod_base = OTHER; note = 2'-O-methyluridine-3'-phosphate
  modified_base 13: mod_base = OTHER; note = 2'-O-methyluridine-3'-phosphate
  modified_base 14: mod_base = OTHER; note = 2'-O-methylguanosine-3'-phosphate
  modified_base 15: mod_base = OTHER; note = 2'-O-methylcytidine-3'-phosphate
  modified_base 16: mod_base = OTHER; note = 2'-O-methyluridine-3'-phosphate
  modified_base 17: mod_base = OTHER; note = 2'-O-methyluridine-3'-phosphate
  modified_base 18: mod_base = OTHER; note = 2'-O-methyluridine-3'-phosphate
  modified_base 19: mod_base = OTHER; note = 2'-O-methyluridine-3'-phosphate
  modified_base 20: mod_base = OTHER; note = 2'-O-methylguanosine-3'-phosphate
  modified_base 21: mod_base = OTHER; note = 2'-O-methyluridine
  misc_feature 1..10: note = RNA
  misc_feature 11: note = DNA
  misc_feature 12..21: note = RNA
ctagacctgttttgcttttgt

SEQ ID NO: 1875 - RNA, 23 nt, synthetic construct
  source 1..23: mol_type = other RNA
  modified_base 1: mod_base = OTHER; note = 2'-O-methyladenosine-3'-phosphorothioate
  modified_base 2: mod_base = OTHER; note = 2'-fluorocytidine-3'-phosphorothioate
  modified_base 3: mod_base = OTHER; note = 2'-O-methyladenosine-3'-phosphate
  modified_base 4: mod_base = OTHER; note = 2'-fluoroadenosine-3'-phosphate
  modified_base 5: mod_base = OTHER; note = 2'-fluoroadenosine-3'-phosphate
  modified_base 6: mod_base = OTHER; note = 2'-fluoroadenosine-3'-phosphate
  modified_base 7: mod_base = OTHER; note = 2'-O-methylguanosine-3'-phosphate
  modified_base 8: mod_base = OTHER; note = 2'-fluorocytidine-3'-phosphate
  modified_base 9: mod_base = OTHER; note = 2'-O-methyladenosine-3'-phosphate
  modified_base 10: mod_base = OTHER; note = 2'-fluoroadenosine-3'-phosphate
  modified_base 11: mod_base = OTHER; note = 2'-O-methyladenosine-3'-phosphate
  modified_base 12: mod_base = OTHER; note = 2'-fluoroadenosine-3'-phosphate
  modified_base 13: mod_base = OTHER; note = 2'-O-methylcytidine-3'-phosphate
  modified_base 14: mod_base = OTHER; note = 2'-fluoroadenosine-3'-phosphate
  modified_base 15: mod_base = OTHER; note = 2'-O-methylguanosine-3'-phosphate
  modified_base 16: mod_base = OTHER; note = 2'-fluoroguanosine-3'-phosphate
  modified_base 17: mod_base = OTHER; note = 2'-O-methyluridine-3'-phosphate
  modified_base 18: mod_base = OTHER; note = 2'-fluorocytidine-3'-phosphate
  modified_base 19: mod_base = OTHER; note = 2'-O-methyluridine-3'-phosphate
  modified_base 20: mod_base = OTHER; note = 2'-O-methyladenosine-3'-phosphate
  modified_base 21: mod_base = OTHER; note = 2'-O-methylguanosine-3'-phosphorothioate
  modified_base 22: mod_base = OTHER; note = 2'-O-methyladenosine-3'-phosphorothioate
  modified_base 23: mod_base = OTHER; note = 2'-O-methyladenosine
acaaaagcaaaacaggtctagaa

SEQ ID NO: 1876 - RNA, 21 nt, synthetic construct
  source 1..21: mol_type = other RNA
  modified_base 1: mod_base = OTHER; note = 2'-O-methylcytidine-3'-phosphorothioate
  modified_base 2: mod_base = OTHER; note = 2'-O-methylcytidine-3'-phosphorothioate
  modified_base 3: mod_base = OTHER; note = 2'-O-methyluridine-3'-phosphate
  modified_base 4: mod_base = OTHER; note = 2'-O-methylcytidine-3'-phosphate
  modified_base 5: mod_base = OTHER; note = 2'-O-methyladenosine-3'-phosphate
  modified_base 6: mod_base = OTHER; note = 2'-O-methylcytidine-3'-phosphate
  modified_base 7: mod_base = OTHER; note = 2'-fluorocytidine-3'-phosphate
  modified_base 8: mod_base = OTHER; note = 2'-O-methyladenosine-3'-phosphate
  modified_base 9: mod_base = OTHER; note = 2'-fluoroadenosine-3'-phosphate
  modified_base 10: mod_base = OTHER; note = 2'-fluoroguanosine-3'-phosphate
  modified_base 11: mod_base = OTHER; note = 2'-fluoroadenosine-3'-phosphate
  modified_base 12: mod_base = OTHER; note = 2'-O-methyluridine-3'-phosphate
  modified_base 13: mod_base = OTHER; note = 2'-O-methylcytidine-3'-phosphate
  modified_base 14: mod_base = OTHER; note = 2'-O-methylcytidine-3'-phosphate
  modified_base 15: mod_base = OTHER; note = 2'-O-methyluridine-3'-phosphate
  modified_base 16: mod_base = OTHER; note = 2'-O-methylguanosine-3'-phosphate
  modified_base 17: mod_base = OTHER; note = 2'-O-methylcytidine-3'-phosphate
  modified_base 18: mod_base = OTHER; note = 2'-O-methyladenosine-3'-phosphate
  modified_base 19: mod_base = OTHER; note = 2'-O-methyluridine-3'-phosphate
  modified_base 20: mod_base = OTHER; note = 2'-O-methylguanosine-3'-phosphate
  modified_base 21: mod_base = OTHER; note = 2'-O-methyluridine
cctcaccaagatcctgcatgt

SEQ ID NO: 1877 - RNA, 23 nt, synthetic construct
  source 1..23: mol_type = other RNA
  modified_base 1: mod_base = OTHER; note = 2'-O-methyladenosine-3'-phosphorothioate
  modified_base 2: mod_base = OTHER; note = 2'-fluorocytidine-3'-phosphorothioate
  modified_base 3: mod_base = OTHER; note = 2'-O-methyladenosine-3'-phosphate
  modified_base 4: mod_base = OTHER; note = 2'-O-methyluridine-3'-phosphate
  modified_base 5: mod_base = OTHER; note = 2'-O-methylguanosine-3'-phosphate
  modified_base 6: mod_base = OTHER; note = 2'-O-methylcytidine-3'-phosphate
  modified_base 7: mod_base = OTHER; note = 2'-fluoroadenosine-3'-phosphate
  modified_base 8: mod_base = OTHER; note = 2'-O-methylguanosine-3'-phosphate
  modified_base 9: mod_base = OTHER; note = 2'-O-methylguanosine-3'-phosphate
  modified_base 10: mod_base = OTHER; note = 2'-O-methyladenosine-3'-phosphate
  modified_base 11: mod_base = OTHER; note = 2'-O-methyluridine-3'-phosphate
  modified_base 12: mod_base = OTHER; note = 2'-fluorocytidine-3'-phosphate
  modified_base 13: mod_base = OTHER; note = 2'-O-methyluridine-3'-phosphate
  modified_base 14: mod_base = OTHER; note = 2'-fluorouridine-3'-phosphate
  modified_base 15: mod_base = OTHER; note = 2'-O-methylguanosine-3'-phosphate
  modified_base 16: mod_base = OTHER; note = 2'-fluoroguanosine-3'-phosphate
  modified_base 17: mod_base = OTHER; note = 2'-O-methyluridine-3'-phosphate
  modified_base 18: mod_base = OTHER; note = 2'-O-methylguanosine-3'-phosphate
  modified_base 19: mod_base = OTHER; note = 2'-O-methyladenosine-3'-phosphate
  modified_base 20: mod_base = OTHER; note = 2'-O-methylguanosine-3'-phosphate
  modified_base 21: mod_base = OTHER; note = 2'-O-methylguanosine-3'-phosphorothioate
  modified_base 22: mod_base = OTHER; note = 2'-O-methyluridine-3'-phosphorothioate
  modified_base 23: mod_base = OTHER; note = 2'-O-methyladenosine
acatgcaggatcttggtgaggta

SEQ ID NO: 1878 - RNA, 21 nt, synthetic construct
  source 1..21: mol_type = other RNA
  modified_base 1: mod_base = OTHER; note = 2'-O-methylcytidine-3'-phosphorothioate
  modified_base 2: mod_base = OTHER; note = 2'-O-methyladenosine-3'-phosphorothioate
  modified_base 3: mod_base = OTHER; note = 2'-O-methylcytidine-3'-phosphate
  modified_base 4: mod_base = OTHER; note = 2'-O-methylcytidine-3'-phosphate
  modified_base 5: mod_base = OTHER; note = 2'-O-methyladenosine-3'-phosphate
  modified_base 6: mod_base = OTHER; note = 2'-O-methyladenosine-3'-phosphate
  modified_base 7: mod_base = OTHER; note = 2'-fluoroguanosine-3'-phosphate
  modified_base 8: mod_base = OTHER; note = 2'-O-methyladenosine-3'-phosphate
  modified_base 9: mod_base = OTHER; note = 2'-fluorouridine-3'-phosphate
  modified_base 10: mod_base = OTHER; note = 2'-fluorocytidine-3'-phosphate
  modified_base 11: mod_base = OTHER; note = 2'-fluorocytidine-3'-phosphate
  modified_base 12: mod_base = OTHER; note = 2'-O-methyluridine-3'-phosphate
  modified_base 13: mod_base = OTHER; note = 2'-O-methylguanosine-3'-phosphate
  modified_base 14: mod_base = OTHER; note = 2'-O-methylcytidine-3'-phosphate
  modified_base 15: mod_base = OTHER; note = 2'-O-methyladenosine-3'-phosphate
  modified_base 16: mod_base = OTHER; note = 2'-O-methyluridine-3'-phosphate
  modified_base 17: mod_base = OTHER; note = 2'-O-methylguanosine-3'-phosphate
  modified_base 18: mod_base = OTHER; note = 2'-O-methyluridine-3'-phosphate
  modified_base 19: mod_base = OTHER; note = 2'-O-methylcytidine-3'-phosphate
  modified_base 20: mod_base = OTHER; note = 2'-O-methyluridine-3'-phosphate
  modified_base 21: mod_base = OTHER; note = 2'-O-methyluridine
caccaagatcctgcatgtctt

SEQ ID NO: 1879 - RNA, 23 nt, synthetic construct
  source 1..23: mol_type = other RNA
  modified_base 1: mod_base = OTHER; note = 2'-O-methyladenosine-3'-phosphorothioate
  modified_base 2: mod_base = OTHER; note = 2'-fluoroadenosine-3'-phosphorothioate
  modified_base 3: mod_base = OTHER; note = 2'-O-methylguanosine-3'-phosphate
  modified_base 4: mod_base = OTHER; note = 2'-O-methyladenosine-3'-phosphate
  modified_base 5: mod_base = OTHER; note = 2'-O-methylcytidine-3'-phosphate
  modified_base 6: mod_base = OTHER; note = 2'-O-methyladenosine-3'-phosphate
  modified_base 7: mod_base = OTHER; note = 2'-fluorouridine-3'-phosphate
  modified_base 8: mod_base = OTHER; note = 2'-O-methylguanosine-3'-phosphate
  modified_base 9: mod_base = OTHER; note = 2'-O-methylcytidine-3'-phosphate
  modified_base 10: mod_base = OTHER; note = 2'-O-methyladenosine-3'-phosphate
  modified_base 11: mod_base = OTHER; note = 2'-O-methylguanosine-3'-phosphate
  modified_base 12: mod_base = OTHER; note = 2'-fluoroguanosine-3'-phosphate
  modified_base 13: mod_base = OTHER; note = 2'-O-methyladenosine-3'-phosphate
  modified_base 14: mod_base = OTHER; note = 2'-fluorouridine-3'-phosphate
  modified_base 15: mod_base = OTHER; note = 2'-O-methylcytidine-3'-phosphate
  modified_base 16: mod_base = OTHER; note = 2'-fluorouridine-3'-phosphate
  modified_base 17: mod_base = OTHER; note = 2'-O-methyluridine-3'-phosphate
  modified_base 18: mod_base = OTHER; note = 2'-O-methylguanosine-3'-phosphate
  modified_base 19: mod_base = OTHER; note = 2'-O-methylguanosine-3'-phosphate
  modified_base 20: mod_base = OTHER; note = 2'-O-methyluridine-3'-phosphate
  modified_base 21: mod_base = OTHER; note = 2'-O-methylguanosine-3'-phosphorothioate
  modified_base 22: mod_base = OTHER; note = 2'-O-methyladenosine-3'-phosphorothioate
  modified_base 23: mod_base = OTHER; note = 2'-O-methylguanosine
aagacatgcaggatcttggtgag

SEQ ID NO: 1880 - RNA, 21 nt, synthetic construct
  source 1..21: mol_type = other RNA
  modified_base 1: mod_base = OTHER; note = 2'-O-methylcytidine-3'-phosphorothioate
  modified_base 2: mod_base = OTHER; note = 2'-O-methyladenosine-3'-phosphorothioate
  modified_base 3: mod_base = OTHER; note = 2'-O-methyladenosine-3'-phosphate
  modified_base 4: mod_base = OTHER; note = 2'-O-methylguanosine-3'-phosphate
  modified_base 5: mod_base = OTHER; note = 2'-O-methyladenosine-3'-phosphate
  modified_base 6: mod_base = OTHER; note = 2'-O-methyluridine-3'-phosphate
  modified_base 7: mod_base = OTHER; note = 2'-fluorocytidine-3'-phosphate
  modified_base 8: mod_base = OTHER; note = 2'-O-methylcytidine-3'-phosphate
  modified_base 9: mod_base = OTHER; note = 2'-fluorouridine-3'-phosphate
  modified_base 10: mod_base = OTHER; note = 2'-fluoroguanosine-3'-phosphate
  modified_base 11: mod_base = OTHER; note = 2'-fluorocytidine-3'-phosphate
  modified_base 12: mod_base = OTHER; note = 2'-O-methyladenosine-3'-phosphate
  modified_base 13: mod_base = OTHER; note = 2'-O-methyluridine-3'-phosphate
  modified_base 14: mod_base = OTHER; note = 2'-O-methylguanosine-3'-phosphate
  modified_base 15: mod_base = OTHER; note = 2'-O-methyluridine-3'-phosphate
  modified_base 16: mod_base = OTHER; note = 2'-O-methylcytidine-3'-phosphate
  modified_base 17: mod_base = OTHER; note = 2'-O-methyluridine-3'-phosphate
  modified_base 18: mod_base = OTHER; note = 2'-O-methyluridine-3'-phosphate
  modified_base 19: mod_base = OTHER; note = 2'-O-methylcytidine-3'-phosphate
  modified_base 20: mod_base = OTHER; note = 2'-O-methylcytidine-3'-phosphate
  modified_base 21: mod_base = OTHER; note = 2'-O-methyladenosine
caagatcctgcatgtcttcca

SEQ ID NO: 1881 - RNA, 23 nt, synthetic construct
  source 1..23: mol_type = other RNA
  modified_base 1: mod_base = OTHER; note = 2'-O-methyluridine-3'-phosphorothioate
  modified_base 2: mod_base = OTHER; note = 2'-fluoroguanosine-3'-phosphorothioate
  modified_base 3: mod_base = OTHER; note = 2'-O-methylguanosine-3'-phosphate
  modified_base 4: mod_base = OTHER; note = 2'-O-methyladenosine-3'-phosphate
  modified_base 5: mod_base = OTHER; note = 2'-O-methyladenosine-3'-phosphate
  modified_base 6: mod_base = OTHER; note = 2'-O-methylguanosine-3'-phosphate
  modified_base 7: mod_base = OTHER; note = 2'-fluoroadenosine-3'-phosphate
  modified_base 8: mod_base = OTHER; note = 2'-O-methylcytidine-3'-phosphate
  modified_base 9: mod_base = OTHER; note = 2'-O-methyladenosine-3'-phosphate
  modified_base 10: mod_base = OTHER; note = 2'-O-methyluridine-3'-phosphate
  modified_base 11: mod_base = OTHER; note = 2'-O-methylguanosine-3'-phosphate
  modified_base 12: mod_base = OTHER; note = 2'-fluorocytidine-3'-phosphate
  modified_base 13: mod_base = OTHER; note = 2'-O-methyladenosine-3'-phosphate
  modified_base 14: mod_base = OTHER; note = 2'-fluoroguanosine-3'-phosphate
  modified_base 15: mod_base = OTHER; note = 2'-O-methylguanosine-3'-phosphate
  modified_base 16: mod_base = OTHER; note = 2'-fluoroadenosine-3'-phosphate
  modified_base 17: mod_base = OTHER; note = 2'-O-methyluridine-3'-phosphate
  modified_base 18: mod_base = OTHER; note = 2'-O-methylcytidine-3'-phosphate
  modified_base 19: mod_base = OTHER; note = 2'-O-methyluridine-3'-phosphate
  modified_base 20: mod_base = OTHER; note = 2'-O-methyluridine-3'-phosphate
  modified_base 21: mod_base = OTHER; note = 2'-O-methylguanosine-3'-phosphorothioate
  modified_base 22: mod_base = OTHER; note = 2'-O-methylguanosine-3'-phosphorothioate
  modified_base 23: mod_base = OTHER; note = 2'-O-methyluridine
tggaagacatgcaggatcttggt

SEQ ID NO: 1882 - RNA, 21 nt, synthetic construct
  source 1..21: mol_type = other RNA
  modified_base 1: mod_base = OTHER; note = 2'-O-methyluridine-3'-phosphorothioate
  modified_base 2: mod_base = OTHER; note = 2'-O-methylcytidine-3'-phosphorothioate
  modified_base 3: mod_base = OTHER; note = 2'-O-methylcytidine-3'-phosphate
  modified_base 4: mod_base = OTHER; note = 2'-O-methyluridine-3'-phosphate
  modified_base 5: mod_base = OTHER; note = 2'-O-methylguanosine-3'-phosphate
  modified_base 6: mod_base = OTHER; note = 2'-O-methylguanosine-3'-phosphate
  modified_base 7: mod_base = OTHER; note = 2'-fluorocytidine-3'-phosphate
  modified_base 8: mod_base = OTHER; note = 2'-O-methyluridine-3'-phosphate
  modified_base 9: mod_base = OTHER; note = 2'-fluorouridine-3'-phosphate
  modified_base 10: mod_base = OTHER; note = 2'-fluorocytidine-3'-phosphate
  modified_base 11: mod_base = OTHER; note = 2'-fluorocytidine-3'-phosphate
  modified_base 12: mod_base = OTHER; note = 2'-O-methyluridine-3'-phosphate
  modified_base 13: mod_base = OTHER; note = 2'-O-methylguanosine-3'-phosphate
  modified_base 14: mod_base = OTHER; note = 2'-O-methylguanosine-3'-phosphate
  modified_base 15: mod_base = OTHER; note = 2'-O-methyluridine-3'-phosphate
  modified_base 16: mod_base = OTHER; note = 2'-O-methylguanosine-3'-phosphate
  modified_base 17: mod_base = OTHER; note = 2'-O-methyladenosine-3'-phosphate
  modified_base 18: mod_base = OTHER; note = 2'-O-methyladenosine-3'-phosphate
  modified_base 19: mod_base = OTHER; note = 2'-O-methylguanosine-3'-phosphate
  modified_base 20: mod_base = OTHER; note = 2'-O-methyladenosine-3'-phosphate
  modified_base 21: mod_base = OTHER; note = 2'-O-methyluridine
tcctggcttcctggtgaagat

SEQ ID NO: 1883 - RNA, 23 nt, synthetic construct
  source 1..23: mol_type = other RNA
  modified_base 1: mod_base = OTHER; note = 2'-O-methyladenosine-3'-phosphorothioate
  modified_base 2: mod_base = OTHER; note = 2'-fluorouridine-3'-phosphorothioate
  modified_base 3: mod_base = OTHER; note = 2'-O-methylcytidine-3'-phosphate
  modified_base 4: mod_base = OTHER; note = 2'-O-methyluridine-3'-phosphate
  modified_base 5: mod_base = OTHER; note = 2'-O-methyluridine-3'-phosphate
  modified_base 6: mod_base = OTHER; note = 2'-O-methylcytidine-3'-phosphate
  modified_base 7: mod_base = OTHER; note = 2'-fluoroadenosine-3'-phosphate
  modified_base 8: mod_base = OTHER; note = 2'-O-methylcytidine-3'-phosphate
  modified_base 9: mod_base = OTHER; note = 2'-O-methylcytidine-3'-phosphate
  modified_base 10: mod_base = OTHER; note = 2'-O-methyladenosine-3'-phosphate
  modified_base 11: mod_base = OTHER; note = 2'-O-methylguanosine-3'-phosphate
  modified_base 12: mod_base = OTHER; note = 2'-fluoroguanosine-3'-phosphate
  modified_base 13: mod_base = OTHER; note = 2'-O-methyladenosine-3'-phosphate
  modified_base 14: mod_base = OTHER; note = 2'-fluoroadenosine-3'-phosphate
  modified_base 15: mod_base = OTHER; note = 2'-O-methylguanosine-3'-phosphate
  modified_base 16: mod_base = OTHER; note = 2'-fluorocytidine-3'-phosphate
  modified_base 17: mod_base = OTHER; note = 2'-O-methylcytidine-3'-phosphate
  modified_base 18: mod_base = OTHER; note = 2'-O-methyladenosine-3'-phosphate
  modified_base 19: mod_base = OTHER; note = 2'-O-methylguanosine-3'-phosphate
  modified_base 20: mod_base = OTHER; note = 2'-O-methylguanosine-3'-phosphate
  modified_base 21: mod_base = OTHER; note = 2'-O-methyladenosine-3'-phosphorothioate
  modified_base 22: mod_base = OTHER; note = 2'-O-methyladenosine-3'-phosphorothioate
  modified_base 23: mod_base = OTHER; note = 2'-O-methylguanosine
atcttcaccaggaagccaggaag

SEQ ID NO: 1884 - RNA, 21 nt, synthetic construct
  source 1..21: mol_type = other RNA
  modified_base 1: mod_base = OTHER; note = 2'-O-methylcytidine-3'-phosphorothioate
  modified_base 2: mod_base = OTHER; note = 2'-O-methyluridine-3'-phosphorothioate
  modified_base 3: mod_base = OTHER; note = 2'-O-methylguanosine-3'-phosphate
  modified_base 4: mod_base = OTHER; note = 2'-O-methylguanosine-3'-phosphate
  modified_base 5: mod_base = OTHER; note = 2'-O-methylcytidine-3'-phosphate
  modified_base 6: mod_base = OTHER; note = 2'-O-methyluridine-3'-phosphate
  modified_base 7: mod_base = OTHER; note = 2'-fluorouridine-3'-phosphate
  modified_base 8: mod_base = OTHER; note = 2'-O-methylcytidine-3'-phosphate
  modified_base 9: mod_base = OTHER; note = 2'-fluorocytidine-3'-phosphate
  modified_base 10: mod_base = OTHER; note = 2'-fluorouridine-3'-phosphate
  modified_base 11: mod_base = OTHER; note = 2'-fluoroguanosine-3'-phosphate
  modified_base 12: mod_base = OTHER; note = 2'-O-methylguanosine-3'-phosphate
  modified_base 13: mod_base = OTHER; note = 2'-O-methyluridine-3'-phosphate
  modified_base 14: mod_base = OTHER; note = 2'-O-methylguanosine-3'-phosphate
  modified_base 15: mod_base = OTHER; note = 2'-O-methyladenosine-3'-phosphate
  modified_base 16: mod_base = OTHER; note = 2'-O-methyladenosine-3'-phosphate
  modified_base 17: mod_base = OTHER; note = 2'-O-methylguanosine-3'-phosphate
  modified_base 18: mod_base = OTHER; note = 2'-O-methyladenosine-3'-phosphate
  modified_base 19: mod_base = OTHER; note = 2'-O-methyluridine-3'-phosphate
  modified_base 20: mod_base = OTHER; note = 2'-O-methylguanosine-3'-phosphate
  modified_base 21: mod_base = OTHER; note = 2'-O-methyladenosine
ctggcttcctggtgaagatga

SEQ ID NO: 1885 - RNA, 23 nt, synthetic construct
  source 1..23: mol_type = other RNA
  modified_base 1: mod_base = OTHER; note = 2'-O-methyluridine-3'-phosphorothioate
  modified_base 2: mod_base = OTHER; note = 2'-fluorocytidine-3'-phosphorothioate
  modified_base 3: mod_base = OTHER; note = 2'-O-methyladenosine-3'-phosphate
  modified_base 4: mod_base = OTHER; note = 2'-O-methyluridine-3'-phosphate
  modified_base 5: mod_base = OTHER; note = 2'-O-methylcytidine-3'-phosphate
  modified_base 6: mod_base = OTHER; note = 2'-O-methyluridine-3'-phosphate
  modified_base 7: mod_base = OTHER; note = 2'-fluorouridine-3'-phosphate
  modified_base 8: mod_base = OTHER; note = 2'-O-methylcytidine-3'-phosphate
  modified_base 9: mod_base = OTHER; note = 2'-O-methyladenosine-3'-phosphate
  modified_base 10: mod_base = OTHER; note = 2'-O-methylcytidine-3'-phosphate
  modified_base 11: mod_base = OTHER; note = 2'-O-methylcytidine-3'-phosphate
  modified_base 12: mod_base = OTHER; note = 2'-fluoroadenosine-3'-phosphate
  modified_base 13: mod_base = OTHER; note = 2'-O-methylguanosine-3'-phosphate
  modified_base 14: mod_base = OTHER; note = 2'-fluoroguanosine-3'-phosphate
  modified_base 15: mod_base = OTHER; note = 2'-O-methyladenosine-3'-phosphate
  modified_base 16: mod_base = OTHER; note = 2'-fluoroadenosine-3'-phosphate
  modified_base 17: mod_base = OTHER; note = 2'-O-methylguanosine-3'-phosphate
  modified_base 18: mod_base = OTHER; note = 2'-O-methylcytidine-3'-phosphate
  modified_base 19: mod_base = OTHER; note = 2'-O-methylcytidine-3'-phosphate
  modified_base 20: mod_base = OTHER; note = 2'-O-methyladenosine-3'-phosphate
  modified_base 21: mod_base = OTHER; note = 2'-O-methylguanosine-3'-phosphorothioate
  modified_base 22: mod_base = OTHER; note = 2'-O-methylguanosine-3'-phosphorothioate
  modified_base 23: mod_base = OTHER; note = 2'-O-methyladenosine
tcatcttcaccaggaagccagga

SEQ ID NO: 1886 - RNA, 21 nt, synthetic construct
  source 1..21: mol_type = other RNA
  modified_base 1: mod_base = OTHER; note = 2'-O-methylguanosine-3'-phosphorothioate
  modified_base 2: mod_base = OTHER; note = 2'-O-methylguanosine-3'-phosphorothioate
  modified_base 3: mod_base = OTHER; note = 2'-O-methylcytidine-3'-phosphate
  modified_base 4: mod_base = OTHER; note = 2'-O-methyluridine-3'-phosphate
  modified_base 5: mod_base = OTHER; note = 2'-O-methyluridine-3'-phosphate
  modified_base 6: mod_base = OTHER; note = 2'-O-methylcytidine-3'-phosphate
  modified_base 7: mod_base = OTHER; note = 2'-fluorocytidine-3'-phosphate
  modified_base 8: mod_base = OTHER; note = 2'-O-methyluridine-3'-phosphate
  modified_base 9: mod_base = OTHER; note = 2'-fluoroguanosine-3'-phosphate
  modified_base 10: mod_base = OTHER; note = 2'-fluoroguanosine-3'-phosphate
  modified_base 11: mod_base = OTHER; note = 2'-fluorouridine-3'-phosphate
  modified_base 12: mod_base = OTHER; note = 2'-O-methylguanosine-3'-phosphate
  modified_base 13: mod_base = OTHER; note = 2'-O-methyladenosine-3'-phosphate
  modified_base 14: mod_base = OTHER; note = 2'-O-methyladenosine-3'-phosphate
  modified_base 15: mod_base = OTHER; note = 2'-O-methylguanosine-3'-phosphate
  modified_base 16: mod_base = OTHER; note = 2'-O-methyladenosine-3'-phosphate
  modified_base 17: mod_base = OTHER; note = 2'-O-methyluridine-3'-phosphate
  modified_base 18: mod_base = OTHER; note = 2'-O-methylguanosine-3'-phosphate
  modified_base 19: mod_base = OTHER; note = 2'-O-methyladenosine-3'-phosphate
  modified_base 20: mod_base = OTHER; note = 2'-O-methylguanosine-3'-phosphate
  modified_base 21: mod_base = OTHER; note = 2'-O-methyluridine
ggcttcctggtgaagatgagt

SEQ ID NO: 1887 - RNA, 23 nt, synthetic construct
  source 1..23: mol_type = other RNA
  modified_base 1: mod_base = OTHER; note = 2'-O-methyladenosine-3'-phosphorothioate
  modified_base 2: mod_base = OTHER; note = 2'-fluorocytidine-3'-phosphorothioate
  modified_base 3: mod_base = OTHER; note = 2'-O-methyluridine-3'-phosphate
  modified_base 4: mod_base = OTHER; note = 2'-O-methylcytidine-3'-phosphate
  modified_base 5: mod_base = OTHER; note = 2'-O-methyladenosine-3'-phosphate
  modified_base 6: mod_base = OTHER; note = 2'-O-methyluridine-3'-phosphate
  modified_base 7: mod_base = OTHER; note = 2'-fluorocytidine-3'-phosphate
  modified_base 8: mod_base = OTHER; note = 2'-O-methyluridine-3'-phosphate
  modified_base 9: mod_base = OTHER; note = 2'-O-methyluridine-3'-phosphate
  modified_base 10: mod_base = OTHER; note = 2'-O-methylcytidine-3'-phosphate
  modified_base 11: mod_base = OTHER; note = 2'-O-methyladenosine-3'-phosphate
  modified_base 12: mod_base = OTHER; note = 2'-fluorocytidine-3'-phosphate
  modified_base 13: mod_base = OTHER; note = 2'-O-methylcytidine-3'-phosphate
  modified_base 14: mod_base = OTHER; note = 2'-fluoroadenosine-3'-phosphate
  modified_base 15: mod_base = OTHER; note = 2'-O-methylguanosine-3'-phosphate
  modified_base 16: mod_base = OTHER; note = 2'-fluoroguanosine-3'-phosphate
  modified_base 17: mod_base = OTHER; note = 2'-O-methyladenosine-3'-phosphate
  modified_base 18: mod_base = OTHER; note = 2'-O-methyladenosine-3'-phosphate
  modified_base 19: mod_base = OTHER; note = 2'-O-methylguanosine-3'-phosphate
  modified_base 20: mod_base = OTHER; note = 2'-O-methylcytidine-3'-phosphate
  modified_base 21: mod_base = OTHER; note = 2'-O-methylcytidine-3'-phosphorothioate
  modified_base 22: mod_base = OTHER; note = 2'-O-methyladenosine-3'-phosphorothioate
  modified_base 23: mod_base = OTHER; note = 2'-O-methylguanosine
actcatcttcaccaggaagccag

SEQ ID NO: 1888 - RNA, 21 nt, synthetic construct
  source 1..21: mol_type = other RNA
  modified_base 1: mod_base = OTHER; note = 2'-O-methylguanosine-3'-phosphorothioate
  modified_base 2: mod_base = OTHER; note = 2'-O-methylcytidine-3'-phosphorothioate
  modified_base 3: mod_base = OTHER; note = 2'-O-methyluridine-3'-phosphate
  modified_base 4: mod_base = OTHER; note = 2'-O-methyluridine-3'-phosphate
  modified_base 5: mod_base = OTHER; note = 2'-O-methylcytidine-3'-phosphate
  modified_base 6: mod_base = OTHER; note = 2'-O-methylcytidine-3'-phosphate
  modified_base 7: mod_base = OTHER; note = 2'-fluorouridine-3'-phosphate
  modified_base 8: mod_base = OTHER; note = 2'-O-methylguanosine-3'-phosphate
  modified_base 9: mod_base = OTHER; note = 2'-fluoroguanosine-3'-phosphate
  modified_base 10: mod_base = OTHER; note = 2'-fluorouridine-3'-phosphate
  modified_base 11: mod_base = OTHER; note = 2'-fluoroguanosine-3'-phosphate
  modified_base 12: mod_base = OTHER; note = 2'-O-methyladenosine-3'-phosphate
  modified_base 13: mod_base = OTHER; note = 2'-O-methyladenosine-3'-phosphate
  modified_base 14: mod_base = OTHER; note = 2'-O-methylguanosine-3'-phosphate
  modified_base 15: mod_base = OTHER; note = 2'-O-methyladenosine-3'-phosphate
  modified_base 16: mod_base = OTHER; note = 2'-O-methyluridine-3'-phosphate
  modified_base 17: mod_base = OTHER; note = 2'-O-methylguanosine-3'-phosphate
  modified_base 18: mod_base = OTHER; note = 2'-O-methyladenosine-3'-phosphate
  modified_base 19: mod_base = OTHER; note = 2'-O-methylguanosine-3'-phosphate
  modified_base 20: mod_base = OTHER; note = 2'-O-methyluridine-3'-phosphate
  modified_base 21: mod_base = OTHER; note = 2'-O-methylguanosine
gcttcctggtgaagatgagtg

SEQ ID NO: 1889 - RNA, 23 nt, synthetic construct
  source 1..23: mol_type = other RNA
  modified_base 1: mod_base = OTHER; note = 2'-O-methylcytidine-3'-phosphorothioate
  modified_base 2: mod_base = OTHER; note = 2'-fluoroadenosine-3'-phosphorothioate
  modified_base 3: mod_base = OTHER; note = 2'-O-methylcytidine-3'-phosphate
  modified_base 4: mod_base = OTHER; note = 2'-O-methyluridine-3'-phosphate
  modified_base 5: mod_base = OTHER; note = 2'-O-methylcytidine-3'-phosphate
  modified_base 6: mod_base = OTHER; note = 2'-O-methyladenosine-3'-phosphate
  modified_base 7: mod_base = OTHER; note = 2'-fluorouridine-3'-phosphate
  modified_base 8: mod_base = OTHER; note = 2'-O-methylcytidine-3'-phosphate
  modified_base 9: mod_base = OTHER; note = 2'-O-methyluridine-3'-phosphate
  modified_base 10: mod_base = OTHER; note = 2'-O-methyluridine-3'-phosphate
  modified_base 11: mod_base = OTHER; note = 2'-O-methylcytidine-3'-phosphate
  modified_base 12: mod_base = OTHER; note = 2'-fluoroadenosine-3'-phosphate
  modified_base 13: mod_base = OTHER; note = 2'-O-methylcytidine-3'-phosphate
  modified_base 14: mod_base = OTHER; note = 2'-fluorocytidine-3'-phosphate
  modified_base 15: mod_base = OTHER; note = 2'-O-methyladenosine-3'-phosphate
  modified_base 16: mod_base = OTHER; note = 2'-fluoroguanosine-3'-phosphate
  modified_base 17: mod_base = OTHER; note = 2'-O-methylguanosine-3'-phosphate
  modified_base 18: mod_base = OTHER; note = 2'-O-methyladenosine-3'-phosphate
  modified_base 19: mod_base = OTHER; note = 2'-O-methyladenosine-3'-phosphate
  modified_base 20: mod_base = OTHER; note = 2'-O-methylguanosine-3'-phosphate
  modified_base 21: mod_base = OTHER; note = 2'-O-methylcytidine-3'-phosphorothioate
  modified_base 22: mod_base = OTHER; note = 2'-O-methylcytidine-3'-phosphorothioate
  modified_base 23: mod_base = OTHER; note = 2'-O-methyladenosine
cactcatcttcaccaggaagcca

SEQ ID NO: 1890 - RNA, 21 nt, synthetic construct
  source 1..21: mol_type = other RNA
  modified_base 1: mod_base = OTHER; note = 2'-O-methyluridine-3'-phosphorothioate
  modified_base 2: mod_base = OTHER; note = 2'-O-methylguanosine-3'-phosphorothioate
  modified_base 3: mod_base = OTHER; note = 2'-O-methylguanosine-3'-phosphate
  modified_base 4: mod_base = OTHER; note = 2'-O-methyladenosine-3'-phosphate
  modified_base 5: mod_base = OTHER; note = 2'-O-methylguanosine-3'-phosphate
  modified_base 6: mod_base = OTHER; note = 2'-O-methylcytidine-3'-phosphate
  modified_base 7: mod_base = OTHER; note = 2'-fluorouridine-3'-phosphate
  modified_base 8: mod_base = OTHER; note = 2'-O-methylguanosine-3'-phosphate
  modified_base 9: mod_base = OTHER; note = 2'-fluoroguanosine-3'-phosphate
  modified_base 10: mod_base = OTHER; note = 2'-fluorocytidine-3'-phosphate
  modified_base 11: mod_base = OTHER; note = 2'-fluorocytidine-3'-phosphate
  modified_base 12: mod_base = OTHER; note = 2'-O-methyluridine-3'-phosphate
  modified_base 13: mod_base = OTHER; note = 2'-O-methyluridine-3'-phosphate
  modified_base 14: mod_base = OTHER; note = 2'-O-methylguanosine-3'-phosphate
  modified_base 15: mod_base = OTHER; note = 2'-O-methyladenosine-3'-phosphate
  modified_base 16: mod_base = OTHER; note = 2'-O-methyladenosine-3'-phosphate
  modified_base 17: mod_base = OTHER; note = 2'-O-methylguanosine-3'-phosphate
  modified_base 18: mod_base = OTHER; note = 2'-O-methyluridine-3'-phosphate
  modified_base 19: mod_base = OTHER; note = 2'-O-methyluridine-3'-phosphate
  modified_base 20: mod_base = OTHER; note = 2'-O-methylguanosine-3'-phosphate
  modified_base 21: mod_base = OTHER; note = 2'-O-methylcytidine
tggagctggccttgaagttgc

SEQ ID NO: 1891 - RNA, 23 nt, synthetic construct
  source 1..23: mol_type = other RNA
  modified_base 1: mod_base = OTHER; note = 2'-O-methylguanosine-3'-phosphorothioate
  modified_base 2: mod_base = OTHER; note = 2'-fluorocytidine-3'-phosphorothioate
  modified_base 3: mod_base = OTHER; note = 2'-O-methyladenosine-3'-phosphate
  modified_base 4: mod_base = OTHER; note = 2'-O-methyladenosine-3'-phosphate
  modified_base 5: mod_base = OTHER; note = 2'-O-methylcytidine-3'-phosphate
  modified_base 6: mod_base = OTHER; note = 2'-O-methyluridine-3'-phosphate
  modified_base 7: mod_base = OTHER; note = 2'-fluorouridine-3'-phosphate
  modified_base 8: mod_base = OTHER; note = 2'-O-methylcytidine-3'-phosphate
  modified_base 9: mod_base = OTHER; note = 2'-O-methyladenosine-3'-phosphate
  modified_base 10: mod_base = OTHER; note = 2'-O-methyladenosine-3'-phosphate
  modified_base 11: mod_base = OTHER; note = 2'-O-methylguanosine-3'-phosphate
  modified_base 12: mod_base = OTHER; note = 2'-fluoroguanosine-3'-phosphate
  modified_base 13: mod_base = OTHER; note = 2'-O-methylcytidine-3'-phosphate
  modified_base 14: mod_base = OTHER; note = 2'-fluorocytidine-3'-phosphate
  modified_base 15: mod_base = OTHER; note = 2'-O-methyladenosine-3'-phosphate
  modified_base 16: mod_base = OTHER; note = 2'-fluoroguanosine-3'-phosphate
  modified_base 17: mod_base = OTHER; note = 2'-O-methylcytidine-3'-phosphate
  modified_base 18: mod_base = OTHER; note = 2'-O-methyluridine-3'-phosphate
  modified_base 19: mod_base = OTHER; note = 2'-O-methylcytidine-3'-phosphate
  modified_base 20: mod_base = OTHER; note = 2'-O-methylcytidine-3'-phosphate
  modified_base 21: mod_base = OTHER; note = 2'-O-methyladenosine-3'-phosphorothioate
  modified_base 22: mod_base = OTHER; note = 2'-O-methylguanosine-3'-phosphorothioate
  modified_base 23: mod_base = OTHER; note = 2'-O-methylcytidine
gcaacttcaaggccagctccagc

SEQ ID NO: 1892 - RNA, 21 nt, synthetic construct
  source 1..21: mol_type = other RNA
  modified_base 1: mod_base = OTHER; note = 2'-O-methyladenosine-3'-phosphorothioate
  modified_base 2: mod_base = OTHER; note = 2'-O-methylguanosine-3'-phosphorothioate
  modified_base 3: mod_base = OTHER; note = 2'-O-methyluridine-3'-phosphate
  modified_base 4: mod_base = OTHER; note = 2'-O-methyluridine-3'-phosphate
  modified_base 5: mod_base = OTHER; note = 2'-O-methylguanosine-3'-phosphate
  modified_base 6: mod_base = OTHER; note = 2'-O-methylcytidine-3'-phosphate
  modified_base 7: mod_base = OTHER; note = 2'-fluorocytidine-3'-phosphate
  modified_base 8: mod_base = OTHER; note = 2'-O-methylcytidine-3'-phosphate
  modified_base 9: mod_base = OTHER; note = 2'-fluorocytidine-3'-phosphate
  modified_base 10: mod_base = OTHER; note = 2'-fluoroadenosine-3'-phosphate
  modified_base 11: mod_base = OTHER; note = 2'-fluorouridine-3'-phosphate
  modified_base 12: mod_base = OTHER; note = 2'-O-methylguanosine-3'-phosphate
  modified_base 13: mod_base = OTHER; note = 2'-O-methyluridine-3'-phosphate
  modified_base 14: mod_base = OTHER; note = 2'-O-methylcytidine-3'-phosphate
  modified_base 15: mod_base = OTHER; note = 2'-O-methylguanosine-3'-phosphate
  modified_base 16: mod_base = OTHER; note = 2'-O-methyladenosine-3'-phosphate
  modified_base 17: mod_base = OTHER; note = 2'-O-methylcytidine-3'-phosphate
  modified_base 18: mod_base = OTHER; note = 2'-O-methyluridine-3'-phosphate
  modified_base 19: mod_base = OTHER; note = 2'-O-methyladenosine-3'-phosphate
  modified_base 20: mod_base = OTHER; note = 2'-O-methylcytidine-3'-phosphate
  modified_base 21: mod_base = OTHER; note = 2'-O-methyladenosine
agttgccccatgtcgactaca

SEQ ID NO: 1893 - RNA, 23 nt, synthetic construct
  source 1..23: mol_type = other RNA
  modified_base 1: mod_base = OTHER; note = 2'-O-methyluridine-3'-phosphorothioate
  modified_base 2: mod_base = OTHER; note = 2'-fluoroguanosine-3'-phosphorothioate
  modified_base 3: mod_base = OTHER; note = 2'-O-methyluridine-3'-phosphate
  modified_base 4: mod_base = OTHER; note = 2'-O-methyladenosine-3'-phosphate
  modified_base 5: mod_base = OTHER; note = 2'-O-methylguanosine-3'-phosphate
  modified_base 6: mod_base = OTHER; note = 2'-O-methyluridine-3'-phosphate
  modified_base 7: mod_base = OTHER; note = 2'-fluorocytidine-3'-phosphate
  modified_base 8: mod_base = OTHER; note = 2'-O-methylguanosine-3'-phosphate
  modified_base 9: mod_base = OTHER; note = 2'-O-methyladenosine-3'-phosphate
  modified_base 10: mod_base = OTHER; note = 2'-O-methylcytidine-3'-phosphate
  modified_base 11: mod_base = OTHER; note = 2'-O-methyladenosine-3'-phosphate
  modified_base 12: mod_base = OTHER; note = 2'-fluorouridine-3'-phosphate
  modified_base 13: mod_base = OTHER; note = 2'-O-methylguanosine-3'-phosphate
  modified_base 14: mod_base = OTHER; note = 2'-fluoroguanosine-3'-phosphate
  modified_base 15: mod_base = OTHER; note = 2'-O-methylguanosine-3'-phosphate
  modified_base 16: mod_base = OTHER; note = 2'-fluoroguanosine-3'-phosphate
  modified_base 17: mod_base = OTHER; note = 2'-O-methylcytidine-3'-phosphate
  modified_base 18: mod_base = OTHER; note = 2'-O-methyladenosine-3'-phosphate
  modified_base 19: mod_base = OTHER; note = 2'-O-methyladenosine-3'-phosphate
  modified_base 20: mod_base = OTHER; note = 2'-O-methylcytidine-3'-phosphate
  modified_base 21: mod_base = OTHER; note = 2'-O-methyluridine-3'-phosphorothioate
  modified_base 22: mod_base = OTHER; note = 2'-O-methyluridine-3'-phosphorothioate
  modified_base 23: mod_base = OTHER; note = 2'-O-methylcytidine
tgtagtcgacatggggcaacttc

SEQ ID NO: 1894 - RNA, 21 nt, synthetic construct
  source 1..21: mol_type = other RNA
  modified_base 1: mod_base = OTHER; note = 2'-O-methyluridine-3'-phosphorothioate
  modified_base 2: mod_base = OTHER; note = 2'-O-methylguanosine-3'-phosphorothioate
  modified_base 3: mod_base = OTHER; note = 2'-O-methylcytidine-3'-phosphate
  modified_base 4: mod_base = OTHER; note = 2'-O-methylcytidine-3'-phosphate
  modified_base 5: mod_base = OTHER; note = 2'-O-methylcytidine-3'-phosphate
  modified_base 6: mod_base = OTHER; note = 2'-O-methylcytidine-3'-phosphate
  modified_base 7: mod_base = OTHER; note = 2'-fluoroadenosine-3'-phosphate
  modified_base 8: mod_base = OTHER; note = 2'-O-methyluridine-3'-phosphate
  modified_base 9: mod_base = OTHER; note = 2'-fluoroguanosine-3'-phosphate
  modified_base 10: mod_base = OTHER; note = 2'-fluorouridine-3'-phosphate
  modified_base 11: mod_base = OTHER; note = 2'-fluorocytidine-3'-phosphate
  modified_base 12: mod_base = OTHER; note = 2'-O-methylguanosine-3'-phosphate
  modified_base 13: mod_base = OTHER; note = 2'-O-methyladenosine-3'-phosphate
  modified_base 14: mod_base = OTHER; note = 2'-O-methylcytidine-3'-phosphate
  modified_base 15: mod_base = OTHER; note = 2'-O-methyluridine-3'-phosphate
  modified_base 16: mod_base = OTHER; note = 2'-O-methyladenosine-3'-phosphate
  modified_base 17: mod_base = OTHER; note = 2'-O-methylcytidine-3'-phosphate
  modified_base 18: mod_base = OTHER; note = 2'-O-methyladenosine-3'-phosphate
  modified_base 19: mod_base = OTHER; note = 2'-O-methyluridine-3'-phosphate
  modified_base 20: mod_base = OTHER; note = 2'-O-methylcytidine-3'-phosphate
  modified_base 21: mod_base = OTHER; note = 2'-O-methylguanosine
tgccccatgtcgactacatcg

SEQ ID NO: 1895 - RNA, 23 nt, synthetic construct
  source 1..23: mol_type = other RNA
  modified_base 1: mod_base = OTHER; note = 2'-O-methylcytidine-3'-phosphorothioate
  modified_base 2: mod_base = OTHER; note = 2'-fluoroguanosine-3'-phosphorothioate
  modified_base 3: mod_base = OTHER; note = 2'-O-methyladenosine-3'-phosphate
  modified_base 4: mod_base = OTHER; note = 2'-O-methyluridine-3'-phosphate
  modified_base 5: mod_base = OTHER; note = 2'-O-methylguanosine-3'-phosphate
  modified_base 6: mod_base = OTHER; note = 2'-O-methyluridine-3'-phosphate
  modified_base 7: mod_base = OTHER; note = 2'-fluoroadenosine-3'-phosphate
  modified_base 8: mod_base = OTHER; note = 2'-O-methylguanosine-3'-phosphate
  modified_base 9: mod_base = OTHER; note = 2'-O-methyluridine-3'-phosphate
  modified_base 10: mod_base = OTHER; note = 2'-O-methylcytidine-3'-phosphate
  modified_base 11: mod_base = OTHER; note = 2'-O-methylguanosine-3'-phosphate
  modified_base 12: mod_base = OTHER; note = 2'-fluoroadenosine-3'-phosphate
  modified_base 13: mod_base = OTHER; note = 2'-O-methylcytidine-3'-phosphate
  modified_base 14: mod_base = OTHER; note = 2'-fluoroadenosine-3'-phosphate
  modified_base 15: mod_base = OTHER; note = 2'-O-methyluridine-3'-phosphate
  modified_base 16: mod_base = OTHER; note = 2'-fluoroguanosine-3'-phosphate
  modified_base 17: mod_base = OTHER; note = 2'-O-methylguanosine-3'-phosphate
  modified_base 18: mod_base = OTHER; note = 2'-O-methylguanosine-3'-phosphate
  modified_base 19: mod_base = OTHER; note = 2'-O-methylguanosine-3'-phosphate
  modified_base 20: mod_base = OTHER; note = 2'-O-methylcytidine-3'-phosphate
  modified_base 21: mod_base = OTHER; note = 2'-O-methyladenosine-3'-phosphorothioate
  modified_base 22: mod_base = OTHER; note = 2'-O-methyladenosine-3'-phosphorothioate
  modified_base 23: mod_base = OTHER; note = 2'-O-methylcytidine
cgatgtagtcgacatggggcaac

SEQ ID NO: 1896 - RNA, 21 nt, synthetic construct
  source 1..21: mol_type = other RNA
  modified_base 1: mod_base = OTHER; note = 2'-O-methylcytidine-3'-phosphorothioate
  modified_base 2: mod_base = OTHER; note = 2'-O-methylguanosine-3'-phosphorothioate
  modified_base 3: mod_base = OTHER; note = 2'-O-methylguanosine-3'-phosphate
  modified_base 4: mod_base = OTHER; note = 2'-O-methyluridine-3'-phosphate
  modified_base 5: mod_base = OTHER; note = 2'-O-methyladenosine-3'-phosphate
  modified_base 6: mod_base = OTHER; note = 2'-O-methylcytidine-3'-phosphate
  modified_base 7: mod_base = OTHER; note = 2'-fluorocytidine-3'-phosphate
  modified_base 8: mod_base = OTHER; note = 2'-O-methylguanosine-3'-phosphate
  modified_base 9: mod_base = OTHER; note = 2'-fluoroguanosine-3'-phosphate
  modified_base 10: mod_base = OTHER; note = 2'-fluoroguanosine-3'-phosphate
  modified_base 11: mod_base = OTHER; note = 2'-fluorocytidine-3'-phosphate
  modified_base 12: mod_base = OTHER; note = 2'-O-methylguanosine-3'-phosphate
  modified_base 13: mod_base = OTHER; note = 2'-O-methylguanosine-3'-phosphate
  modified_base 14: mod_base = OTHER; note = 2'-O-methyladenosine-3'-phosphate
  modified_base 15: mod_base = OTHER; note = 2'-O-methyluridine-3'-phosphate
  modified_base 16: mod_base = OTHER; note = 2'-O-methylguanosine-3'-phosphate
  modified_base 17: mod_base = OTHER; note = 2'-O-methyladenosine-3'-phosphate
  modified_base 18: mod_base = OTHER; note = 2'-O-methyladenosine-3'-phosphate
  modified_base 19: mod_base = OTHER; note = 2'-O-methyluridine-3'-phosphate
  modified_base 20: mod_base = OTHER; note = 2'-O-methyladenosine-3'-phosphate
  modified_base 21: mod_base = OTHER; note = 2'-O-methylcytidine
cggtaccgggcggatgaatac

SEQ ID NO: 1897 - RNA, 23 nt, synthetic construct
  source 1..23: mol_type = other RNA
  modified_base 1: mod_base = OTHER; note = 2'-O-methylguanosine-3'-phosphorothioate
  modified_base 2: mod_base = OTHER; note = 2'-fluorouridine-3'-phosphorothioate
  modified_base 3: mod_base = OTHER; note = 2'-O-methyladenosine-3'-phosphate
  modified_base 4: mod_base = OTHER; note = 2'-O-methyluridine-3'-phosphate
  modified_base 5: mod_base = OTHER; note = 2'-O-methyluridine-3'-phosphate
  modified_base 6: mod_base = OTHER; note = 2'-O-methylcytidine-3'-phosphate
  modified_base 7: mod_base = OTHER; note = 2'-fluoroadenosine-3'-phosphate
  modified_base 8: mod_base = OTHER; note = 2'-O-methyluridine-3'-phosphate
  modified_base 9: mod_base = OTHER; note = 2'-O-methylcytidine-3'-phosphate
  modified_base 10: mod_base = OTHER; note = 2'-O-methylcytidine-3'-phosphate
  modified_base 11: mod_base = OTHER; note = 2'-O-methylguanosine-3'-phosphate
  modified_base 12: mod_base = OTHER; note = 2'-fluorocytidine-3'-phosphate
  modified_base 13: mod_base = OTHER; note = 2'-O-methylcytidine-3'-phosphate
  modified_base 14: mod_base = OTHER; note = 2'-fluorocytidine-3'-phosphate
  modified_base 15: mod_base = OTHER; note = 2'-O-methylguanosine-3'-phosphate
  modified_base 16: mod_base = OTHER; note = 2'-fluoroguanosine-3'-phosphate
  modified_base 17: mod_base = OTHER; note = 2'-O-methyluridine-3'-phosphate
  modified_base 18: mod_base = OTHER; note = 2'-O-methyladenosine-3'-phosphate
  modified_base 19: mod_base = OTHER; note = 2'-O-methylcytidine-3'-phosphate
  modified_base 20: mod_base = OTHER; note = 2'-O-methylcytidine-3'-phosphate
  modified_base 21: mod_base = OTHER; note = 2'-O-methylguanosine-3'-phosphorothioate
  modified_base 22: mod_base = OTHER; note = 2'-O-methyluridine-3'-phosphorothioate
  modified_base 23: mod_base = OTHER; note = 2'-O-methylguanosine-3'-phosphate
gtattcatccgcccggtaccgtg

SEQ ID NO: 1898 - RNA, 21 nt, synthetic construct
  source 1..21: mol_type = other RNA
  modified_base 1: mod_base = OTHER; note = 2'-O-methylguanosine-3'-phosphorothioate
  modified_base 2: mod_base = OTHER; note = 2'-O-methylguanosine-3'-phosphorothioate
  modified_base 3: mod_base = OTHER; note = 2'-O-methyluridine-3'-phosphate
  modified_base 4: mod_base = OTHER; note = 2'-O-methyladenosine-3'-phosphate
  modified_base 5: mod_base = OTHER; note = 2'-O-methylcytidine-3'-phosphate
  modified_base 6: mod_base = OTHER; note = 2'-O-methylcytidine-3'-phosphate
  modified_base 7: mod_base = OTHER; note = 2'-fluoroguanosine-3'-phosphate
  modified_base 8: mod_base = OTHER; note = 2'-O-methylguanosine-3'-phosphate
  modified_base 9: mod_base = OTHER; note = 2'-fluoroguanosine-3'-phosphate
  modified_base 10: mod_base = OTHER; note = 2'-fluorocytidine-3'-phosphate
  modified_base 11: mod_base = OTHER; note = 2'-fluoroguanosine-3'-phosphate
  modified_base 12: mod_base = OTHER; note = 2'-O-methylguanosine-3'-phosphate
  modified_base 13: mod_base = OTHER; note = 2'-O-methyladenosine-3'-phosphate
  modified_base 14: mod_base = OTHER; note = 2'-O-methyluridine-3'-phosphate
  modified_base 15: mod_base = OTHER; note = 2'-O-methylguanosine-3'-phosphate
  modified_base 16: mod_base = OTHER; note = 2'-O-methyladenosine-3'-phosphate
  modified_base 17: mod_base = OTHER; note = 2'-O-methyladenosine-3'-phosphate
  modified_base 18: mod_base = OTHER; note = 2'-O-methyluridine-3'-phosphate
  modified_base 19: mod_base = OTHER; note = 2'-O-methyladenosine-3'-phosphate
  modified_base 20: mod_base = OTHER; note = 2'-O-methylcytidine-3'-phosphate
  modified_base 21: mod_base = OTHER; note = 2'-O-methylcytidine
ggtaccgggcggatgaatacc

SEQ ID NO: 1899 - RNA, 23 nt, synthetic construct
  source 1..23: mol_type = other RNA
  modified_base 1: mod_base = OTHER; note = 2'-O-methylguanosine-3'-phosphorothioate
  modified_base 2: mod_base = OTHER; note = 2'-fluoroguanosine-3'-phosphorothioate
  modified_base 3: mod_base = OTHER; note = 2'-O-methyluridine-3'-phosphate
  modified_base 4: mod_base = OTHER; note = 2'-O-methyladenosine-3'-phosphate
  modified_base 5: mod_base = OTHER; note = 2'-O-methyluridine-3'-phosphate
  modified_base 6: mod_base = OTHER; note = 2'-O-methyluridine-3'-phosphate
  modified_base 7: mod_base = OTHER; note = 2'-fluorocytidine-3'-phosphate
  modified_base 8: mod_base = OTHER; note = 2'-O-methyladenosine-3'-phosphate
  modified_base 9: mod_base = OTHER; note = 2'-O-methyluridine-3'-phosphate
  modified_base 10: mod_base = OTHER; note = 2'-O-methylcytidine-3'-phosphate
  modified_base 11: mod_base = OTHER; note = 2'-O-methylcytidine-3'-phosphate
  modified_base 12: mod_base = OTHER; note = 2'-fluoroguanosine-3'-phosphate
  modified_base 13: mod_base = OTHER; note = 2'-O-methylcytidine-3'-phosphate
  modified_base 14: mod_base = OTHER; note = 2'-fluorocytidine-3'-phosphate
  modified_base 15: mod_base = OTHER; note = 2'-O-methylcytidine-3'-phosphate
  modified_base 16: mod_base = OTHER; note = 2'-fluoroguanosine-3'-phosphate
  modified_base 17: mod_base = OTHER; note = 2'-O-methylguanosine-3'-phosphate
  modified_base 18: mod_base = OTHER; note = 2'-O-methyluridine-3'-phosphate
  modified_base 19: mod_base = OTHER; note = 2'-O-methyladenosine-3'-phosphate
  modified_base 20: mod_base = OTHER; note = 2'-O-methylcytidine-3'-phosphate
  modified_base 21: mod_base = OTHER; note = 2'-O-methylcytidine-3'-phosphorothioate
  modified_base 22: mod_base = OTHER; note = 2'-O-methylguanosine-3'-phosphorothioate
  modified_base 23: mod_base = OTHER; note = 2'-O-methyluridine
ggtattcatccgcccggtaccgt

SEQ ID NO: 1900 - RNA, 21 nt, synthetic construct
  source 1..21: mol_type = other RNA
  modified_base 1: mod_base = OTHER; note = 2'-O-methylguanosine-3'-phosphorothioate
  modified_base 2: mod_base = OTHER; note = 2'-O-methylguanosine-3'-phosphorothioate
  modified_base 3: mod_base = OTHER; note = 2'-O-methylcytidine-3'-phosphate
  modified_base 4: mod_base = OTHER; note = 2'-O-methyladenosine-3'-phosphate
  modified_base 5: mod_base = OTHER; note = 2'-O-methylguanosine-3'-phosphate
  modified_base 6: mod_base = OTHER; note = 2'-O-methylcytidine-3'-phosphate
  modified_base 7: mod_base = OTHER; note = 2'-fluorocytidine-3'-phosphate
  modified_base 8: mod_base = OTHER; note = 2'-O-methyluridine-3'-phosphate
  modified_base 9: mod_base = OTHER; note = 2'-fluoroguanosine-3'-phosphate
  modified_base 10: mod_base = OTHER; note = 2'-fluoroguanosine-3'-phosphate
  modified_base 11: mod_base = OTHER; note = 2'-fluorouridine-3'-phosphate
  modified_base 12: mod_base = OTHER; note = 2'-O-methylguanosine-3'-phosphate
  modified_base 13: mod_base = OTHER; note = 2'-O-methylguanosine-3'-phosphate
  modified_base 14: mod_base = OTHER; note = 2'-O-methyladenosine-3'-phosphate
  modified_base 15: mod_base = OTHER; note = 2'-O-methylguanosine-3'-phosphate
  modified_base 16: mod_base = OTHER; note = 2'-O-methylguanosine-3'-phosphate
  modified_base 17: mod_base = OTHER; note = 2'-O-methyluridine-3'-phosphate
  modified_base 18: mod_base = OTHER; note = 2'-O-methylguanosine-3'-phosphate
  modified_base 19: mod_base = OTHER; note = 2'-O-methyluridine-3'-phosphate
  modified_base 20: mod_base = OTHER; note = 2'-O-methyladenosine-3'-phosphate
  modified_base 21: mod_base = OTHER; note = 2'-O-methyluridine
ggcagcctggtggaggtgtat

SEQ ID NO: 1901 - RNA, 23 nt, synthetic construct
  source 1..23: mol_type = other RNA
  modified_base 1: mod_base = OTHER; note = 2'-O-methyladenosine-3'-phosphorothioate
  modified_base 2: mod_base = OTHER; note = 2'-fluorouridine-3'-phosphorothioate
  modified_base 3: mod_base = OTHER; note = 2'-O-methyladenosine-3'-phosphate
  modified_base 4: mod_base = OTHER; note = 2'-O-methylcytidine-3'-phosphate
  modified_base 5: mod_base = OTHER; note = 2'-O-methyladenosine-3'-phosphate
  modified_base 6: mod_base = OTHER; note = 2'-O-methylcytidine-3'-phosphate
  modified_base 7: mod_base = OTHER; note = 2'-fluorocytidine-3'-phosphate
  modified_base 8: mod_base = OTHER; note = 2'-O-methyluridine-3'-phosphate
  modified_base 9: mod_base = OTHER; note = 2'-O-methylcytidine-3'-phosphate
  modified_base 10: mod_base = OTHER; note = 2'-O-methylcytidine-3'-phosphate
  modified_base 11: mod_base = OTHER; note = 2'-O-methyladenosine-3'-phosphate
  modified_base 12: mod_base = OTHER; note = 2'-fluorocytidine-3'-phosphate
  modified_base 13: mod_base = OTHER; note = 2'-O-methylcytidine-3'-phosphate
  modified_base 14: mod_base = OTHER; note = 2'-fluoroadenosine-3'-phosphate
  modified_base 15: mod_base = OTHER; note = 2'-O-methylguanosine-3'-phosphate
  modified_base 16: mod_base = OTHER; note = 2'-fluoroguanosine-3'-phosphate
  modified_base 17: mod_base = OTHER; note = 2'-O-methylcytidine-3'-phosphate
  modified_base 18: mod_base = OTHER; note = 2'-O-methyluridine-3'-phosphate
  modified_base 19: mod_base = OTHER; note = 2'-O-methylguanosine-3'-phosphate
  modified_base 20: mod_base = OTHER; note = 2'-O-methylcytidine-3'-phosphate
  modified_base 21: mod_base = OTHER; note = 2'-O-methylcytidine-3'-phosphorothioate
  modified_base 22: mod_base = OTHER; note = 2'-O-methyluridine-3'-phosphorothioate
  modified_base 23: mod_base = OTHER; note = 2'-O-methylcytidine
atacacctccaccaggctgcctc

SEQ ID NO: 1902 - RNA, 21 nt, synthetic construct
  source 1..21: mol_type = other RNA
  modified_base 1: mod_base = OTHER; note = 2'-O-methylcytidine-3'-phosphorothioate
  modified_base 2: mod_base = OTHER; note = 2'-O-methyladenosine-3'-phosphorothioate
  modified_base 3: mod_base = OTHER; note = 2'-O-methylguanosine-3'-phosphate
  modified_base 4: mod_base = OTHER; note = 2'-O-methylcytidine-3'-phosphate
  modified_base 5: mod_base = OTHER; note = 2'-O-methylcytidine-3'-phosphate
  modified_base 6: mod_base = OTHER; note = 2'-O-methyluridine-3'-phosphate
  modified_base 7: mod_base = OTHER; note = 2'-fluoroguanosine-3'-phosphate
  modified_base 8: mod_base = OTHER; note = 2'-O-methylguanosine-3'-phosphate
  modified_base 9: mod_base = OTHER; note = 2'-fluorouridine-3'-phosphate
  modified_base 10: mod_base = OTHER; note = 2'-fluoroguanosine-3'-phosphate
  modified_base 11: mod_base = OTHER; note = 2'-fluoroguanosine-3'-phosphate
  modified_base 12: mod_base = OTHER; note = 2'-O-methyladenosine-3'-phosphate
  modified_base 13: mod_base = OTHER; note = 2'-O-methylguanosine-3'-phosphate
  modified_base 14: mod_base = OTHER; note = 2'-O-methylguanosine-3'-phosphate
  modified_base 15: mod_base = OTHER; note = 2'-O-methyluridine-3'-phosphate
  modified_base 16: mod_base = OTHER; note = 2'-O-methylguanosine-3'-phosphate
  modified_base 17: mod_base = OTHER; note = 2'-O-methyluridine-3'-phosphate
  modified_base 18: mod_base = OTHER; note = 2'-O-methyladenosine-3'-phosphate
  modified_base 19: mod_base = OTHER; note = 2'-O-methyluridine-3'-phosphate
  modified_base 20: mod_base = OTHER; note = 2'-O-methylcytidine-3'-phosphate
  modified_base 21: mod_base = OTHER; note = 2'-O-methyluridine
cagcctggtggaggtgtatct

SEQ ID NO: 1903 - RNA, 23 nt, synthetic construct
  source 1..23: mol_type = other RNA
  modified_base 1: mod_base = OTHER; note = 2'-O-methyladenosine-3'-phosphorothioate
  modified_base 2: mod_base = OTHER; note = 2'-fluoroguanosine-3'-phosphorothioate
  modified_base 3: mod_base = OTHER; note = 2'-O-methyladenosine-3'-phosphate
  modified_base 4: mod_base = OTHER; note = 2'-O-methyluridine-3'-phosphate
  modified_base 5: mod_base = OTHER; note = 2'-O-methyladenosine-3'-phosphate
  modified_base 6: mod_base = OTHER; note = 2'-O-methylcytidine-3'-phosphate
  modified_base 7: mod_base = OTHER; note = 2'-fluoroadenosine-3'-phosphate
  modified_base 8: mod_base = OTHER; note = 2'-O-methylcytidine-3'-phosphate
  modified_base 9: mod_base = OTHER; note = 2'-O-methylcytidine-3'-phosphate
  modified_base 10: mod_base = OTHER; note = 2'-O-methyluridine-3'-phosphate
  modified_base 11: mod_base = OTHER; note = 2'-O-methylcytidine-3'-phosphate
  modified_base 12: mod_base = OTHER; note = 2'-fluorocytidine-3'-phosphate
  modified_base 13: mod_base = OTHER; note = 2'-O-methyladenosine-3'-phosphate
  modified_base 14: mod_base = OTHER; note = 2'-fluorocytidine-3'-phosphate
  modified_base 15: mod_base = OTHER; note = 2'-O-methylcytidine-3'-phosphate
  modified_base 16: mod_base = OTHER; note = 2'-fluoroadenosine-3'-phosphate
  modified_base 17: mod_base = OTHER; note = 2'-O-methylguanosine-3'-phosphate
  modified_base 18: mod_base = OTHER; note = 2'-O-methylguanosine-3'-phosphate
  modified_base 19: mod_base = OTHER; note = 2'-O-methylcytidine-3'-phosphate
  modified_base 20: mod_base = OTHER; note = 2'-O-methyluridine-3'-phosphate
  modified_base 21: mod_base = OTHER; note = 2'-O-methylguanosine-3'-phosphorothioate
  modified_base 22: mod_base = OTHER; note = 2'-O-methylcytidine-3'-phosphorothioate
  modified_base 23: mod_base = OTHER; note = 2'-O-methylcytidine
agatacacctccaccaggctgcc

SEQ ID NO: 1904 - RNA, 21 nt, synthetic construct
  source 1..21: mol_type = other RNA
  modified_base 1: mod_base = OTHER; note = 2'-O-methyladenosine-3'-phosphorothioate
  modified_base 2: mod_base = OTHER; note = 2'-O-methylguanosine-3'-phosphorothioate
  modified_base 3: mod_base = OTHER; note = 2'-O-methylcytidine-3'-phosphate
  modified_base 4: mod_base = OTHER; note = 2'-O-methylcytidine-3'-phosphate
  modified_base 5: mod_base = OTHER; note = 2'-O-methyluridine-3'-phosphate
  modified_base 6: mod_base = OTHER; note = 2'-O-methylguanosine-3'-phosphate
  modified_base 7: mod_base = OTHER; note = 2'-fluoroguanosine-3'-phosphate
  modified_base 8: mod_base = OTHER; note = 2'-O-methyluridine-3'-phosphate
  modified_base 9: mod_base = OTHER; note = 2'-fluoroguanosine-3'-phosphate
  modified_base 10: mod_base = OTHER; note = 2'-fluoroguanosine-3'-phosphate
  modified_base 11: mod_base = OTHER; note = 2'-fluoroadenosine-3'-phosphate
  modified_base 12: mod_base = OTHER; note = 2'-O-methylguanosine-3'-phosphate
  modified_base 13: mod_base = OTHER; note = 2'-O-methylguanosine-3'-phosphate
  modified_base 14: mod_base = OTHER; note = 2'-O-methyluridine-3'-phosphate
  modified_base 15: mod_base = OTHER; note = 2'-O-methylguanosine-3'-phosphate
  modified_base 16: mod_base = OTHER; note = 2'-O-methyluridine-3'-phosphate
  modified_base 17: mod_base = OTHER; note = 2'-O-methyladenosine-3'-phosphate
  modified_base 18: mod_base = OTHER; note = 2'-O-methyluridine-3'-phosphate
  modified_base 19: mod_base = OTHER; note = 2'-O-methylcytidine-3'-phosphate
  modified_base 20: mod_base = OTHER; note = 2'-O-methyluridine-3'-phosphate
  modified_base 21: mod_base = OTHER; note = 2'-O-methylcytidine
agcctggtggaggtgtatctc

SEQ ID NO: 1905 - RNA, 23 nt, synthetic construct
  source 1..23: mol_type = other RNA
  modified_base 1: mod_base = OTHER; note = 2'-O-methylguanosine-3'-phosphorothioate
  modified_base 2: mod_base = OTHER; note = 2'-fluoroadenosine-3'-phosphorothioate
  modified_base 3: mod_base = OTHER; note = 2'-O-methylguanosine-3'-phosphate
  modified_base 4: mod_base = OTHER; note = 2'-O-methyladenosine-3'-phosphate
  modified_base 5: mod_base = OTHER; note = 2'-O-methyluridine-3'-phosphate
  modified_base 6: mod_base = OTHER; note = 2'-O-methyladenosine-3'-phosphate
  modified_base 7: mod_base = OTHER; note = 2'-fluorocytidine-3'-phosphate
  modified_base 8: mod_base = OTHER; note = 2'-O-methyladenosine-3'-phosphate
  modified_base 9: mod_base = OTHER; note = 2'-O-methylcytidine-3'-phosphate
  modified_base 10: mod_base = OTHER; note = 2'-O-methylcytidine-3'-phosphate
  modified_base 11: mod_base = OTHER; note = 2'-O-methyluridine-3'-phosphate
  modified_base 12: mod_base = OTHER; note = 2'-fluorocytidine-3'-phosphate
  modified_base 13: mod_base = OTHER; note = 2'-O-methylcytidine-3'-phosphate
  modified_base 14: mod_base = OTHER; note = 2'-fluoroadenosine-3'-phosphate
  modified_base 15: mod_base = OTHER; note = 2'-O-methylcytidine-3'-phosphate
  modified_base 16: mod_base = OTHER; note = 2'-fluorocytidine-3'-phosphate
  modified_base 17: mod_base = OTHER; note = 2'-O-methyladenosine-3'-phosphate
  modified_base 18: mod_base = OTHER; note = 2'-O-methylguanosine-3'-phosphate
  modified_base 19: mod_base = OTHER; note = 2'-O-methylguanosine-3'-phosphate
  modified_base 20: mod_base = OTHER; note = 2'-O-methylcytidine-3'-phosphate
  modified_base 21: mod_base = OTHER; note = 2'-O-methyluridine-3'-phosphorothioate
  modified_base 22: mod_base = OTHER; note = 2'-O-methylguanosine-3'-phosphorothioate
  modified_base 23: mod_base = OTHER; note = 2'-O-methylcytidine
gagatacacctccaccaggctgc

SEQ ID NO: 1906 - RNA, 21 nt, synthetic construct
  source 1..21: mol_type = other RNA
  modified_base 1: mod_base = OTHER; note = 2'-O-methylguanosine-3'-phosphorothioate
  modified_base 2: mod_base = OTHER; note = 2'-O-methylcytidine-3'-phosphorothioate
  modified_base 3: mod_base = OTHER; note = 2'-O-methylcytidine-3'-phosphate
  modified_base 4: mod_base = OTHER; note = 2'-O-methyluridine-3'-phosphate
  modified_base 5: mod_base = OTHER; note = 2'-O-methylguanosine-3'-phosphate
  modified_base 6: mod_base = OTHER; note = 2'-O-methylguanosine-3'-phosphate
  modified_base 7: mod_base = OTHER; note = 2'-fluorouridine-3'-phosphate
  modified_base 8: mod_base = OTHER; note = 2'-O-methylguanosine-3'-phosphate
  modified_base 9: mod_base = OTHER; note = 2'-fluoroguanosine-3'-phosphate
  modified_base 10: mod_base = OTHER; note = 2'-fluoroadenosine-3'-phosphate
  modified_base 11: mod_base = OTHER; note = 2'-fluoroguanosine-3'-phosphate
  modified_base 12: mod_base = OTHER; note = 2'-O-methylguanosine-3'-phosphate
  modified_base 13: mod_base = OTHER; note = 2'-O-methyluridine-3'-phosphate
  modified_base 14: mod_base = OTHER; note = 2'-O-methylguanosine-3'-phosphate
  modified_base 15: mod_base = OTHER; note = 2'-O-methyluridine-3'-phosphate
  modified_base 16: mod_base = OTHER; note = 2'-O-methyladenosine-3'-phosphate
  modified_base 17: mod_base = OTHER; note = 2'-O-methyluridine-3'-phosphate
  modified_base 18: mod_base = OTHER; note = 2'-O-methylcytidine-3'-phosphate
  modified_base 19: mod_base = OTHER; note = 2'-O-methyluridine-3'-phosphate
  modified_base 20: mod_base = OTHER; note = 2'-O-methylcytidine-3'-phosphate
  modified_base 21: mod_base = OTHER; note = 2'-O-methylcytidine
gcctggtggaggtgtatctcc

SEQ ID NO: 1907 - RNA, 23 nt, synthetic construct
  source 1..23: mol_type = other RNA
  modified_base 1: mod_base = OTHER; note = 2'-O-methylguanosine-3'-phosphorothioate
  modified_base 2: mod_base = OTHER; note = 2'-fluoroguanosine-3'-phosphorothioate
  modified_base 3: mod_base = OTHER; note = 2'-O-methyladenosine-3'-phosphate
  modified_base 4: mod_base = OTHER; note = 2'-O-methylguanosine-3'-phosphate
  modified_base 5: mod_base = OTHER; note = 2'-O-methyladenosine-3'-phosphate
  modified_base 6: mod_base = OTHER; note = 2'-O-methyluridine-3'-phosphate
  modified_base 7: mod_base = OTHER; note = 2'-fluoroadenosine-3'-phosphate
  modified_base 8: mod_base = OTHER; note = 2'-O-methylcytidine-3'-phosphate
  modified_base 9: mod_base = OTHER; note = 2'-O-methyladenosine-3'-phosphate
  modified_base 10: mod_base = OTHER; note = 2'-O-methylcytidine-3'-phosphate
  modified_base 11: mod_base = OTHER; note = 2'-O-methylcytidine-3'-phosphate
  modified_base 12: mod_base = OTHER; note = 2'-fluorouridine-3'-phosphate
  modified_base 13: mod_base = OTHER; note = 2'-O-methylcytidine-3'-phosphate
  modified_base 14: mod_base = OTHER; note = 2'-fluorocytidine-3'-phosphate
  modified_base 15: mod_base = OTHER; note = 2'-O-methyladenosine-3'-phosphate
  modified_base 16: mod_base = OTHER; note = 2'-fluorocytidine-3'-phosphate
  modified_base 17: mod_base = OTHER; note = 2'-O-methylcytidine-3'-phosphate
  modified_base 18: mod_base = OTHER; note = 2'-O-methyladenosine-3'-phosphate
  modified_base 19: mod_base = OTHER; note = 2'-O-methylguanosine-3'-phosphate
  modified_base 20: mod_base = OTHER; note = 2'-O-methylguanosine-3'-phosphate
  modified_base 21: mod_base = OTHER; note = 2'-O-methylcytidine-3'-phosphorothioate
  modified_base 22: mod_base = OTHER; note = 2'-O-methyluridine-3'-phosphorothioate
  modified_base 23: mod_base = OTHER; note = 2'-O-methylguanosine
ggagatacacctccaccaggctg

SEQ ID NO: 1908 - RNA, 21 nt, synthetic construct
  source 1..21: mol_type = other RNA
  modified_base 1: mod_base = OTHER; note = 2'-O-methylguanosine-3'-phosphorothioate
  modified_base 2: mod_base = OTHER; note = 2'-O-methyluridine-3'-phosphorothioate
  modified_base 3: mod_base = OTHER; note = 2'-O-methyladenosine-3'-phosphate
  modified_base 4: mod_base = OTHER; note = 2'-O-methyluridine-3'-phosphate
  modified_base 5: mod_base = OTHER; note = 2'-O-methylcytidine-3'-phosphate
  modified_base 6: mod_base = OTHER; note = 2'-O-methyluridine-3'-phosphate
  modified_base 7: mod_base = OTHER; note = 2'-fluorocytidine-3'-phosphate
  modified_base 8: mod_base = OTHER; note = 2'-O-methylcytidine-3'-phosphate
  modified_base 9: mod_base = OTHER; note = 2'-fluorouridine-3'-phosphate
  modified_base 10: mod_base = OTHER; note = 2'-fluoroadenosine-3'-phosphate
  modified_base 11: mod_base = OTHER; note = 2'-fluoroguanosine-3'-phosphate
  modified_base 12: mod_base = OTHER; note = 2'-O-methyladenosine-3'-phosphate
  modified_base 13: mod_base = OTHER; note = 2'-O-methylcytidine-3'-phosphate
  modified_base 14: mod_base = OTHER; note = 2'-O-methyladenosine-3'-phosphate
  modified_base 15: mod_base = OTHER; note = 2'-O-methylcytidine-3'-phosphate
  modified_base 16: mod_base = OTHER; note = 2'-O-methylcytidine-3'-phosphate
  modified_base 17: mod_base = OTHER; note = 2'-O-methyladenosine-3'-phosphate
  modified_base 18: mod_base = OTHER; note = 2'-O-methylguanosine-3'-phosphate
  modified_base 19: mod_base = OTHER; note = 2'-O-methylcytidine-3'-phosphate
  modified_base 20: mod_base = OTHER; note = 2'-O-methyladenosine-3'-phosphate
  modified_base 21: mod_base = OTHER; note = 2'-O-methyluridine
gtatctcctagacaccagcat

SEQ ID NO: 1909 - RNA, 23 nt, synthetic construct
  source 1..23: mol_type = other RNA
  modified_base 1: mod_base = OTHER; note = 2'-O-methyladenosine-3'-phosphorothioate
  modified_base 2: mod_base = OTHER; note = 2'-fluorouridine-3'-phosphorothioate
  modified_base 3: mod_base = OTHER; note = 2'-O-methylguanosine-3'-phosphate
  modified_base 4: mod_base = OTHER; note = 2'-O-methylcytidine-3'-phosphate
  modified_base 5: mod_base = OTHER; note = 2'-O-methyluridine-3'-phosphate
  modified_base 6: mod_base = OTHER; note = 2'-O-methylguanosine-3'-phosphate
  modified_base 7: mod_base = OTHER; note = 2'-fluoroguanosine-3'-phosphate
  modified_base 8: mod_base = OTHER; note = 2'-O-methyluridine-3'-phosphate
  modified_base 9: mod_base = OTHER; note = 2'-O-methylguanosine-3'-phosphate
  modified_base 10: mod_base = OTHER; note = 2'-O-methyluridine-3'-phosphate
  modified_base 11: mod_base = OTHER; note = 2'-O-methylcytidine-3'-phosphate
  modified_base 12: mod_base = OTHER; note = 2'-fluorouridine-3'-phosphate
  modified_base 13: mod_base = OTHER; note = 2'-O-methyladenosine-3'-phosphate
  modified_base 14: mod_base = OTHER; note = 2'-fluoroguanosine-3'-phosphate
  modified_base 15: mod_base = OTHER; note = 2'-O-methylguanosine-3'-phosphate
  modified_base 16: mod_base = OTHER; note = 2'-fluoroadenosine-3'-phosphate
  modified_base 17: mod_base = OTHER; note = 2'-O-methylguanosine-3'-phosphate
  modified_base 18: mod_base = OTHER; note = 2'-O-methyladenosine-3'-phosphate
  modified_base 19: mod_base = OTHER; note = 2'-O-methyluridine-3'-phosphate
  modified_base 20: mod_base = OTHER; note = 2'-O-methyladenosine-3'-phosphate
  modified_base 21: mod_base = OTHER; note = 2'-O-methylcytidine-3'-phosphorothioate
  modified_base 22: mod_base = OTHER; note = 2'-O-methyladenosine-3'-phosphorothioate
  modified_base 23: mod_base = OTHER; note = 2'-O-methylcytidine
atgctggtgtctaggagatacac

SEQ ID NO: 1910 - RNA, 21 nt, synthetic construct
  source 1..21: mol_type = other RNA
  modified_base 1: mod_base = OTHER; note = 2'-O-methyladenosine-3'-phosphorothioate
  modified_base 2: mod_base = OTHER; note = 2'-O-methyluridine-3'-phosphorothioate
  modified_base 3: mod_base = OTHER; note = 2'-O-methylcytidine-3'-phosphate
  modified_base 4: mod_base = OTHER; note = 2'-O-methyluridine-3'-phosphate
  modified_base 5: mod_base = OTHER; note = 2'-O-methylcytidine-3'-phosphate
  modified_base 6: mod_base = OTHER; note = 2'-O-methylcytidine-3'-phosphate
  modified_base 7: mod_base = OTHER; note = 2'-fluorouridine-3'-phosphate
  modified_base 8: mod_base = OTHER; note = 2'-O-methyladenosine-3'-phosphate
  modified_base 9: mod_base = OTHER; note = 2'-fluoroguanosine-3'-phosphate
  modified_base 10: mod_base = OTHER; note = 2'-fluoroadenosine-3'-phosphate
  modified_base 11: mod_base = OTHER; note = 2'-fluorocytidine-3'-phosphate
  modified_base 12: mod_base = OTHER; note = 2'-O-methyladenosine-3'-phosphate
  modified_base 13: mod_base = OTHER; note = 2'-O-methylcytidine-3'-phosphate
  modified_base 14: mod_base = OTHER; note = 2'-O-methylcytidine-3'-phosphate
  modified_base 15: mod_base = OTHER; note = 2'-O-methyladenosine-3'-phosphate
  modified_base 16: mod_base = OTHER; note = 2'-O-methylguanosine-3'-phosphate
  modified_base 17: mod_base = OTHER; note = 2'-O-methylcytidine-3'-phosphate
  modified_base 18: mod_base = OTHER; note = 2'-O-methyladenosine-3'-phosphate
  modified_base 19: mod_base = OTHER; note = 2'-O-methyluridine-3'-phosphate
  modified_base 20: mod_base = OTHER; note = 2'-O-methyladenosine-3'-phosphate
  modified_base 21: mod_base = OTHER; note = 2'-O-methylcytidine
atctcctagacaccagcatac

SEQ ID NO: 1911 - RNA, 23 nt, synthetic construct
  source 1..23: mol_type = other RNA
  modified_base 1: mod_base = OTHER; note = 2'-O-methylguanosine-3'-phosphorothioate
  modified_base 2: mod_base = OTHER; note = 2'-fluorouridine-3'-phosphorothioate
  modified_base 3: mod_base = OTHER; note = 2'-O-methyladenosine-3'-phosphate
  modified_base 4: mod_base = OTHER; note = 2'-O-methyluridine-3'-phosphate
  modified_base 5: mod_base = OTHER; note = 2'-O-methylguanosine-3'-phosphate
  modified_base 6: mod_base = OTHER; note = 2'-O-methylcytidine-3'-phosphate
  modified_base 7: mod_base = OTHER; note = 2'-fluorouridine-3'-phosphate
  modified_base 8: mod_base = OTHER; note = 2'-O-methylguanosine-3'-phosphate
  modified_base 9: mod_base = OTHER; note = 2'-O-methylguanosine-3'-phosphate
  modified_base 10: mod_base = OTHER; note = 2'-O-methyluridine-3'-phosphate
  modified_base 11: mod_base = OTHER; note = 2'-O-methylguanosine-3'-phosphate
  modified_base 12: mod_base = OTHER; note = 2'-fluorouridine-3'-phosphate
  modified_base 13: mod_base = OTHER; note = 2'-O-methylcytidine-3'-phosphate
  modified_base 14: mod_base = OTHER; note = 2'-fluorouridine-3'-phosphate
  modified_base 15: mod_base = OTHER; note = 2'-O-methyladenosine-3'-phosphate
  modified_base 16: mod_base = OTHER; note = 2'-fluoroguanosine-3'-phosphate
  modified_base 17: mod_base = OTHER; note = 2'-O-methylguanosine-3'-phosphate
  modified_base 18: mod_base = OTHER; note = 2'-O-methyladenosine-3'-phosphate
  modified_base 19: mod_base = OTHER; note = 2'-O-methylguanosine-3'-phosphate
  modified_base 20: mod_base = OTHER; note = 2'-O-methyladenosine-3'-phosphate
  modified_base 21: mod_base = OTHER; note = 2'-O-methyluridine-3'-phosphorothioate
  modified_base 22: mod_base = OTHER; note = 2'-O-methyladenosine-3'-phosphorothioate
  modified_base 23: mod_base = OTHER; note = 2'-O-methylcytidine
gtatgctggtgtctaggagatac

SEQ ID NO: 1912 - RNA, 21 nt, synthetic construct
  source 1..21: mol_type = other RNA
  modified_base 1: mod_base = OTHER; note = 2'-O-methyluridine-3'-phosphorothioate
  modified_base 2: mod_base = OTHER; note = 2'-O-methylcytidine-3'-phosphorothioate
  modified_base 3: mod_base = OTHER; note = 2'-O-methylcytidine-3'-phosphate
  modified_base 4: mod_base = OTHER; note = 2'-O-methyluridine-3'-phosphate
  modified_base 5: mod_base = OTHER; note = 2'-O-methyladenosine-3'-phosphate
  modified_base 6: mod_base = OTHER; note = 2'-O-methylguanosine-3'-phosphate
  modified_base 7: mod_base = OTHER; note = 2'-fluoroadenosine-3'-phosphate
  modified_base 8: mod_base = OTHER; note = 2'-O-methylcytidine-3'-phosphate
  modified_base 9: mod_base = OTHER; note = 2'-fluoroadenosine-3'-phosphate
  modified_base 10: mod_base = OTHER; note = 2'-fluorocytidine-3'-phosphate
  modified_base 11: mod_base = OTHER; note = 2'-fluorocytidine-3'-phosphate
  modified_base 12: mod_base = OTHER; note = 2'-O-methyladenosine-3'-phosphate
  modified_base 13: mod_base = OTHER; note = 2'-O-methylguanosine-3'-phosphate
  modified_base 14: mod_base = OTHER; note = 2'-O-methylcytidine-3'-phosphate
  modified_base 15: mod_base = OTHER; note = 2'-O-methyladenosine-3'-phosphate
  modified_base 16: mod_base = OTHER; note = 2'-O-methyluridine-3'-phosphate
  modified_base 17: mod_base = OTHER; note = 2'-O-methyladenosine-3'-phosphate
  modified_base 18: mod_base = OTHER; note = 2'-O-methylcytidine-3'-phosphate
  modified_base 19: mod_base = OTHER; note = 2'-O-methyladenosine-3'-phosphate
  modified_base 20: mod_base = OTHER; note = 2'-O-methylguanosine-3'-phosphate
  modified_base 21: mod_base = OTHER; note = 2'-O-methyladenosine
tcctagacaccagcatacaga

SEQ ID NO: 1913 - RNA, 23 nt, synthetic construct
  source 1..23: mol_type = other RNA
  modified_base 1: mod_base = OTHER; note = 2'-O-methyluridine-3'-phosphorothioate
  modified_base 2: mod_base = OTHER; note = 2'-fluorocytidine-3'-phosphorothioate
  modified_base 3: mod_base = OTHER; note = 2'-O-methyluridine-3'-phosphate
  modified_base 4: mod_base = OTHER; note = 2'-O-methylguanosine-3'-phosphate
  modified_base 5: mod_base = OTHER; note = 2'-O-methyluridine-3'-phosphate
  modified_base 6: mod_base = OTHER; note = 2'-O-methyladenosine-3'-phosphate
  modified_base 7: mod_base = OTHER; note = 2'-fluorouridine-3'-phosphate
  modified_base 8: mod_base = OTHER; note = 2'-O-methylguanosine-3'-phosphate
  modified_base 9: mod_base = OTHER; note = 2'-O-methylcytidine-3'-phosphate
  modified_base 10: mod_base = OTHER; note = 2'-O-methyluridine-3'-phosphate
  modified_base 11: mod_base = OTHER; note = 2'-O-methylguanosine-3'-phosphate
  modified_base 12: mod_base = OTHER; note = 2'-fluoroguanosine-3'-phosphate
  modified_base 13: mod_base = OTHER; note = 2'-O-methyluridine-3'-phosphate
  modified_base 14: mod_base = OTHER; note = 2'-fluoroguanosine-3'-phosphate
  modified_base 15: mod_base = OTHER; note = 2'-O-methyluridine-3'-phosphate
  modified_base 16: mod_base = OTHER; note = 2'-fluorocytidine-3'-phosphate
  modified_base 17: mod_base = OTHER; note = 2'-O-methyluridine-3'-phosphate
  modified_base 18: mod_base = OTHER; note = 2'-O-methyladenosine-3'-phosphate
  modified_base 19: mod_base = OTHER; note = 2'-O-methylguanosine-3'-phosphate
  modified_base 20: mod_base = OTHER; note = 2'-O-methylguanosine-3'-phosphate
  modified_base 21: mod_base = OTHER; note = 2'-O-methyladenosine-3'-phosphorothioate
  modified_base 22: mod_base = OTHER; note = 2'-O-methylguanosine-3'-phosphorothioate
  modified_base 23: mod_base = OTHER; note = 2'-O-methyladenosine
tctgtatgctggtgtctaggaga

SEQ ID NO: 1914 - RNA, 21 nt, synthetic construct
  source 1..21: mol_type = other RNA
  modified_base 1: mod_base = OTHER; note = 2'-O-methylcytidine-3'-phosphorothioate
  modified_base 2: mod_base = OTHER; note = 2'-O-methyluridine-3'-phosphorothioate
  modified_base 3: mod_base = OTHER; note = 2'-O-methyladenosine-3'-phosphate
  modified_base 4: mod_base = OTHER; note = 2'-O-methylguanosine-3'-phosphate
  modified_base 5: mod_base = OTHER; note = 2'-O-methyladenosine-3'-phosphate
  modified_base 6: mod_base = OTHER; note = 2'-O-methylcytidine-3'-phosphate
  modified_base 7: mod_base = OTHER; note = 2'-fluoroadenosine-3'-phosphate
  modified_base 8: mod_base = OTHER; note = 2'-O-methylcytidine-3'-phosphate
  modified_base 9: mod_base = OTHER; note = 2'-fluorocytidine-3'-phosphate
  modified_base 10: mod_base = OTHER; note = 2'-fluoroadenosine-3'-phosphate
  modified_base 11: mod_base = OTHER; note = 2'-fluoroguanosine-3'-phosphate
  modified_base 12: mod_base = OTHER; note = 2'-O-methylcytidine-3'-phosphate
  modified_base 13: mod_base = OTHER; note = 2'-O-methyladenosine-3'-phosphate
  modified_base 14: mod_base = OTHER; note = 2'-O-methyluridine-3'-phosphate
  modified_base 15: mod_base = OTHER; note = 2'-O-methyladenosine-3'-phosphate
  modified_base 16: mod_base = OTHER; note = 2'-O-methylcytidine-3'-phosphate
  modified_base 17: mod_base = OTHER; note = 2'-O-methyladenosine-3'-phosphate
  modified_base 18: mod_base = OTHER; note = 2'-O-methylguanosine-3'-phosphate
  modified_base 19: mod_base = OTHER; note = 2'-O-methyladenosine-3'-phosphate
  modified_base 20: mod_base = OTHER; note = 2'-O-methylguanosine-3'-phosphate
  modified_base 21: mod_base = OTHER; note = 2'-O-methyluridine
ctagacaccagcatacagagt

SEQ ID NO: 1915 - RNA, 23 nt, synthetic construct
  source 1..23: mol_type = other RNA
  modified_base 1: mod_base = OTHER; note = 2'-O-methyladenosine-3'-phosphorothioate
  modified_base 2: mod_base = OTHER; note = 2'-fluorocytidine-3'-phosphorothioate
  modified_base 3: mod_base = OTHER; note = 2'-O-methyluridine-3'-phosphate
  modified_base 4: mod_base = OTHER; note = 2'-O-methylcytidine-3'-phosphate
  modified_base 5: mod_base = OTHER; note = 2'-O-methyluridine-3'-phosphate
  modified_base 6: mod_base = OTHER; note = 2'-O-methylguanosine-3'-phosphate
  modified_base 7: mod_base = OTHER; note = 2'-fluorouridine-3'-phosphate
  modified_base 8: mod_base = OTHER; note = 2'-O-methyladenosine-3'-phosphate
  modified_base 9: mod_base = OTHER; note = 2'-O-methyluridine-3'-phosphate
  modified_base 10: mod_base = OTHER; note = 2'-O-methylguanosine-3'-phosphate
  modified_base 11: mod_base = OTHER; note = 2'-O-methylcytidine-3'-phosphate
  modified_base 12: mod_base = OTHER; note = 2'-fluorouridine-3'-phosphate
  modified_base 13: mod_base = OTHER; note = 2'-O-methylguanosine-3'-phosphate
  modified_base 14: mod_base = OTHER; note = 2'-fluoroguanosine-3'-phosphate
  modified_base 15: mod_base = OTHER; note = 2'-O-methyluridine-3'-phosphate
  modified_base 16: mod_base = OTHER; note = 2'-fluoroguanosine-3'-phosphate
  modified_base 17: mod_base = OTHER; note = 2'-O-methyluridine-3'-phosphate
  modified_base 18: mod_base = OTHER; note = 2'-O-methylcytidine-3'-phosphate
  modified_base 19: mod_base = OTHER; note = 2'-O-methyluridine-3'-phosphate
  modified_base 20: mod_base = OTHER; note = 2'-O-methyladenosine-3'-phosphate
  modified_base 21: mod_base = OTHER; note = 2'-O-methylguanosine-3'-phosphorothioate
  modified_base 22: mod_base = OTHER; note = 2'-O-methylguanosine-3'-phosphorothioate
  modified_base 23: mod_base = OTHER; note = 2'-O-methyladenosine
actctgtatgctggtgtctagga

SEQ ID NO: 1916 - RNA, 21 nt, synthetic construct
  source 1..21: mol_type = other RNA
  modified_base 1: mod_base = OTHER; note = 2'-O-methyladenosine-3'-phosphorothioate
  modified_base 2: mod_base = OTHER; note = 2'-O-methyluridine-3'-phosphorothioate
  modified_base 3: mod_base = OTHER; note = 2'-O-methylguanosine-3'-phosphate
  modified_base 4: mod_base = OTHER; note = 2'-O-methylguanosine-3'-phosphate
  modified_base 5: mod_base = OTHER; note = 2'-O-methyluridine-3'-phosphate
  modified_base 6: mod_base = OTHER; note = 2'-O-methylcytidine-3'-phosphate
  modified_base 7: mod_base = OTHER; note = 2'-fluoroadenosine-3'-phosphate
  modified_base 8: mod_base = OTHER; note = 2'-O-methylcytidine-3'-phosphate
  modified_base 9: mod_base = OTHER; note = 2'-fluorocytidine-3'-phosphate
  modified_base 10: mod_base = OTHER; note = 2'-fluoroguanosine-3'-phosphate
  modified_base 11: mod_base = OTHER; note = 2'-fluoroadenosine-3'-phosphate
  modified_base 12: mod_base = OTHER; note = 2'-O-methylcytidine-3'-phosphate
  modified_base 13: mod_base = OTHER; note = 2'-O-methyluridine-3'-phosphate
  modified_base 14: mod_base = OTHER; note = 2'-O-methyluridine-3'-phosphate
  modified_base 15: mod_base = OTHER; note = 2'-O-methylcytidine-3'-phosphate
  modified_base 16: mod_base = OTHER; note = 2'-O-methylguanosine-3'-phosphate
  modified_base 17: mod_base = OTHER; note = 2'-O-methyladenosine-3'-phosphate
  modified_base 18: mod_base = OTHER; note = 2'-O-methylguanosine-3'-phosphate
  modified_base 19: mod_base = OTHER; note = 2'-O-methyladenosine-3'-phosphate
  modified_base 20: mod_base = OTHER; note = 2'-O-methyladenosine-3'-phosphate
  modified_base 21: mod_base = OTHER; note = 2'-O-methyluridine
atggtcaccgacttcgagaat

SEQ ID NO: 1917 - RNA, 23 nt, synthetic construct
  source 1..23: mol_type = other RNA
  modified_base 1: mod_base = OTHER; note = 2'-O-methyladenosine-3'-phosphorothioate
  modified_base 2: mod_base = OTHER; note = 2'-fluorouridine-3'-phosphorothioate
  modified_base 3: mod_base = OTHER; note = 2'-O-methyluridine-3'-phosphate
  modified_base 4: mod_base = OTHER; note = 2'-O-methylcytidine-3'-phosphate
  modified_base 5: mod_base = OTHER; note = 2'-O-methyluridine-3'-phosphate
  modified_base 6: mod_base = OTHER; note = 2'-O-methylcytidine-3'-phosphate
  modified_base 7: mod_base = OTHER; note = 2'-fluoroguanosine-3'-phosphate
  modified_base 8: mod_base = OTHER; note = 2'-O-methyladenosine-3'-phosphate
  modified_base 9: mod_base = OTHER; note = 2'-O-methyladenosine-3'-phosphate
  modified_base 10: mod_base = OTHER; note = 2'-O-methylguanosine-3'-phosphate
  modified_base 11: mod_base = OTHER; note = 2'-O-methyluridine-3'-phosphate
  modified_base 12: mod_base = OTHER; note = 2'-fluorocytidine-3'-phosphate
  modified_base 13: mod_base = OTHER; note = 2'-O-methylguanosine-3'-phosphate
  modified_base 14: mod_base = OTHER; note = 2'-fluoroguanosine-3'-phosphate
  modified_base 15: mod_base = OTHER; note = 2'-O-methyluridine-3'-phosphate
  modified_base 16: mod_base = OTHER; note = 2'-fluoroguanosine-3'-phosphate
  modified_base 17: mod_base = OTHER; note = 2'-O-methyladenosine-3'-phosphate
  modified_base 18: mod_base = OTHER; note = 2'-O-methylcytidine-3'-phosphate
  modified_base 19: mod_base = OTHER; note = 2'-O-methylcytidine-3'-phosphate
  modified_base 20: mod_base = OTHER; note = 2'-O-methyladenosine-3'-phosphate
  modified_base 21: mod_base = OTHER; note = 2'-O-methyluridine-3'-phosphorothioate
  modified_base 22: mod_base = OTHER; note = 2'-O-methylguanosine-3'-phosphorothioate
  modified_base 23: mod_base = OTHER; note = 2'-O-methyladenosine
attctcgaagtcggtgaccatga

SEQ ID NO: 1918 - RNA, 21 nt, synthetic construct
  source 1..21: mol_type = other RNA
  modified_base 1: mod_base = OTHER; note = 2'-O-methyluridine-3'-phosphorothioate
  modified_base 2: mod_base = OTHER; note = 2'-O-methylcytidine-3'-phosphorothioate
  modified_base 3: mod_base = OTHER; note = 2'-O-methyladenosine-3'-phosphate
  modified_base 4: mod_base = OTHER; note = 2'-O-methylcytidine-3'-phosphate
  modified_base 5: mod_base = OTHER; note = 2'-O-methylcytidine-3'-phosphate
  modified_base 6: mod_base = OTHER; note = 2'-O-methylguanosine-3'-phosphate
  modified_base 7: mod_base = OTHER; note = 2'-fluoroadenosine-3'-phosphate
  modified_base 8: mod_base = OTHER; note = 2'-O-methylcytidine-3'-phosphate
  modified_base 9: mod_base = OTHER; note = 2'-fluorouridine-3'-phosphate
  modified_base 10: mod_base = OTHER; note = 2'-fluorouridine-3'-phosphate
  modified_base 11: mod_base = OTHER; note = 2'-fluorocytidine-3'-phosphate
  modified_base 12: mod_base = OTHER; note = 2'-O-methylguanosine-3'-phosphate
  modified_base 13: mod_base = OTHER; note = 2'-O-methyladenosine-3'-phosphate
  modified_base 14: mod_base = OTHER; note = 2'-O-methylguanosine-3'-phosphate
  modified_base 15: mod_base = OTHER; note = 2'-O-methyladenosine-3'-phosphate
  modified_base 16: mod_base = OTHER; note = 2'-O-methyladenosine-3'-phosphate
  modified_base 17: mod_base = OTHER; note = 2'-O-methyluridine-3'-phosphate
  modified_base 18: mod_base = OTHER; note = 2'-O-methylguanosine-3'-phosphate
  modified_base 19: mod_base = OTHER; note = 2'-O-methyluridine-3'-phosphate
  modified_base 20: mod_base = OTHER; note = 2'-O-methylguanosine-3'-phosphate
  modified_base 21: mod_base = OTHER; note = 2'-O-methylcytidine
tcaccgacttcgagaatgtgc

SEQ ID NO: 1919 - RNA, 23 nt, synthetic construct
  source 1..23: mol_type = other RNA
  modified_base 1: mod_base = OTHER; note = 2'-O-methylguanosine-3'-phosphorothioate
  modified_base 2: mod_base = OTHER; note = 2'-fluorocytidine-3'-phosphorothioate
  modified_base 3: mod_base = OTHER; note = 2'-O-methyladenosine-3'-phosphate
  modified_base 4: mod_base = OTHER; note = 2'-O-methylcytidine-3'-phosphate
  modified_base 5: mod_base = OTHER; note = 2'-O-methyladenosine-3'-phosphate
  modified_base 6: mod_base = OTHER; note = 2'-O-methyluridine-3'-phosphate
  modified_base 7: mod_base = OTHER; note = 2'-fluorouridine-3'-phosphate
  modified_base 8: mod_base = OTHER; note = 2'-O-methylcytidine-3'-phosphate
  modified_base 9: mod_base = OTHER; note = 2'-O-methyluridine-3'-phosphate
  modified_base 10: mod_base = OTHER; note = 2'-O-methylcytidine-3'-phosphate
  modified_base 11: mod_base = OTHER; note = 2'-O-methylguanosine-3'-phosphate
  modified_base 12: mod_base = OTHER; note = 2'-fluoroadenosine-3'-phosphate
  modified_base 13: mod_base = OTHER; note = 2'-O-methyladenosine-3'-phosphate
  modified_base 14: mod_base = OTHER; note = 2'-fluoroguanosine-3'-phosphate
  modified_base 15: mod_base = OTHER; note = 2'-O-methyluridine-3'-phosphate
  modified_base 16: mod_base = OTHER; note = 2'-fluorocytidine-3'-phosphate
  modified_base 17: mod_base = OTHER; note = 2'-O-methylguanosine-3'-phosphate
  modified_base 18: mod_base = OTHER; note = 2'-O-methylguanosine-3'-phosphate
  modified_base 19: mod_base = OTHER; note = 2'-O-methyluridine-3'-phosphate
  modified_base 20: mod_base = OTHER; note = 2'-O-methylguanosine-3'-phosphate
  modified_base 21: mod_base = OTHER; note = 2'-O-methyladenosine-3'-phosphorothioate
  modified_base 22: mod_base = OTHER; note = 2'-O-methylcytidine-3'-phosphorothioate
  modified_base 23: mod_base = OTHER; note = 2'-O-methylcytidine
gcacattctcgaagtcggtgacc

SEQ ID NO: 1920 - RNA, 21 nt, synthetic construct
  source 1..21: mol_type = other RNA
  modified_base 1: mod_base = OTHER; note = 2'-O-methylcytidine-3'-phosphorothioate
  modified_base 2: mod_base = OTHER; note = 2'-O-methylcytidine-3'-phosphorothioate
  modified_base 3: mod_base = OTHER; note = 2'-O-methyluridine-3'-phosphate
  modified_base 4: mod_base = OTHER; note = 2'-O-methylcytidine-3'-phosphate
  modified_base 5: mod_base = OTHER; note = 2'-O-methyladenosine-3'-phosphate
  modified_base 6: mod_base = OTHER; note = 2'-O-methyluridine-3'-phosphate
  modified_base 7: mod_base = OTHER; note = 2'-fluoroadenosine-3'-phosphate
  modified_base 8: mod_base = OTHER; note = 2'-O-methylguanosine-3'-phosphate
  modified_base 9: mod_base = OTHER; note = 2'-fluoroguanosine-3'-phosphate
  modified_base 10: mod_base = OTHER; note = 2'-fluorocytidine-3'-phosphate
  modified_base 11: mod_base = OTHER; note = 2'-fluorocytidine-3'-phosphate
  modified_base 12: mod_base = OTHER; note = 2'-O-methyluridine-3'-phosphate
  modified_base 13: mod_base = OTHER; note = 2'-O-methylguanosine-3'-phosphate
  modified_base 14: mod_base = OTHER; note = 2'-O-methylguanosine-3'-phosphate
  modified_base 15: mod_base = OTHER; note = 2'-O-methyladenosine-3'-phosphate
  modified_base 16: mod_base = OTHER; note = 2'-O-methylguanosine-3'-phosphate
  modified_base 17: mod_base = OTHER; note = 2'-O-methyluridine-3'-phosphate
  modified_base 18: mod_base = OTHER; note = 2'-O-methyluridine-3'-phosphate
  modified_base 19: mod_base = OTHER; note = 2'-O-methyluridine-3'-phosphate
  modified_base 20: mod_base = OTHER; note = 2'-O-methyladenosine-3'-phosphate
  modified_base 21: mod_base = OTHER; note = 2'-O-methyluridine
cctcataggcctggagtttat

SEQ ID NO: 1921 - RNA, 23 nt, synthetic construct
  source 1..23: mol_type = other RNA
  modified_base 1: mod_base = OTHER; note = 2'-O-methyladenosine-3'-phosphorothioate
  modified_base 2: mod_base = OTHER; note = 2'-fluorouridine-3'-phosphorothioate
  modified_base 3: mod_base = OTHER; note = 2'-O-methyladenosine-3'-phosphate
  modified_base 4: mod_base = OTHER; note = 2'-O-methyladenosine-3'-phosphate
  modified_base 5: mod_base = OTHER; note = 2'-O-methyladenosine-3'-phosphate
  modified_base 6: mod_base = OTHER; note = 2'-O-methylcytidine-3'-phosphate
  modified_base 7: mod_base = OTHER; note = 2'-fluorouridine-3'-phosphate
  modified_base 8: mod_base = OTHER; note = 2'-O-methylcytidine-3'-phosphate
  modified_base 9: mod_base = OTHER; note = 2'-O-methylcytidine-3'-phosphate
  modified_base 10: mod_base = OTHER; note = 2'-O-methyladenosine-3'-phosphate
  modified_base 11: mod_base = OTHER; note = 2'-O-methylguanosine-3'-phosphate
  modified_base 12: mod_base = OTHER; note = 2'-fluoroguanosine-3'-phosphate
  modified_base 13: mod_base = OTHER; note = 2'-O-methylcytidine-3'-phosphate
  modified_base 14: mod_base = OTHER; note = 2'-fluorocytidine-3'-phosphate
  modified_base 15: mod_base = OTHER; note = 2'-O-methyluridine-3'-phosphate
  modified_base 16: mod_base = OTHER; note = 2'-fluoroadenosine-3'-phosphate
  modified_base 17: mod_base = OTHER; note = 2'-O-methyluridine-3'-phosphate
  modified_base 18: mod_base = OTHER; note = 2'-O-methylguanosine-3'-phosphate
  modified_base 19: mod_base = OTHER; note = 2'-O-methyladenosine-3'-phosphate
  modified_base 20: mod_base = OTHER; note = 2'-O-methylguanosine-3'-phosphate
  modified_base 21: mod_base = OTHER; note = 2'-O-methylguanosine-3'-phosphorothioate
  modified_base 22: mod_base = OTHER; note = 2'-O-methylguanosine-3'-phosphorothioate
  modified_base 23: mod_base = OTHER; note = 2'-O-methyluridine
ataaactccaggcctatgagggt

SEQ ID NO: 1922 - RNA, 21 nt, synthetic construct
  source 1..21: mol_type = other RNA
  modified_base 1: mod_base = OTHER; note = 2'-O-methylguanosine-3'-phosphorothioate
  modified_base 2: mod_base = OTHER; note = 2'-O-methylguanosine-3'-phosphorothioate
  modified_base 3: mod_base = OTHER; note = 2'-O-methylcytidine-3'-phosphate
  modified_base 4: mod_base = OTHER; note = 2'-O-methylcytidine-3'-phosphate
  modified_base 5: mod_base = OTHER; note = 2'-O-methyluridine-3'-phosphate
  modified_base 6: mod_base = OTHER; note = 2'-O-methylguanosine-3'-phosphate
  modified_base 7: mod_base = OTHER; note = 2'-fluoroguanosine-3'-phosphate
  modified_base 8: mod_base = OTHER; note = 2'-O-methyladenosine-3'-phosphate
  modified_base 9: mod_base = OTHER; note = 2'-fluoroguanosine-3'-phosphate
  modified_base 10: mod_base = OTHER; note = 2'-fluorouridine-3'-phosphate
  modified_base 11: mod_base = OTHER; note = 2'-fluorouridine-3'-phosphate
  modified_base 12: mod_base = OTHER; note = 2'-O-methyluridine-3'-phosphate
  modified_base 13: mod_base = OTHER; note = 2'-O-methyladenosine-3'-phosphate
  modified_base 14: mod_base = OTHER; note = 2'-O-methyluridine-3'-phosphate
  modified_base 15: mod_base = OTHER; note = 2'-O-methyluridine-3'-phosphate
  modified_base 16: mod_base = OTHER; note = 2'-O-methylcytidine-3'-phosphate
  modified_base 17: mod_base = OTHER; note = 2'-O-methylguanosine-3'-phosphate
  modified_base 18: mod_base = OTHER; note = 2'-O-methylguanosine-3'-phosphate
  modified_base 19: mod_base = OTHER; note = 2'-O-methyladenosine-3'-phosphate
  modified_base 20: mod_base = OTHER; note = 2'-O-methyladenosine-3'-phosphate
  modified_base 21: mod_base = OTHER; note = 2'-O-methyladenosine
ggcctggagtttattcggaaa

SEQ ID NO: 1923 - RNA, 23 nt, synthetic construct
  source 1..23: mol_type = other RNA
  modified_base 1: mod_base = OTHER; note = 2'-O-methyluridine-3'-phosphorothioate
  modified_base 2: mod_base = OTHER; note = 2'-fluorouridine-3'-phosphorothioate
  modified_base 3: mod_base = OTHER; note = 2'-O-methyluridine-3'-phosphate
  modified_base 4: mod_base = OTHER; note = 2'-O-methylcytidine-3'-phosphate
  modified_base 5: mod_base = OTHER; note = 2'-O-methylcytidine-3'-phosphate
  modified_base 6: mod_base = OTHER; note = 2'-O-methylguanosine-3'-phosphate
  modified_base 7: mod_base = OTHER; note = 2'-fluoroadenosine-3'-phosphate
  modified_base 8: mod_base = OTHER; note = 2'-O-methyladenosine-3'-phosphate
  modified_base 9: mod_base = OTHER; note = 2'-O-methyluridine-3'-phosphate
  modified_base 10: mod_base = OTHER; note = 2'-O-methyladenosine-3'-phosphate
  modified_base 11: mod_base = OTHER; note = 2'-O-methyladenosine-3'-phosphate
  modified_base 12: mod_base = OTHER; note = 2'-fluoroadenosine-3'-phosphate
  modified_base 13: mod_base = OTHER; note = 2'-O-methylcytidine-3'-phosphate
  modified_base 14: mod_base = OTHER; note = 2'-fluorouridine-3'-phosphate
  modified_base 15: mod_base = OTHER; note = 2'-O-methylcytidine-3'-phosphate
  modified_base 16: mod_base = OTHER; note = 2'-fluorocytidine-3'-phosphate
  modified_base 17: mod_base = OTHER; note = 2'-O-methyladenosine-3'-phosphate
  modified_base 18: mod_base = OTHER; note = 2'-O-methylguanosine-3'-phosphate
  modified_base 19: mod_base = OTHER; note = 2'-O-methylguanosine-3'-phosphate
  modified_base 20: mod_base = OTHER; note = 2'-O-methylcytidine-3'-phosphate
  modified_base 21: mod_base = OTHER; note = 2'-O-methylcytidine-3'-phosphorothioate
  modified_base 22: mod_base = OTHER; note = 2'-O-methyluridine-3'-phosphorothioate
  modified_base 23: mod_base = OTHER; note = 2'-O-methyladenosine
tttccgaataaactccaggccta

SEQ ID NO: 1924 - RNA, 21 nt, synthetic construct
  source 1..21: mol_type = other RNA
  modified_base 1: mod_base = OTHER; note = 2'-O-methylguanosine-3'-phosphorothioate
  modified_base 2: mod_base = OTHER; note = 2'-O-methylcytidine-3'-phosphorothioate
  modified_base 3: mod_base = OTHER; note = 2'-O-methylcytidine-3'-phosphate
  modified_base 4: mod_base = OTHER; note = 2'-O-methyluridine-3'-phosphate
  modified_base 5: mod_base = OTHER; note = 2'-O-methylguanosine-3'-phosphate
  modified_base 6: mod_base = OTHER; note = 2'-O-methylguanosine-3'-phosphate
  modified_base 7: mod_base = OTHER; note = 2'-fluoroadenosine-3'-phosphate
  modified_base 8: mod_base = OTHER; note = 2'-O-methylguanosine-3'-phosphate
  modified_base 9: mod_base = OTHER; note = 2'-fluorouridine-3'-phosphate
  modified_base 10: mod_base = OTHER; note = 2'-fluorouridine-3'-phosphate
  modified_base 11: mod_base = OTHER; note = 2'-fluorouridine-3'-phosphate
  modified_base 12: mod_base = OTHER; note = 2'-O-methyladenosine-3'-phosphate
  modified_base 13: mod_base = OTHER; note = 2'-O-methyluridine-3'-phosphate
  modified_base 14: mod_base = OTHER; note = 2'-O-methyluridine-3'-phosphate
  modified_base 15: mod_base = OTHER; note = 2'-O-methylcytidine-3'-phosphate
  modified_base 16: mod_base = OTHER; note = 2'-O-methylguanosine-3'-phosphate
  modified_base 17: mod_base = OTHER; note = 2'-O-methylguanosine-3'-phosphate
  modified_base 18: mod_base = OTHER; note = 2'-O-methyladenosine-3'-phosphate
  modified_base 19: mod_base = OTHER; note = 2'-O-methyladenosine-3'-phosphate
  modified_base 20: mod_base = OTHER; note = 2'-O-methyladenosine-3'-phosphate
  modified_base 21: mod_base = OTHER; note = 2'-O-methyladenosine
gcctggagtttattcggaaaa

SEQ ID NO: 1925 - RNA, 23 nt, synthetic construct
  source 1..23: mol_type = other RNA
  modified_base 1: mod_base = OTHER; note = 2'-O-methyluridine-3'-phosphorothioate
  modified_base 2: mod_base = OTHER; note = 2'-fluorouridine-3'-phosphorothioate
  modified_base 3: mod_base = OTHER; note = 2'-O-methyluridine-3'-phosphate
  modified_base 4: mod_base = OTHER; note = 2'-O-methyluridine-3'-phosphate
  modified_base 5: mod_base = OTHER; note = 2'-O-methylcytidine-3'-phosphate
  modified_base 6: mod_base = OTHER; note = 2'-O-methylcytidine-3'-phosphate
  modified_base 7: mod_base = OTHER; note = 2'-fluoroguanosine-3'-phosphate
  modified_base 8: mod_base = OTHER; note = 2'-O-methyladenosine-3'-phosphate
  modified_base 9: mod_base = OTHER; note = 2'-O-methyladenosine-3'-phosphate
  modified_base 10: mod_base = OTHER; note = 2'-O-methyluridine-3'-phosphate
  modified_base 11: mod_base = OTHER; note = 2'-O-methyladenosine-3'-phosphate
  modified_base 12: mod_base = OTHER; note = 2'-fluoroadenosine-3'-phosphate
  modified_base 13: mod_base = OTHER; note = 2'-O-methyladenosine-3'-phosphate
  modified_base 14: mod_base = OTHER; note = 2'-fluorocytidine-3'-phosphate
  modified_base 15: mod_base = OTHER; note = 2'-O-methyluridine-3'-phosphate
  modified_base 16: mod_base = OTHER; note = 2'-fluorocytidine-3'-phosphate
  modified_base 17: mod_base = OTHER; note = 2'-O-methylcytidine-3'-phosphate
  modified_base 18: mod_base = OTHER; note = 2'-O-methyladenosine-3'-phosphate
  modified_base 19: mod_base = OTHER; note = 2'-O-methylguanosine-3'-phosphate
  modified_base 20: mod_base = OTHER; note = 2'-O-methylguanosine-3'-phosphate
  modified_base 21: mod_base = OTHER; note = 2'-O-methylcytidine-3'-phosphorothioate
  modified_base 22: mod_base = OTHER; note = 2'-O-methylcytidine-3'-phosphorothioate
  modified_base 23: mod_base = OTHER; note = 2'-O-methyluridine
ttttccgaataaactccaggcct

SEQ ID NO: 1926 - RNA, 21 nt, synthetic construct
  source 1..21: mol_type = other RNA
  modified_base 1: mod_base = OTHER; note = 2'-O-methyluridine-3'-phosphorothioate
  modified_base 2: mod_base = OTHER; note = 2'-O-methyluridine-3'-phosphorothioate
  modified_base 3: mod_base = OTHER; note = 2'-O-methylguanosine-3'-phosphate
  modified_base 4: mod_base = OTHER; note = 2'-O-methyluridine-3'-phosphate
  modified_base 5: mod_base = OTHER; note = 2'-O-methylguanosine-3'-phosphate
  modified_base 6: mod_base = OTHER; note = 2'-O-methyluridine-3'-phosphate
  modified_base 7: mod_base = OTHER; note = 2'-fluorocytidine-3'-phosphate
  modified_base 8: mod_base = OTHER; note = 2'-O-methyladenosine-3'-phosphate
  modified_base 9: mod_base = OTHER; note = 2'-fluorocytidine-3'-phosphate
  modified_base 10: mod_base = OTHER; note = 2'-fluoroadenosine-3'-phosphate
  modified_base 11: mod_base = OTHER; note = 2'-fluoroguanosine-3'-phosphate
  modified_base 12: mod_base = OTHER; note = 2'-O-methyladenosine-3'-phosphate
  modified_base 13: mod_base = OTHER; note = 2'-O-methylguanosine-3'-phosphate
  modified_base 14: mod_base = OTHER; note = 2'-O-methyluridine-3'-phosphate
  modified_base 15: mod_base = OTHER; note = 2'-O-methylguanosine-3'-phosphate
  modified_base 16: mod_base = OTHER; note = 2'-O-methylguanosine-3'-phosphate
  modified_base 17: mod_base = OTHER; note = 2'-O-methylguanosine-3'-phosphate
  modified_base 18: mod_base = OTHER; note = 2'-O-methyladenosine-3'-phosphate
  modified_base 19: mod_base = OTHER; note = 2'-O-methylcytidine-3'-phosphate
  modified_base 20: mod_base = OTHER; note = 2'-O-methyladenosine-3'-phosphate
  modified_base 21: mod_base = OTHER; note = 2'-O-methyluridine
ttgtgtcacagagtgggacat

SEQ ID NO: 1927 - RNA, 23 nt, synthetic construct
  source 1..23: mol_type = other RNA
  modified_base 1: mod_base = OTHER; note = 2'-O-methyladenosine-3'-phosphorothioate
  modified_base 2: mod_base = OTHER; note = 2'-fluorouridine-3'-phosphorothioate
  modified_base 3: mod_base = OTHER; note = 2'-O-methylguanosine-3'-phosphate
  modified_base 4: mod_base = OTHER; note = 2'-O-methyluridine-3'-phosphate
  modified_base 5: mod_base = OTHER; note = 2'-O-methylcytidine-3'-phosphate
  modified_base 6: mod_base = OTHER; note = 2'-O-methylcytidine-3'-phosphate
  modified_base 7: mod_base = OTHER; note = 2'-fluorocytidine-3'-phosphate
  modified_base 8: mod_base = OTHER; note = 2'-O-methyladenosine-3'-phosphate
  modified_base 9: mod_base = OTHER; note = 2'-O-methylcytidine-3'-phosphate
  modified_base 10: mod_base = OTHER; note = 2'-O-methyluridine-3'-phosphate
  modified_base 11: mod_base = OTHER; note = 2'-O-methylcytidine-3'-phosphate
  modified_base 12: mod_base = OTHER; note = 2'-fluorouridine-3'-phosphate
  modified_base 13: mod_base = OTHER; note = 2'-O-methylguanosine-3'-phosphate
  modified_base 14: mod_base = OTHER; note = 2'-fluorouridine-3'-phosphate
  modified_base 15: mod_base = OTHER; note = 2'-O-methylguanosine-3'-phosphate
  modified_base 16: mod_base = OTHER; note = 2'-fluoroadenosine-3'-phosphate
  modified_base 17: mod_base = OTHER; note = 2'-O-methylcytidine-3'-phosphate
  modified_base 18: mod_base = OTHER; note = 2'-O-methyladenosine-3'-phosphate
  modified_base 19: mod_base = OTHER; note = 2'-O-methylcytidine-3'-phosphate
  modified_base 20: mod_base = OTHER; note = 2'-O-methyladenosine-3'-phosphate
  modified_base 21: mod_base = OTHER; note = 2'-O-methyladenosine-3'-phosphorothioate
  modified_base 22: mod_base = OTHER; note = 2'-O-methyladenosine-3'-phosphorothioate
  modified_base 23: mod_base = OTHER; note = 2'-O-methylguanosine
atgtcccactctgtgacacaaag

SEQ ID NO: 1928 - RNA, 21 nt, synthetic construct
  source 1..21: mol_type = other RNA
  modified_base 1: mod_base = OTHER; note = 2'-O-methylcytidine-3'-phosphorothioate
  modified_base 2: mod_base = OTHER; note = 2'-O-methyluridine-3'-phosphorothioate
  modified_base 3: mod_base = OTHER; note = 2'-O-methylguanosine-3'-phosphate
  modified_base 4: mod_base = OTHER; note = 2'-O-methyladenosine-3'-phosphate
  modified_base 5: mod_base = OTHER; note = 2'-O-methyluridine-3'-phosphate
  modified_base 6: mod_base = OTHER; note = 2'-O-methylcytidine-3'-phosphate
  modified_base 7: mod_base = OTHER; note = 2'-fluorocytidine-3'-phosphate
  modified_base 8: mod_base = OTHER; note = 2'-O-methyladenosine-3'-phosphate
  modified_base 9: mod_base = OTHER; note = 2'-fluorocytidine-3'-phosphate
  modified_base 10: mod_base = OTHER; note = 2'-fluorouridine-3'-phosphate
  modified_base 11: mod_base = OTHER; note = 2'-fluorouridine-3'-phosphate
  modified_base 12: mod_base = OTHER; note = 2'-O-methylcytidine-3'-phosphate
  modified_base 13: mod_base = OTHER; note = 2'-O-methyluridine-3'-phosphate
  modified_base 14: mod_base = OTHER; note = 2'-O-methylcytidine-3'-phosphate
  modified_base 15: mod_base = OTHER; note = 2'-O-methyluridine-3'-phosphate
  modified_base 16: mod_base = OTHER; note = 2'-O-methylguanosine-3'-phosphate
  modified_base 17: mod_base = OTHER; note = 2'-O-methylcytidine-3'-phosphate
  modified_base 18: mod_base = OTHER; note = 2'-O-methylcytidine-3'-phosphate
  modified_base 19: mod_base = OTHER; note = 2'-O-methyladenosine-3'-phosphate
  modified_base 20: mod_base = OTHER; note = 2'-O-methyladenosine-3'-phosphate
  modified_base 21: mod_base = OTHER; note = 2'-O-methyladenosine
ctgatccacttctctgccaaa

SEQ ID NO: 1929 - RNA, 23 nt, synthetic construct
  source 1..23: mol_type = other RNA
  modified_base 1: mod_base = OTHER; note = 2'-O-methyluridine-3'-phosphorothioate
  modified_base 2: mod_base = OTHER; note = 2'-fluorouridine-3'-phosphorothioate
  modified_base 3: mod_base = OTHER; note = 2'-O-methyluridine-3'-phosphate
  modified_base 4: mod_base = OTHER; note = 2'-O-methylguanosine-3'-phosphate
  modified_base 5: mod_base = OTHER; note = 2'-O-methylguanosine-3'-phosphate
  modified_base 6: mod_base = OTHER; note = 2'-O-methylcytidine-3'-phosphate
  modified_base 7: mod_base = OTHER; note = 2'-fluoroadenosine-3'-phosphate
  modified_base 8: mod_base = OTHER; note = 2'-O-methylguanosine-3'-phosphate
  modified_base 9: mod_base = OTHER; note = 2'-O-methyladenosine-3'-phosphate
  modified_base 10: mod_base = OTHER; note = 2'-O-methylguanosine-3'-phosphate
  modified_base 11: mod_base = OTHER; note = 2'-O-methyladenosine-3'-phosphate
  modified_base 12: mod_base = OTHER; note = 2'-fluoroadenosine-3'-phosphate
  modified_base 13: mod_base = OTHER; note = 2'-O-methylguanosine-3'-phosphate
  modified_base 14: mod_base = OTHER; note = 2'-fluorouridine-3'-phosphate
  modified_base 15: mod_base = OTHER; note = 2'-O-methylguanosine-3'-phosphate
  modified_base 16: mod_base = OTHER; note = 2'-fluoroguanosine-3'-phosphate
  modified_base 17: mod_base = OTHER; note = 2'-O-methyladenosine-3'-phosphate
  modified_base 18: mod_base = OTHER; note = 2'-O-methyluridine-3'-phosphate
  modified_base 19: mod_base = OTHER; note = 2'-O-methylcytidine-3'-phosphate
  modified_base 20: mod_base = OTHER; note = 2'-O-methyladenosine-3'-phosphate
  modified_base 21: mod_base = OTHER; note = 2'-O-methylguanosine-3'-phosphorothioate
  modified_base 22: mod_base = OTHER; note = 2'-O-methyluridine-3'-phosphorothioate
  modified_base 23: mod_base = OTHER; note = 2'-O-methylcytidine
tttggcagagaagtggatcagtc

SEQ ID NO: 1930 - RNA, 21 nt, synthetic construct
  source 1..21: mol_type = other RNA
  modified_base 1: mod_base = OTHER; note = 2'-O-methyladenosine-3'-phosphorothioate
  modified_base 2: mod_base = OTHER; note = 2'-O-methyluridine-3'-phosphorothioate
  modified_base 3: mod_base = OTHER; note = 2'-O-methylcytidine-3'-phosphate
  modified_base 4: mod_base = OTHER; note = 2'-O-methylcytidine-3'-phosphate
  modified_base 5: mod_base = OTHER; note = 2'-O-methyladenosine-3'-phosphate
  modified_base 6: mod_base = OTHER; note = 2'-O-methylcytidine-3'-phosphate
  modified_base 7: mod_base = OTHER; note = 2'-fluorouridine-3'-phosphate
  modified_base 8: mod_base = OTHER; note = 2'-O-methyluridine-3'-phosphate
  modified_base 9: mod_base = OTHER; note = 2'-fluorocytidine-3'-phosphate
  modified_base 10: mod_base = OTHER; note = 2'-fluorouridine-3'-phosphate
  modified_base 11: mod_base = OTHER; note = 2'-fluorocytidine-3'-phosphate
  modified_base 12: mod_base = OTHER; note = 2'-O-methyluridine-3'-phosphate
  modified_base 13: mod_base = OTHER; note = 2'-O-methylguanosine-3'-phosphate
  modified_base 14: mod_base = OTHER; note = 2'-O-methylcytidine-3'-phosphate
  modified_base 15: mod_base = OTHER; note = 2'-O-methylcytidine-3'-phosphate
  modified_base 16: mod_base = OTHER; note = 2'-O-methyladenosine-3'-phosphate
  modified_base 17: mod_base = OTHER; note = 2'-O-methyladenosine-3'-phosphate
  modified_base 18: mod_base = OTHER; note = 2'-O-methyladenosine-3'-phosphate
  modified_base 19: mod_base = OTHER; note = 2'-O-methylguanosine-3'-phosphate
  modified_base 20: mod_base = OTHER; note = 2'-O-methyladenosine-3'-phosphate
  modified_base 21: mod_base = OTHER; note = 2'-O-methyluridine
atccacttctctgccaaagat

SEQ ID NO: 1931 - RNA, 23 nt, synthetic construct
  source 1..23: mol_type = other RNA
  modified_base 1: mod_base = OTHER; note = 2'-O-methyladenosine-3'-phosphorothioate
  modified_base 2: mod_base = OTHER; note = 2'-fluorouridine-3'-phosphorothioate
  modified_base 3: mod_base = OTHER; note = 2'-O-methylcytidine-3'-phosphate
  modified_base 4: mod_base = OTHER; note = 2'-O-methyluridine-3'-phosphate
  modified_base 5: mod_base = OTHER; note = 2'-O-methyluridine-3'-phosphate
  modified_base 6: mod_base = OTHER; note = 2'-O-methyluridine-3'-phosphate
  modified_base 7: mod_base = OTHER; note = 2'-fluoroguanosine-3'-phosphate
  modified_base 8: mod_base = OTHER; note = 2'-O-methylguanosine-3'-phosphate
  modified_base 9: mod_base = OTHER; note = 2'-O-methylcytidine-3'-phosphate
  modified_base 10: mod_base = OTHER; note = 2'-O-methyladenosine-3'-phosphate
  modified_base 11: mod_base = OTHER; note = 2'-O-methylguanosine-3'-phosphate
  modified_base 12: mod_base = OTHER; note = 2'-fluoroadenosine-3'-phosphate
  modified_base 13: mod_base = OTHER; note = 2'-O-methylguanosine-3'-phosphate
  modified_base 14: mod_base = OTHER; note = 2'-fluoroadenosine-3'-phosphate
  modified_base 15: mod_base = OTHER; note = 2'-O-methyladenosine-3'-phosphate
  modified_base 16: mod_base = OTHER; note = 2'-fluoroguanosine-3'-phosphate
  modified_base 17: mod_base = OTHER; note = 2'-O-methyluridine-3'-phosphate
  modified_base 18: mod_base = OTHER; note = 2'-O-methylguanosine-3'-phosphate
  modified_base 19: mod_base = OTHER; note = 2'-O-methylguanosine-3'-phosphate
  modified_base 20: mod_base = OTHER; note = 2'-O-methyladenosine-3'-phosphate
  modified_base 21: mod_base = OTHER; note = 2'-O-methyluridine-3'-phosphorothioate
  modified_base 22: mod_base = OTHER; note = 2'-O-methylcytidine-3'-phosphorothioate
  modified_base 23: mod_base = OTHER; note = 2'-O-methyladenosine
atctttggcagagaagtggatca

SEQ ID NO: 1932 - RNA, 21 nt, synthetic construct
  source 1..21: mol_type = other RNA
  modified_base 1: mod_base = OTHER; note = 2'-O-methyluridine-3'-phosphorothioate
  modified_base 2: mod_base = OTHER; note = 2'-O-methylcytidine-3'-phosphorothioate
  modified_base 3: mod_base = OTHER; note = 2'-O-methyluridine-3'-phosphate
  modified_base 4: mod_base = OTHER; note = 2'-O-methylcytidine-3'-phosphate
  modified_base 5: mod_base = OTHER; note = 2'-O-methyluridine-3'-phosphate
  modified_base 6: mod_base = OTHER; note = 2'-O-methylguanosine-3'-phosphate
  modified_base 7: mod_base = OTHER; note = 2'-fluorocytidine-3'-phosphate
  modified_base 8: mod_base = OTHER; note = 2'-O-methylcytidine-3'-phosphate
  modified_base 9: mod_base = OTHER; note = 2'-fluoroadenosine-3'-phosphate
  modified_base 10: mod_base = OTHER; note = 2'-fluoroadenosine-3'-phosphate
  modified_base 11: mod_base = OTHER; note = 2'-fluoroadenosine-3'-phosphate
  modified_base 12: mod_base = OTHER; note = 2'-O-methylguanosine-3'-phosphate
  modified_base 13: mod_base = OTHER; note = 2'-O-methyladenosine-3'-phosphate
  modified_base 14: mod_base = OTHER; note = 2'-O-methyluridine-3'-phosphate
  modified_base 15: mod_base = OTHER; note = 2'-O-methylguanosine-3'-phosphate
  modified_base 16: mod_base = OTHER; note = 2'-O-methyluridine-3'-phosphate
  modified_base 17: mod_base = OTHER; note = 2'-O-methylcytidine-3'-phosphate
  modified_base 18: mod_base = OTHER; note = 2'-O-methyladenosine-3'-phosphate
  modified_base 19: mod_base = OTHER; note = 2'-O-methyluridine-3'-phosphate
  modified_base 20: mod_base = OTHER; note = 2'-O-methylcytidine-3'-phosphate
  modified_base 21: mod_base = OTHER; note = 2'-O-methyladenosine
tctctgccaaagatgtcatca

SEQ ID NO: 1933 - RNA, 23 nt, synthetic construct
  source 1..23: mol_type = other RNA
  modified_base 1: mod_base = OTHER; note = 2'-O-methyluridine-3'-phosphorothioate
  modified_base 2: mod_base = OTHER; note = 2'-fluoroguanosine-3'-phosphorothioate
  modified_base 3: mod_base = OTHER; note = 2'-O-methyladenosine-3'-phosphate
  modified_base 4: mod_base = OTHER; note = 2'-O-methyluridine-3'-phosphate
  modified_base 5: mod_base = OTHER; note = 2'-O-methylguanosine-3'-phosphate
  modified_base 6: mod_base = OTHER; note = 2'-O-methyladenosine-3'-phosphate
  modified_base 7: mod_base = OTHER; note = 2'-fluorocytidine-3'-phosphate
  modified_base 8: mod_base = OTHER; note = 2'-O-methyladenosine-3'-phosphate
  modified_base 9: mod_base = OTHER; note = 2'-O-methyluridine-3'-phosphate
  modified_base 10: mod_base = OTHER; note = 2'-O-methylcytidine-3'-phosphate
  modified_base 11: mod_base = OTHER; note = 2'-O-methyluridine-3'-phosphate
  modified_base 12: mod_base = OTHER; note = 2'-fluorouridine-3'-phosphate
  modified_base 13: mod_base = OTHER; note = 2'-O-methyluridine-3'-phosphate
  modified_base 14: mod_base = OTHER; note = 2'-fluoroguanosine-3'-phosphate
  modified_base 15: mod_base = OTHER; note = 2'-O-methylguanosine-3'-phosphate
  modified_base 16: mod_base = OTHER; note = 2'-fluorocytidine-3'-phosphate
  modified_base 17: mod_base = OTHER; note = 2'-O-methyladenosine-3'-phosphate
  modified_base 18: mod_base = OTHER; note = 2'-O-methylguanosine-3'-phosphate
  modified_base 19: mod_base = OTHER; note = 2'-O-methyladenosine-3'-phosphate
  modified_base 20: mod_base = OTHER; note = 2'-O-methylguanosine-3'-phosphate
  modified_base 21: mod_base = OTHER; note = 2'-O-methyladenosine-3'-phosphorothioate
  modified_base 22: mod_base = OTHER; note = 2'-O-methyladenosine-3'-phosphorothioate
  modified_base 23: mod_base = OTHER; note = 2'-O-methylguanosine
tgatgacatctttggcagagaag

SEQ ID NO: 1934 - RNA, 21 nt, synthetic construct
  source 1..21: mol_type = other RNA
  modified_base 1: mod_base = OTHER; note = 2'-O-methyluridine-3'-phosphorothioate
  modified_base 2: mod_base = OTHER; note = 2'-O-methylguanosine-3'-phosphorothioate
  modified_base 3: mod_base = OTHER; note = 2'-O-methyluridine-3'-phosphate
  modified_base 4: mod_base = OTHER; note = 2'-O-methylcytidine-3'-phosphate
  modified_base 5: mod_base = OTHER; note = 2'-O-methyladenosine-3'-phosphate
  modified_base 6: mod_base = OTHER; note = 2'-O-methyluridine-3'-phosphate
  modified_base 7: mod_base = OTHER; note = 2'-fluorocytidine-3'-phosphate
  modified_base 8: mod_base = OTHER; note = 2'-O-methyladenosine-3'-phosphate
  modified_base 9: mod_base = OTHER; note = 2'-fluoroadenosine-3'-phosphate
  modified_base 10: mod_base = OTHER; note = 2'-fluorouridine-3'-phosphate
  modified_base 11: mod_base = OTHER; note = 2'-fluoroguanosine-3'-phosphate
  modified_base 12: mod_base = OTHER; note = 2'-O-methyladenosine-3'-phosphate
  modified_base 13: mod_base = OTHER; note = 2'-O-methylguanosine-3'-phosphate
  modified_base 14: mod_base = OTHER; note = 2'-O-methylguanosine-3'-phosphate
  modified_base 15: mod_base = OTHER; note = 2'-O-methylcytidine-3'-phosphate
  modified_base 16: mod_base = OTHER; note = 2'-O-methylcytidine-3'-phosphate
  modified_base 17: mod_base = OTHER; note = 2'-O-methyluridine-3'-phosphate
  modified_base 18: mod_base = OTHER; note = 2'-O-methylguanosine-3'-phosphate
  modified_base 19: mod_base = OTHER; note = 2'-O-methylguanosine-3'-phosphate
  modified_base 20: mod_base = OTHER; note = 2'-O-methyluridine-3'-phosphate
  modified_base 21: mod_base = OTHER; note = 2'-O-methyluridine
tgtcatcaatgaggcctggtt

SEQ ID NO: 1935 - RNA, 23 nt, synthetic construct
  source 1..23: mol_type = other RNA
  modified_base 1: mod_base = OTHER; note = 2'-O-methyladenosine-3'-phosphorothioate
  modified_base 2: mod_base = OTHER; note = 2'-fluoroadenosine-3'-phosphorothioate
  modified_base 3: mod_base = OTHER; note = 2'-O-methylcytidine-3'-phosphate
  modified_base 4: mod_base = OTHER; note = 2'-O-methylcytidine-3'-phosphate
  modified_base 5: mod_base = OTHER; note = 2'-O-methyladenosine-3'-phosphate
  modified_base 6: mod_base = OTHER; note = 2'-O-methylguanosine-3'-phosphate
  modified_base 7: mod_base = OTHER; note = 2'-fluoroguanosine-3'-phosphate
  modified_base 8: mod_base = OTHER; note = 2'-O-methylcytidine-3'-phosphate
  modified_base 9: mod_base = OTHER; note = 2'-O-methylcytidine-3'-phosphate
  modified_base 10: mod_base = OTHER; note = 2'-O-methyluridine-3'-phosphate
  modified_base 11: mod_base = OTHER; note = 2'-O-methylcytidine-3'-phosphate
  modified_base 12: mod_base = OTHER; note = 2'-fluoroadenosine-3'-phosphate
  modified_base 13: mod_base = OTHER; note = 2'-O-methyluridine-3'-phosphate
  modified_base 14: mod_base = OTHER; note = 2'-fluorouridine-3'-phosphate
  modified_base 15: mod_base = OTHER; note = 2'-O-methylguanosine-3'-phosphate
  modified_base 16: mod_base = OTHER; note = 2'-fluoroadenosine-3'-phosphate
  modified_base 17: mod_base = OTHER; note = 2'-O-methyluridine-3'-phosphate
  modified_base 18: mod_base = OTHER; note = 2'-O-methylguanosine-3'-phosphate
  modified_base 19: mod_base = OTHER; note = 2'-O-methyladenosine-3'-phosphate
  modified_base 20: mod_base = OTHER; note = 2'-O-methylcytidine-3'-phosphate
  modified_base 21: mod_base = OTHER; note = 2'-O-methyladenosine-3'-phosphorothioate
  modified_base 22: mod_base = OTHER; note = 2'-O-methyluridine-3'-phosphorothioate
  modified_base 23: mod_base = OTHER; note = 2'-O-methylcytidine
aaccaggcctcattgatgacatc

SEQ ID NO: 1936 - RNA, 21 nt, synthetic construct
  source 1..21: mol_type = other RNA
  modified_base 1: mod_base = OTHER; note = 2'-O-methyladenosine-3'-phosphorothioate
  modified_base 2: mod_base = OTHER; note = 2'-O-methylguanosine-3'-phosphorothioate
  modified_base 3: mod_base = OTHER; note = 2'-O-methylcytidine-3'-phosphate
  modified_base 4: mod_base = OTHER; note = 2'-O-methyluridine-3'-phosphate
  modified_base 5: mod_base = OTHER; note = 2'-O-methylguanosine-3'-phosphate
  modified_base 6: mod_base = OTHER; note = 2'-O-methyluridine-3'-phosphate
  modified_base 7: mod_base = OTHER; note = 2'-fluorouridine-3'-phosphate
  modified_base 8: mod_base = OTHER; note = 2'-O-methyluridine-3'-phosphate
  modified_base 9: mod_base = OTHER; note = 2'-fluorouridine-3'-phosphate
  modified_base 10: mod_base = OTHER; note = 2'-fluoroguanosine-3'-phosphate
  modified_base 11: mod_base = OTHER; note = 2'-fluorocytidine-3'-phosphate
  modified_base 12: mod_base = OTHER; note = 2'-O-methyladenosine-3'-phosphate
  modified_base 13: mod_base = OTHER; note = 2'-O-methylguanosine-3'-phosphate
  modified_base 14: mod_base = OTHER; note = 2'-O-methylguanosine-3'-phosphate
  modified_base 15: mod_base = OTHER; note = 2'-O-methyladenosine-3'-phosphate
  modified_base 16: mod_base = OTHER; note = 2'-O-methylcytidine-3'-phosphate
  modified_base 17: mod_base = OTHER; note = 2'-O-methyluridine-3'-phosphate
  modified_base 18: mod_base = OTHER; note = 2'-O-methylguanosine-3'-phosphate
  modified_base 19: mod_base = OTHER; note = 2'-O-methyluridine-3'-phosphate
  modified_base 20: mod_base = OTHER; note = 2'-O-methyladenosine-3'-phosphate
  modified_base 21: mod_base = OTHER; note = 2'-O-methyluridine
agctgttttgcaggactgtat

SEQ ID NO: 1937 - RNA, 23 nt, synthetic construct
  source 1..23: mol_type = other RNA
  modified_base 1: mod_base = OTHER; note = 2'-O-methyladenosine-3'-phosphorothioate
  modified_base 2: mod_base = OTHER; note = 2'-fluorouridine-3'-phosphorothioate
  modified_base 3: mod_base = OTHER; note = 2'-O-methyladenosine-3'-phosphate
  modified_base 4: mod_base = OTHER; note = 2'-O-methylcytidine-3'-phosphate
  modified_base 5: mod_base = OTHER; note = 2'-O-methyladenosine-3'-phosphate
  modified_base 6: mod_base = OTHER; note = 2'-O-methylguanosine-3'-phosphate
  modified_base 7: mod_base = OTHER; note = 2'-fluorouridine-3'-phosphate
  modified_base 8: mod_base = OTHER; note = 2'-O-methylcytidine-3'-phosphate
  modified_base 9: mod_base = OTHER; note = 2'-O-methylcytidine-3'-phosphate
  modified_base 10: mod_base = OTHER; note = 2'-O-methyluridine-3'-phosphate
  modified_base 11: mod_base = OTHER; note = 2'-O-methylguanosine-3'-phosphate
  modified_base 12: mod_base = OTHER; note = 2'-fluorocytidine-3'-phosphate
  modified_base 13: mod_base = OTHER; note = 2'-O-methyladenosine-3'-phosphate
  modified_base 14: mod_base = OTHER; note = 2'-fluoroadenosine-3'-phosphate
  modified_base 15: mod_base = OTHER; note = 2'-O-methyladenosine-3'-phosphate
  modified_base 16: mod_base = OTHER; note = 2'-fluoroadenosine-3'-phosphate
  modified_base 17: mod_base = OTHER; note = 2'-O-methylcytidine-3'-phosphate
  modified_base 18: mod_base = OTHER; note = 2'-O-methyladenosine-3'-phosphate
  modified_base 19: mod_base = OTHER; note = 2'-O-methylguanosine-3'-phosphate
  modified_base 20: mod_base = OTHER; note = 2'-O-methylcytidine-3'-phosphate
  modified_base 21: mod_base = OTHER; note = 2'-O-methyluridine-3'-phosphorothioate
  modified_base 22: mod_base = OTHER; note = 2'-O-methylguanosine-3'-phosphorothioate
  modified_base 23: mod_base = OTHER; note = 2'-O-methylcytidine
atacagtcctgcaaaacagctgc

SEQ ID NO: 1938 - RNA, 21 nt, synthetic construct
  source 1..21: mol_type = other RNA
  modified_base 1: mod_base = OTHER; note = 2'-O-methylcytidine-3'-phosphorothioate
  modified_base 2: mod_base = OTHER; note = 2'-O-methyluridine-3'-phosphorothioate
  modified_base 3: mod_base = OTHER; note = 2'-O-methylguanosine-3'-phosphate
  modified_base 4: mod_base = OTHER; note = 2'-O-methyluridine-3'-phosphate
  modified_base 5: mod_base = OTHER; note = 2'-O-methyluridine-3'-phosphate
  modified_base 6: mod_base = OTHER; note = 2'-O-methyluridine-3'-phosphate
  modified_base 7: mod_base = OTHER; note = 2'-fluorouridine-3'-phosphate
  modified_base 8: mod_base = OTHER; note = 2'-O-methylguanosine-3'-phosphate
  modified_base 9: mod_base = OTHER; note = 2'-fluorocytidine-3'-phosphate
  modified_base 10: mod_base = OTHER; note = 2'-fluoroadenosine-3'-phosphate
  modified_base 11: mod_base = OTHER; note = 2'-fluoroguanosine-3'-phosphate
  modified_base 12: mod_base = OTHER; note = 2'-O-methylguanosine-3'-phosphate
  modified_base 13: mod_base = OTHER; note = 2'-O-methyladenosine-3'-phosphate
  modified_base 14: mod_base = OTHER; note = 2'-O-methylcytidine-3'-phosphate
  modified_base 15: mod_base = OTHER; note = 2'-O-methyluridine-3'-phosphate
  modified_base 16: mod_base = OTHER; note = 2'-O-methylguanosine-3'-phosphate
  modified_base 17: mod_base = OTHER; note = 2'-O-methyluridine-3'-phosphate
  modified_base 18: mod_base = OTHER; note = 2'-O-methyladenosine-3'-phosphate
  modified_base 19: mod_base = OTHER; note = 2'-O-methyluridine-3'-phosphate
  modified_base 20: mod_base = OTHER; note = 2'-O-methylguanosine-3'-phosphate
  modified_base 21: mod_base = OTHER; note = 2'-O-methylguanosine
ctgttttgcaggactgtatgg

SEQ ID NO: 1939 - RNA, 23 nt, synthetic construct
  source 1..23: mol_type = other RNA
  modified_base 1: mod_base = OTHER; note = 2'-O-methylcytidine-3'-phosphorothioate
  modified_base 2: mod_base = OTHER; note = 2'-fluorocytidine-3'-phosphorothioate
  modified_base 3: mod_base = OTHER; note = 2'-O-methyladenosine-3'-phosphate
  modified_base 4: mod_base = OTHER; note = 2'-O-methyluridine-3'-phosphate
  modified_base 5: mod_base = OTHER; note = 2'-O-methyladenosine-3'-phosphate
  modified_base 6: mod_base = OTHER; note = 2'-O-methylcytidine-3'-phosphate
  modified_base 7: mod_base = OTHER; note = 2'-fluoroadenosine-3'-phosphate
  modified_base 8: mod_base = OTHER; note = 2'-O-methylguanosine-3'-phosphate
  modified_base 9: mod_base = OTHER; note = 2'-O-methyluridine-3'-phosphate
  modified_base 10: mod_base = OTHER; note = 2'-O-methylcytidine-3'-phosphate
  modified_base 11: mod_base = OTHER; note = 2'-O-methylcytidine-3'-phosphate
  modified_base 12: mod_base = OTHER; note = 2'-fluorouridine-3'-phosphate
  modified_base 13: mod_base = OTHER; note = 2'-O-methylguanosine-3'-phosphate
  modified_base 14: mod_base = OTHER; note = 2'-fluorocytidine-3'-phosphate
  modified_base 15: mod_base = OTHER; note = 2'-O-methyladenosine-3'-phosphate
  modified_base 16: mod_base = OTHER; note = 2'-fluoroadenosine-3'-phosphate
  modified_base 17: mod_base = OTHER; note = 2'-O-methyladenosine-3'-phosphate
  modified_base 18: mod_base = OTHER; note = 2'-O-methyladenosine-3'-phosphate
  modified_base 19: mod_base = OTHER; note = 2'-O-methylcytidine-3'-phosphate
  modified_base 20: mod_base = OTHER; note = 2'-O-methyladenosine-3'-phosphate
  modified_base 21: mod_base = OTHER; note = 2'-O-methylguanosine-3'-phosphorothioate
  modified_base 22: mod_base = OTHER; note = 2'-O-methylcytidine-3'-phosphorothioate
  modified_base 23: mod_base = OTHER; note = 2'-O-methyluridine
ccatacagtcctgcaaaacagct

SEQ ID NO: 1940 - RNA, 21 nt, synthetic construct
  source 1..21: mol_type = other RNA
  modified_base 1: mod_base = OTHER; note = 2'-O-methylguanosine-3'-phosphorothioate
  modified_base 2: mod_base = OTHER; note = 2'-O-methylguanosine-3'-phosphorothioate
  modified_base 3: mod_base = OTHER; note = 2'-O-methyladenosine-3'-phosphate
  modified_base 4: mod_base = OTHER; note = 2'-O-methylcytidine-3'-phosphate
  modified_base 5: mod_base = OTHER; note = 2'-O-methyluridine-3'-phosphate
  modified_base 6: mod_base = OTHER; note = 2'-O-methylguanosine-3'-phosphate
  modified_base 7: mod_base = OTHER; note = 2'-fluorouridine-3'-phosphate
  modified_base 8: mod_base = OTHER; note = 2'-O-methyladenosine-3'-phosphate
  modified_base 9: mod_base = OTHER; note = 2'-fluorouridine-3'-phosphate
  modified_base 10: mod_base = OTHER; note = 2'-fluoroguanosine-3'-phosphate
  modified_base 11: mod_base = OTHER; note = 2'-fluoroguanosine-3'-phosphate
  modified_base 12: mod_base = OTHER; note = 2'-O-methyluridine-3'-phosphate
  modified_base 13: mod_base = OTHER; note = 2'-O-methylcytidine-3'-phosphate
  modified_base 14: mod_base = OTHER; note = 2'-O-methyladenosine-3'-phosphate
  modified_base 15: mod_base = OTHER; note = 2'-O-methylguanosine-3'-phosphate
  modified_base 16: mod_base = OTHER; note = 2'-O-methylcytidine-3'-phosphate
  modified_base 17: mod_base = OTHER; note = 2'-O-methyladenosine-3'-phosphate
  modified_base 18: mod_base = OTHER; note = 2'-O-methylcytidine-3'-phosphate
  modified_base 19: mod_base = OTHER; note = 2'-O-methyladenosine-3'-phosphate
  modified_base 20: mod_base = OTHER; note = 2'-O-methylcytidine-3'-phosphate
  modified_base 21: mod_base = OTHER; note = 2'-O-methyluridine
ggactgtatggtcagcacact

SEQ ID NO: 1941 - RNA, 23 nt, synthetic construct
  source 1..23: mol_type = other RNA
  modified_base 1: mod_base = OTHER; note = 2'-O-methyladenosine-3'-phosphorothioate
  modified_base 2: mod_base = OTHER; note = 2'-fluoroguanosine-3'-phosphorothioate
  modified_base 3: mod_base = OTHER; note = 2'-O-methyluridine-3'-phosphate
  modified_base 4: mod_base = OTHER; note = 2'-O-methylguanosine-3'-phosphate
  modified_base 5: mod_base = OTHER; note = 2'-O-methyluridine-3'-phosphate
  modified_base 6: mod_base = OTHER; note = 2'-O-methylguanosine-3'-phosphate
  modified_base 7: mod_base = OTHER; note = 2'-fluorocytidine-3'-phosphate
  modified_base 8: mod_base = OTHER; note = 2'-O-methyluridine-3'-phosphate
  modified_base 9: mod_base = OTHER; note = 2'-O-methylguanosine-3'-phosphate
  modified_base 10: mod_base = OTHER; note = 2'-O-methyladenosine-3'-phosphate
  modified_base 11: mod_base = OTHER; note = 2'-O-methylcytidine-3'-phosphate
  modified_base 12: mod_base = OTHER; note = 2'-fluorocytidine-3'-phosphate
  modified_base 13: mod_base = OTHER; note = 2'-O-methyladenosine-3'-phosphate
  modified_base 14: mod_base = OTHER; note = 2'-fluorouridine-3'-phosphate
  modified_base 15: mod_base = OTHER; note = 2'-O-methyladenosine-3'-phosphate
  modified_base 16: mod_base = OTHER; note = 2'-fluorocytidine-3'-phosphate
  modified_base 17: mod_base = OTHER; note = 2'-O-methyladenosine-3'-phosphate
  modified_base 18: mod_base = OTHER; note = 2'-O-methylguanosine-3'-phosphate
  modified_base 19: mod_base = OTHER; note = 2'-O-methyluridine-3'-phosphate
  modified_base 20: mod_base = OTHER; note = 2'-O-methylcytidine-3'-phosphate
  modified_base 21: mod_base = OTHER; note = 2'-O-methylcytidine-3'-phosphorothioate
  modified_base 22: mod_base = OTHER; note = 2'-O-methyluridine-3'-phosphorothioate
  modified_base 23: mod_base = OTHER; note = 2'-O-methylguanosine
agtgtgctgaccatacagtcctg

SEQ ID NO: 1942 - RNA, 21 nt, synthetic construct
  source 1..21: mol_type = other RNA
  modified_base 1: mod_base = OTHER; note = 2'-O-methyladenosine-3'-phosphorothioate
  modified_base 2: mod_base = OTHER; note = 2'-O-methylcytidine-3'-phosphorothioate
  modified_base 3: mod_base = OTHER; note = 2'-O-methyluridine-3'-phosphate
  modified_base 4: mod_base = OTHER; note = 2'-O-methylguanosine-3'-phosphate
  modified_base 5: mod_base = OTHER; note = 2'-O-methyluridine-3'-phosphate
  modified_base 6: mod_base = OTHER; note = 2'-O-methyladenosine-3'-phosphate
  modified_base 7: mod_base = OTHER; note = 2'-fluorouridine-3'-phosphate
  modified_base 8: mod_base = OTHER; note = 2'-O-methylguanosine-3'-phosphate
  modified_base 9: mod_base = OTHER; note = 2'-fluoroguanosine-3'-phosphate
  modified_base 10: mod_base = OTHER; note = 2'-fluorouridine-3'-phosphate
  modified_base 11: mod_base = OTHER; note = 2'-fluorocytidine-3'-phosphate
  modified_base 12: mod_base = OTHER; note = 2'-O-methyladenosine-3'-phosphate
  modified_base 13: mod_base = OTHER; note = 2'-O-methylguanosine-3'-phosphate
  modified_base 14: mod_base = OTHER; note = 2'-O-methylcytidine-3'-phosphate
  modified_base 15: mod_base = OTHER; note = 2'-O-methyladenosine-3'-phosphate
  modified_base 16: mod_base = OTHER; note = 2'-O-methylcytidine-3'-phosphate
  modified_base 17: mod_base = OTHER; note = 2'-O-methyladenosine-3'-phosphate
  modified_base 18: mod_base = OTHER; note = 2'-O-methylcytidine-3'-phosphate
  modified_base 19: mod_base = OTHER; note = 2'-O-methyluridine-3'-phosphate
  modified_base 20: mod_base = OTHER; note = 2'-O-methylcytidine-3'-phosphate
  modified_base 21: mod_base = OTHER; note = 2'-O-methylguanosine
actgtatggtcagcacactcg

SEQ ID NO: 1943 - RNA, 23 nt, synthetic construct
  source 1..23: mol_type = other RNA
  modified_base 1: mod_base = OTHER; note = 2'-O-methylcytidine-3'-phosphorothioate
  modified_base 2: mod_base = OTHER; note = 2'-fluoroguanosine-3'-phosphorothioate
  modified_base 3: mod_base = OTHER; note = 2'-O-methyladenosine-3'-phosphate
  modified_base 4: mod_base = OTHER; note = 2'-O-methylguanosine-3'-phosphate
  modified_base 5: mod_base = OTHER; note = 2'-O-methyluridine-3'-phosphate
  modified_base 6: mod_base = OTHER; note = 2'-O-methylguanosine-3'-phosphate
  modified_base 7: mod_base = OTHER; note = 2'-fluorouridine-3'-phosphate
  modified_base 8: mod_base = OTHER; note = 2'-O-methylguanosine-3'-phosphate
  modified_base 9: mod_base = OTHER; note = 2'-O-methylcytidine-3'-phosphate
  modified_base 10: mod_base = OTHER; note = 2'-O-methyluridine-3'-phosphate
  modified_base 11: mod_base = OTHER; note = 2'-O-methylguanosine-3'-phosphate
  modified_base 12: mod_base = OTHER; note = 2'-fluoroadenosine-3'-phosphate
  modified_base 13: mod_base = OTHER; note = 2'-O-methylcytidine-3'-phosphate
  modified_base 14: mod_base = OTHER; note = 2'-fluorocytidine-3'-phosphate
  modified_base 15: mod_base = OTHER; note = 2'-O-methyladenosine-3'-phosphate
  modified_base 16: mod_base = OTHER; note = 2'-fluorouridine-3'-phosphate
  modified_base 17: mod_base = OTHER; note = 2'-O-methyladenosine-3'-phosphate
  modified_base 18: mod_base = OTHER; note = 2'-O-methylcytidine-3'-phosphate
  modified_base 19: mod_base = OTHER; note = 2'-O-methyladenosine-3'-phosphate
  modified_base 20: mod_base = OTHER; note = 2'-O-methylguanosine-3'-phosphate
  modified_base 21: mod_base = OTHER; note = 2'-O-methyluridine-3'-phosphorothioate
  modified_base 22: mod_base = OTHER; note = 2'-O-methylcytidine-3'-phosphorothioate
  modified_base 23: mod_base = OTHER; note = 2'-O-methylcytidine
cgagtgtgctgaccatacagtcc

SEQ ID NO: 1944 - RNA, 21 nt, synthetic construct
  source 1..21: mol_type = other RNA
  modified_base 1: mod_base = OTHER; note = 2'-O-methylcytidine-3'-phosphorothioate
  modified_base 2: mod_base = OTHER; note = 2'-O-methylcytidine-3'-phosphorothioate
  modified_base 3: mod_base = OTHER; note = 2'-O-methylcytidine-3'-phosphate
  modified_base 4: mod_base = OTHER; note = 2'-O-methyladenosine-3'-phosphate
  modified_base 5: mod_base = OTHER; note = 2'-O-methylguanosine-3'-phosphate
  modified_base 6: mod_base = OTHER; note = 2'-O-methylguanosine-3'-phosphate
  modified_base 7: mod_base = OTHER; note = 2'-fluorouridine-3'-phosphate
  modified_base 8: mod_base = OTHER; note = 2'-O-methylcytidine-3'-phosphate
  modified_base 9: mod_base = OTHER; note = 2'-fluorouridine-3'-phosphate
  modified_base 10: mod_base = OTHER; note = 2'-fluoroguanosine-3'-phosphate
  modified_base 11: mod_base = OTHER; note = 2'-fluoroguanosine-3'-phosphate
  modified_base 12: mod_base = OTHER; note = 2'-O-methyladenosine-3'-phosphate
  modified_base 13: mod_base = OTHER; note = 2'-O-methyladenosine-3'-phosphate
  modified_base 14: mod_base = OTHER; note = 2'-O-methyluridine-3'-phosphate
  modified_base 15: mod_base = OTHER; note = 2'-O-methylguanosine-3'-phosphate
  modified_base 16: mod_base = OTHER; note = 2'-O-methylcytidine-3'-phosphate
  modified_base 17: mod_base = OTHER; note = 2'-O-methyladenosine-3'-phosphate
  modified_base 18: mod_base = OTHER; note = 2'-O-methyladenosine-3'-phosphate
  modified_base 19: mod_base = OTHER; note = 2'-O-methyladenosine-3'-phosphate
  modified_base 20: mod_base = OTHER; note = 2'-O-methylguanosine-3'-phosphate
  modified_base 21: mod_base = OTHER; note = 2'-O-methyluridine
cccaggtctggaatgcaaagt

SEQ ID NO: 1945 - RNA, 23 nt, synthetic construct
  source 1..23: mol_type = other RNA
  modified_base 1: mod_base = OTHER; note = 2'-O-methyladenosine-3'-phosphorothioate
  modified_base 2: mod_base = OTHER; note = 2'-fluorocytidine-3'-phosphorothioate
  modified_base 3: mod_base = OTHER; note = 2'-O-methyluridine-3'-phosphate
  modified_base 4: mod_base = OTHER; note = 2'-O-methyluridine-3'-phosphate
  modified_base 5: mod_base = OTHER; note = 2'-O-methyluridine-3'-phosphate
  modified_base 6: mod_base = OTHER; note = 2'-O-methylguanosine-3'-phosphate
  modified_base 7: mod_base = OTHER; note = 2'-fluorocytidine-3'-phosphate
  modified_base 8: mod_base = OTHER; note = 2'-O-methyladenosine-3'-phosphate
  modified_base 9: mod_base = OTHER; note = 2'-O-methyluridine-3'-phosphate
  modified_base 10: mod_base = OTHER; note = 2'-O-methyluridine-3'-phosphate
  modified_base 11: mod_base = OTHER; note = 2'-O-methylcytidine-3'-phosphate
  modified_base 12: mod_base = OTHER; note = 2'-fluorocytidine-3'-phosphate
  modified_base 13: mod_base = OTHER; note = 2'-O-methyladenosine-3'-phosphate
  modified_base 14: mod_base = OTHER; note = 2'-fluoroguanosine-3'-phosphate
  modified_base 15: mod_base = OTHER; note = 2'-O-methyladenosine-3'-phosphate
  modified_base 16: mod_base = OTHER; note = 2'-fluorocytidine-3'-phosphate
  modified_base 17: mod_base = OTHER; note = 2'-O-methylcytidine-3'-phosphate
  modified_base 18: mod_base = OTHER; note = 2'-O-methyluridine-3'-phosphate
  modified_base 19: mod_base = OTHER; note = 2'-O-methylguanosine-3'-phosphate
  modified_base 20: mod_base = OTHER; note = 2'-O-methylguanosine-3'-phosphate
  modified_base 21: mod_base = OTHER; note = 2'-O-methylguanosine-3'-phosphorothioate
  modified_base 22: mod_base = OTHER; note = 2'-O-methylguanosine-3'-phosphorothioate
  modified_base 23: mod_base = OTHER; note = 2'-O-methylcytidine
actttgcattccagacctggggc

SEQ ID NO: 1946 - RNA, 21 nt, synthetic construct
  source 1..21: mol_type = other RNA
  modified_base 1: mod_base = OTHER; note = 2'-O-methyluridine-3'-phosphorothioate
  modified_base 2: mod_base = OTHER; note = 2'-O-methylcytidine-3'-phosphorothioate
  modified_base 3: mod_base = OTHER; note = 2'-O-methyluridine-3'-phosphate
  modified_base 4: mod_base = OTHER; note = 2'-O-methylguanosine-3'-phosphate
  modified_base 5: mod_base = OTHER; note = 2'-O-methylguanosine-3'-phosphate
  modified_base 6: mod_base = OTHER; note = 2'-O-methyladenosine-3'-phosphate
  modified_base 7: mod_base = OTHER; note = 2'-fluoroadenosine-3'-phosphate
  modified_base 8: mod_base = OTHER; note = 2'-O-methyluridine-3'-phosphate
  modified_base 9: mod_base = OTHER; note = 2'-fluoroguanosine-3'-phosphate
  modified_base 10: mod_base = OTHER; note = 2'-fluorocytidine-3'-phosphate
  modified_base 11: mod_base = OTHER; note = 2'-fluoroadenosine-3'-phosphate
  modified_base 12: mod_base = OTHER; note = 2'-O-methyladenosine-3'-phosphate
  modified_base 13: mod_base = OTHER; note = 2'-O-methyladenosine-3'-phosphate
  modified_base 14: mod_base = OTHER; note = 2'-O-methylguanosine-3'-phosphate
  modified_base 15: mod_base = OTHER; note = 2'-O-methyluridine-3'-phosphate
  modified_base 16: mod_base = OTHER; note = 2'-O-methylcytidine-3'-phosphate
  modified_base 17: mod_base = OTHER; note = 2'-O-methyladenosine-3'-phosphate
  modified_base 18: mod_base = OTHER; note = 2'-O-methyladenosine-3'-phosphate
  modified_base 19: mod_base = OTHER; note = 2'-O-methylguanosine-3'-phosphate
  modified_base 20: mod_base = OTHER; note = 2'-O-methylguanosine-3'-phosphate
  modified_base 21: mod_base = OTHER; note = 2'-O-methyladenosine
tctggaatgcaaagtcaagga

SEQ ID NO: 1947 - RNA, 23 nt, synthetic construct
  source 1..23: mol_type = other RNA
  modified_base 1: mod_base = OTHER; note = 2'-O-methyluridine-3'-phosphorothioate
  modified_base 2: mod_base = OTHER; note = 2'-fluorocytidine-3'-phosphorothioate
  modified_base 3: mod_base = OTHER; note = 2'-O-methylcytidine-3'-phosphate
  modified_base 4: mod_base = OTHER; note = 2'-O-methyluridine-3'-phosphate
  modified_base 5: mod_base = OTHER; note = 2'-O-methyluridine-3'-phosphate
  modified_base 6: mod_base = OTHER; note = 2'-O-methylguanosine-3'-phosphate
  modified_base 7: mod_base = OTHER; note = 2'-fluoroadenosine-3'-phosphate
  modified_base 8: mod_base = OTHER; note = 2'-O-methylcytidine-3'-phosphate
  modified_base 9: mod_base = OTHER; note = 2'-O-methyluridine-3'-phosphate
  modified_base 10: mod_base = OTHER; note = 2'-O-methyluridine-3'-phosphate
  modified_base 11: mod_base = OTHER; note = 2'-O-methyluridine-3'-phosphate
  modified_base 12: mod_base = OTHER; note = 2'-fluoroguanosine-3'-phosphate
  modified_base 13: mod_base = OTHER; note = 2'-O-methylcytidine-3'-phosphate
  modified_base 14: mod_base = OTHER; note = 2'-fluoroadenosine-3'-phosphate
  modified_base 15: mod_base = OTHER; note = 2'-O-methyluridine-3'-phosphate
  modified_base 16: mod_base = OTHER; note = 2'-fluorouridine-3'-phosphate
  modified_base 17: mod_base = OTHER; note = 2'-O-methylcytidine-3'-phosphate
  modified_base 18: mod_base = OTHER; note = 2'-O-methylcytidine-3'-phosphate
  modified_base 19: mod_base = OTHER; note = 2'-O-methyladenosine-3'-phosphate
  modified_base 20: mod_base = OTHER; note = 2'-O-methylguanosine-3'-phosphate
  modified_base 21: mod_base = OTHER; note = 2'-O-methyladenosine-3'-phosphorothioate
  modified_base 22: mod_base = OTHER; note = 2'-O-methylcytidine-3'-phosphorothioate
  modified_base 23: mod_base = OTHER; note = 2'-O-methylcytidine
tccttgactttgcattccagacc

SEQ ID NO: 1948 - RNA, 21 nt, synthetic construct
  source 1..21: mol_type = other RNA
  modified_base 1: mod_base = OTHER; note = 2'-O-methyluridine-3'-phosphorothioate
  modified_base 2: mod_base = OTHER; note = 2'-O-methyladenosine-3'-phosphorothioate
  modified_base 3: mod_base = OTHER; note = 2'-O-methylguanosine-3'-phosphate
  modified_base 4: mod_base = OTHER; note = 2'-O-methyladenosine-3'-phosphate
  modified_base 5: mod_base = OTHER; note = 2'-O-methylcytidine-3'-phosphate
  modified_base 6: mod_base = OTHER; note = 2'-O-methyladenosine-3'-phosphate
  modified_base 7: mod_base = OTHER; note = 2'-fluoroadenosine-3'-phosphate
  modified_base 8: mod_base = OTHER; note = 2'-O-methylcytidine-3'-phosphate
  modified_base 9: mod_base = OTHER; note = 2'-fluoroadenosine-3'-phosphate
  modified_base 10: mod_base = OTHER; note = 2'-fluorocytidine-3'-phosphate
  modified_base 11: mod_base = OTHER; note = 2'-fluoroguanosine-3'-phosphate
  modified_base 12: mod_base = OTHER; note = 2'-O-methyluridine-3'-phosphate
  modified_base 13: mod_base = OTHER; note = 2'-O-methylguanosine-3'-phosphate
  modified_base 14: mod_base = OTHER; note = 2'-O-methyluridine-3'-phosphate
  modified_base 15: mod_base = OTHER; note = 2'-O-methylguanosine-3'-phosphate
  modified_base 16: mod_base = OTHER; note = 2'-O-methyluridine-3'-phosphate
  modified_base 17: mod_base = OTHER; note = 2'-O-methyladenosine-3'-phosphate
  modified_base 18: mod_base = OTHER; note = 2'-O-methylguanosine-3'-phosphate
  modified_base 19: mod_base = OTHER; note = 2'-O-methyluridine-3'-phosphate
  modified_base 20: mod_base = OTHER; note = 2'-O-methylcytidine-3'-phosphate
  modified_base 21: mod_base = OTHER; note = 2'-O-methyladenosine
tagacaacacgtgtgtagtca

SEQ ID NO: 1949 - RNA, 23 nt, synthetic construct
  source 1..23: mol_type = other RNA
  modified_base 1: mod_base = OTHER; note = 2'-O-methyluridine-3'-phosphorothioate
  modified_base 2: mod_base = OTHER; note = 2'-fluoroguanosine-3'-phosphorothioate
  modified_base 3: mod_base = OTHER; note = 2'-O-methyladenosine-3'-phosphate
  modified_base 4: mod_base = OTHER; note = 2'-O-methylcytidine-3'-phosphate
  modified_base 5: mod_base = OTHER; note = 2'-O-methyluridine-3'-phosphate
  modified_base 6: mod_base = OTHER; note = 2'-O-methyladenosine-3'-phosphate
  modified_base 7: mod_base = OTHER; note = 2'-fluorocytidine-3'-phosphate
  modified_base 8: mod_base = OTHER; note = 2'-O-methyladenosine-3'-phosphate
  modified_base 9: mod_base = OTHER; note = 2'-O-methylcytidine-3'-phosphate
  modified_base 10: mod_base = OTHER; note = 2'-O-methyladenosine-3'-phosphate
  modified_base 11: mod_base = OTHER; note = 2'-O-methylcytidine-3'-phosphate
  modified_base 12: mod_base = OTHER; note = 2'-fluoroguanosine-3'-phosphate
  modified_base 13: mod_base = OTHER; note = 2'-O-methyluridine-3'-phosphate
  modified_base 14: mod_base = OTHER; note = 2'-fluoroguanosine-3'-phosphate
  modified_base 15: mod_base = OTHER; note = 2'-O-methyluridine-3'-phosphate
  modified_base 16: mod_base = OTHER; note = 2'-fluorouridine-3'-phosphate
  modified_base 17: mod_base = OTHER; note = 2'-O-methylguanosine-3'-phosphate
  modified_base 18: mod_base = OTHER; note = 2'-O-methyluridine-3'-phosphate
  modified_base 19: mod_base = OTHER; note = 2'-O-methylcytidine-3'-phosphate
  modified_base 20: mod_base = OTHER; note = 2'-O-methyluridine-3'-phosphate
  modified_base 21: mod_base = OTHER; note = 2'-O-methyladenosine-3'-phosphorothioate
  modified_base 22: mod_base = OTHER; note = 2'-O-methylcytidine-3'-phosphorothioate
  modified_base 23: mod_base = OTHER; note = 2'-O-methylguanosine
tgactacacacgtgttgtctacg

SEQ ID NO: 1950 - RNA, 21 nt, synthetic construct
  source 1..21: mol_type = other RNA
  modified_base 1: mod_base = OTHER; note = 2'-O-methylcytidine-3'-phosphorothioate
  modified_base 2: mod_base = OTHER; note = 2'-O-methyluridine-3'-phosphorothioate
  modified_base 3: mod_base = OTHER; note = 2'-O-methylguanosine-3'-phosphate
  modified_base 4: mod_base = OTHER; note = 2'-O-methylguanosine-3'-phosphate
  modified_base 5: mod_base = OTHER; note = 2'-O-methylguanosine-3'-phosphate
  modified_base 6: mod_base = OTHER; note = 2'-O-methylguanosine-3'-phosphate
  modified_base 7: mod_base = OTHER; note = 2'-fluorocytidine-3'-phosphate
  modified_base 8: mod_base = OTHER; note = 2'-O-methyluridine-3'-phosphate
  modified_base 9: mod_base = OTHER; note = 2'-fluoroguanosine-3'-phosphate
  modified_base 10: mod_base = OTHER; note = 2'-fluoroadenosine-3'-phosphate
  modified_base 11: mod_base = OTHER; note = 2'-fluoroguanosine-3'-phosphate
  modified_base 12: mod_base = OTHER; note = 2'-O-methylcytidine-3'-phosphate
  modified_base 13: mod_base = OTHER; note = 2'-O-methyluridine-3'-phosphate
  modified_base 14: mod_base = OTHER; note = 2'-O-methyluridine-3'-phosphate
  modified_base 15: mod_base = OTHER; note = 2'-O-methyluridine-3'-phosphate
  modified_base 16: mod_base = OTHER; note = 2'-O-methyladenosine-3'-phosphate
  modified_base 17: mod_base = OTHER; note = 2'-O-methyladenosine-3'-phosphate
  modified_base 18: mod_base = OTHER; note = 2'-O-methyladenosine-3'-phosphate
  modified_base 19: mod_base = OTHER; note = 2'-O-methyladenosine-3'-phosphate
  modified_base 20: mod_base = OTHER; note = 2'-O-methyluridine-3'-phosphate
  modified_base 21: mod_base = OTHER; note = 2'-O-methylguanosine
ctggggctgagctttaaaatg

SEQ ID NO: 1951 - RNA, 23 nt, synthetic construct
  source 1..23: mol_type = other RNA
  modified_base 1: mod_base = OTHER; note = 2'-O-methylcytidine-3'-phosphorothioate
  modified_base 2: mod_base = OTHER; note = 2'-fluoroadenosine-3'-phosphorothioate
  modified_base 3: mod_base = OTHER; note = 2'-O-methyluridine-3'-phosphate
  modified_base 4: mod_base = OTHER; note = 2'-O-methyluridine-3'-phosphate
  modified_base 5: mod_base = OTHER; note = 2'-O-methyluridine-3'-phosphate
  modified_base 6: mod_base = OTHER; note = 2'-O-methyluridine-3'-phosphate
  modified_base 7: mod_base = OTHER; note = 2'-fluoroadenosine-3'-phosphate
  modified_base 8: mod_base = OTHER; note = 2'-O-methyladenosine-3'-phosphate
  modified_base 9: mod_base = OTHER; note = 2'-O-methyladenosine-3'-phosphate
  modified_base 10: mod_base = OTHER; note = 2'-O-methylguanosine-3'-phosphate
  modified_base 11: mod_base = OTHER; note = 2'-O-methylcytidine-3'-phosphate
  modified_base 12: mod_base = OTHER; note = 2'-fluorouridine-3'-phosphate
  modified_base 13: mod_base = OTHER; note = 2'-O-methylcytidine-3'-phosphate
  modified_base 14: mod_base = OTHER; note = 2'-fluoroadenosine-3'-phosphate
  modified_base 15: mod_base = OTHER; note = 2'-O-methylguanosine-3'-phosphate
  modified_base 16: mod_base = OTHER; note = 2'-fluorocytidine-3'-phosphate
  modified_base 17: mod_base = OTHER; note = 2'-O-methylcytidine-3'-phosphate
  modified_base 18: mod_base = OTHER; note = 2'-O-methylcytidine-3'-phosphate
  modified_base 19: mod_base = OTHER; note = 2'-O-methylcytidine-3'-phosphate
  modified_base 20: mod_base = OTHER; note = 2'-O-methyladenosine-3'-phosphate
  modified_base 21: mod_base = OTHER; note = 2'-O-methylguanosine-3'-phosphorothioate
  modified_base 22: mod_base = OTHER; note = 2'-O-methylcytidine-3'-phosphorothioate
  modified_base 23: mod_base = OTHER; note = 2'-O-methylcytidine
cattttaaagctcagccccagcc

SEQ ID NO: 1952 - RNA, 21 nt, synthetic construct
  source 1..21: mol_type = other RNA
  modified_base 1: mod_base = OTHER; note = 2'-O-methyluridine-3'-phosphorothioate
  modified_base 2: mod_base = OTHER; note = 2'-O-methylguanosine-3'-phosphorothioate
  modified_base 3: mod_base = OTHER; note = 2'-O-methylguanosine-3'-phosphate
  modified_base 4: mod_base = OTHER; note = 2'-O-methylguanosine-3'-phosphate
  modified_base 5: mod_base = OTHER; note = 2'-O-methylguanosine-3'-phosphate
  modified_base 6: mod_base = OTHER; note = 2'-O-methylcytidine-3'-phosphate
  modified_base 7: mod_base = OTHER; note = 2'-fluorouridine-3'-phosphate
  modified_base 8: mod_base = OTHER; note = 2'-O-methylguanosine-3'-phosphate
  modified_base 9: mod_base = OTHER; note = 2'-fluoroadenosine-3'-phosphate
  modified_base 10: mod_base = OTHER; note = 2'-fluoroguanosine-3'-phosphate
  modified_base 11: mod_base = OTHER; note = 2'-fluorocytidine-3'-phosphate
  modified_base 12: mod_base = OTHER; note = 2'-O-methyluridine-3'-phosphate
  modified_base 13: mod_base = OTHER; note = 2'-O-methyluridine-3'-phosphate
  modified_base 14: mod_base = OTHER; note = 2'-O-methyluridine-3'-phosphate
  modified_base 15: mod_base = OTHER; note = 2'-O-methyladenosine-3'-phosphate
  modified_base 16: mod_base = OTHER; note = 2'-O-methyladenosine-3'-phosphate
  modified_base 17: mod_base = OTHER; note = 2'-O-methyladenosine-3'-phosphate
  modified_base 18: mod_base = OTHER; note = 2'-O-methyladenosine-3'-phosphate
  modified_base 19: mod_base = OTHER; note = 2'-O-methyluridine-3'-phosphate
  modified_base 20: mod_base = OTHER; note = 2'-O-methylguanosine-3'-phosphate
  modified_base 21: mod_base = OTHER; note = 2'-O-methylguanosine
tggggctgagctttaaaatgg

SEQ ID NO: 1953 - RNA, 23 nt, synthetic construct
  source 1..23: mol_type = other RNA
  modified_base 1: mod_base = OTHER; note = 2'-O-methylcytidine-3'-phosphorothioate
  modified_base 2: mod_base = OTHER; note = 2'-fluorocytidine-3'-phosphorothioate
  modified_base 3: mod_base = OTHER; note = 2'-O-methyladenosine-3'-phosphate
  modified_base 4: mod_base = OTHER; note = 2'-O-methyluridine-3'-phosphate
  modified_base 5: mod_base = OTHER; note = 2'-O-methyluridine-3'-phosphate
  modified_base 6: mod_base = OTHER; note = 2'-O-methyluridine-3'-phosphate
  modified_base 7: mod_base = OTHER; note = 2'-fluorouridine-3'-phosphate
  modified_base 8: mod_base = OTHER; note = 2'-O-methyladenosine-3'-phosphate
  modified_base 9: mod_base = OTHER; note = 2'-O-methyladenosine-3'-phosphate
  modified_base 10: mod_base = OTHER; note = 2'-O-methyladenosine-3'-phosphate
  modified_base 11: mod_base = OTHER; note = 2'-O-methylguanosine-3'-phosphate
  modified_base 12: mod_base = OTHER; note = 2'-fluorocytidine-3'-phosphate
  modified_base 13: mod_base = OTHER; note = 2'-O-methyluridine-3'-phosphate
  modified_base 14: mod_base = OTHER; note = 2'-fluorocytidine-3'-phosphate
  modified_base 15: mod_base = OTHER; note = 2'-O-methyladenosine-3'-phosphate
  modified_base 16: mod_base = OTHER; note = 2'-fluoroguanosine-3'-phosphate
  modified_base 17: mod_base = OTHER; note = 2'-O-methylcytidine-3'-phosphate
  modified_base 18: mod_base = OTHER; note = 2'-O-methylcytidine-3'-phosphate
  modified_base 19: mod_base = OTHER; note = 2'-O-methylcytidine-3'-phosphate
  modified_base 20: mod_base = OTHER; note = 2'-O-methylcytidine-3'-phosphate
  modified_base 21: mod_base = OTHER; note = 2'-O-methyladenosine-3'-phosphorothioate
  modified_base 22: mod_base = OTHER; note = 2'-O-methylguanosine-3'-phosphorothioate
  modified_base 23: mod_base = OTHER; note = 2'-O-methylcytidine
ccattttaaagctcagccccagc

SEQ ID NO: 1954 - RNA, 21 nt, synthetic construct
  source 1..21: mol_type = other RNA
  modified_base 1: mod_base = OTHER; note = 2'-O-methylcytidine-3'-phosphorothioate
  modified_base 2: mod_base = OTHER; note = 2'-O-methylcytidine-3'-phosphorothioate
  modified_base 3: mod_base = OTHER; note = 2'-O-methylcytidine-3'-phosphate
  modified_base 4: mod_base = OTHER; note = 2'-O-methyluridine-3'-phosphate
  modified_base 5: mod_base = OTHER; note = 2'-O-methylcytidine-3'-phosphate
  modified_base 6: mod_base = OTHER; note = 2'-O-methyladenosine-3'-phosphate
  modified_base 7: mod_base = OTHER; note = 2'-fluorocytidine-3'-phosphate
  modified_base 8: mod_base = OTHER; note = 2'-O-methyluridine-3'-phosphate
  modified_base 9: mod_base = OTHER; note = 2'-fluoroguanosine-3'-phosphate
  modified_base 10: mod_base = OTHER; note = 2'-fluorouridine-3'-phosphate
  modified_base 11: mod_base = OTHER; note = 2'-fluoroguanosine-3'-phosphate
  modified_base 12: mod_base = OTHER; note = 2'-O-methylguanosine-3'-phosphate
  modified_base 13: mod_base = OTHER; note = 2'-O-methylguanosine-3'-phosphate
  modified_base 14: mod_base = OTHER; note = 2'-O-methylguanosine-3'-phosphate
  modified_base 15: mod_base = OTHER; note = 2'-O-methylcytidine-3'-phosphate
  modified_base 16: mod_base = OTHER; note = 2'-O-methyladenosine-3'-phosphate
  modified_base 17: mod_base = OTHER; note = 2'-O-methyluridine-3'-phosphate
  modified_base 18: mod_base = OTHER; note = 2'-O-methyluridine-3'-phosphate
  modified_base 19: mod_base = OTHER; note = 2'-O-methyluridine-3'-phosphate
  modified_base 20: mod_base = OTHER; note = 2'-O-methylcytidine-3'-phosphate
  modified_base 21: mod_base = OTHER; note = 2'-O-methyladenosine
ccctcactgtggggcatttca

SEQ ID NO: 1955 - RNA, 23 nt, synthetic construct
  source 1..23: mol_type = other RNA
  modified_base 1: mod_base = OTHER; note = 2'-O-methyluridine-3'-phosphorothioate
  modified_base 2: mod_base = OTHER; note = 2'-fluoroguanosine-3'-phosphorothioate
  modified_base 3: mod_base = OTHER; note = 2'-O-methyladenosine-3'-phosphate
  modified_base 4: mod_base = OTHER; note = 2'-O-methyladenosine-3'-phosphate
  modified_base 5: mod_base = OTHER; note = 2'-O-methyladenosine-3'-phosphate
  modified_base 6: mod_base = OTHER; note = 2'-O-methyluridine-3'-phosphate
  modified_base 7: mod_base = OTHER; note = 2'-fluoroguanosine-3'-phosphate
  modified_base 8: mod_base = OTHER; note = 2'-O-methylcytidine-3'-phosphate
  modified_base 9: mod_base = OTHER; note = 2'-O-methylcytidine-3'-phosphate
  modified_base 10: mod_base = OTHER; note = 2'-O-methylcytidine-3'-phosphate
  modified_base 11: mod_base = OTHER; note = 2'-O-methylcytidine-3'-phosphate
  modified_base 12: mod_base = OTHER; note = 2'-fluoroadenosine-3'-phosphate
  modified_base 13: mod_base = OTHER; note = 2'-O-methylcytidine-3'-phosphate
  modified_base 14: mod_base = OTHER; note = 2'-fluoroadenosine-3'-phosphate
  modified_base 15: mod_base = OTHER; note = 2'-O-methylguanosine-3'-phosphate
  modified_base 16: mod_base = OTHER; note = 2'-fluorouridine-3'-phosphate
  modified_base 17: mod_base = OTHER; note = 2'-O-methylguanosine-3'-phosphate
  modified_base 18: mod_base = OTHER; note = 2'-O-methyladenosine-3'-phosphate
  modified_base 19: mod_base = OTHER; note = 2'-O-methylguanosine-3'-phosphate
  modified_base 20: mod_base = OTHER; note = 2'-O-methylguanosine-3'-phosphate
  modified_base 21: mod_base = OTHER; note = 2'-O-methylguanosine-3'-phosphorothioate
  modified_base 22: mod_base = OTHER; note = 2'-O-methyladenosine-3'-phosphorothioate
  modified_base 23: mod_base = OTHER; note = 2'-O-methylguanosine
tgaaatgccccacagtgagggag

SEQ ID NO: 1956 - RNA, 21 nt, synthetic construct
  source 1..21: mol_type = other RNA
  modified_base 1: mod_base = OTHER; note = 2'-O-methylcytidine-3'-phosphorothioate
  modified_base 2: mod_base = OTHER; note = 2'-O-methyladenosine-3'-phosphorothioate
  modified_base 3: mod_base = OTHER; note = 2'-O-methylcytidine-3'-phosphate
  modified_base 4: mod_base = OTHER; note = 2'-O-methyluridine-3'-phosphate
  modified_base 5: mod_base = OTHER; note = 2'-O-methylguanosine-3'-phosphate
  modified_base 6: mod_base = OTHER; note = 2'-O-methyluridine-3'-phosphate
  modified_base 7: mod_base = OTHER; note = 2'-fluoroguanosine-3'-phosphate
  modified_base 8: mod_base = OTHER; note = 2'-O-methylguanosine-3'-phosphate
  modified_base 9: mod_base = OTHER; note = 2'-fluoroguanosine-3'-phosphate
  modified_base 10: mod_base = OTHER; note = 2'-fluoroguanosine-3'-phosphate
  modified_base 11: mod_base = OTHER; note = 2'-fluorocytidine-3'-phosphate
  modified_base 12: mod_base = OTHER; note = 2'-O-methyladenosine-3'-phosphate
  modified_base 13: mod_base = OTHER; note = 2'-O-methyluridine-3'-phosphate
  modified_base 14: mod_base = OTHER; note = 2'-O-methyluridine-3'-phosphate
  modified_base 15: mod_base = OTHER; note = 2'-O-methyluridine-3'-phosphate
  modified_base 16: mod_base = OTHER; note = 2'-O-methylcytidine-3'-phosphate
  modified_base 17: mod_base = OTHER; note = 2'-O-methyladenosine-3'-phosphate
  modified_base 18: mod_base = OTHER; note = 2'-O-methylcytidine-3'-phosphate
  modified_base 19: mod_base = OTHER; note = 2'-O-methylcytidine-3'-phosphate
  modified_base 20: mod_base = OTHER; note = 2'-O-methyladenosine-3'-phosphate
  modified_base 21: mod_base = OTHER; note = 2'-O-methyluridine
cactgtggggcatttcaccat

SEQ ID NO: 1957 - RNA, 23 nt, synthetic construct
  source 1..23: mol_type = other RNA
  modified_base 1: mod_base = OTHER; note = 2'-O-methyladenosine-3'-phosphorothioate
  modified_base 2: mod_base = OTHER; note = 2'-fluorouridine-3'-phosphorothioate
  modified_base 3: mod_base = OTHER; note = 2'-O-methylguanosine-3'-phosphate
  modified_base 4: mod_base = OTHER; note = 2'-O-methylguanosine-3'-phosphate
  modified_base 5: mod_base = OTHER; note = 2'-O-methyluridine-3'-phosphate
  modified_base 6: mod_base = OTHER; note = 2'-O-methylguanosine-3'-phosphate
  modified_base 7: mod_base = OTHER; note = 2'-fluoroadenosine-3'-phosphate
  modified_base 8: mod_base = OTHER; note = 2'-O-methyladenosine-3'-phosphate
  modified_base 9: mod_base = OTHER; note = 2'-O-methyladenosine-3'-phosphate
  modified_base 10: mod_base = OTHER; note = 2'-O-methyluridine-3'-phosphate
  modified_base 11: mod_base = OTHER; note = 2'-O-methylguanosine-3'-phosphate
  modified_base 12: mod_base = OTHER; note = 2'-fluorocytidine-3'-phosphate
  modified_base 13: mod_base = OTHER; note = 2'-O-methylcytidine-3'-phosphate
  modified_base 14: mod_base = OTHER; note = 2'-fluorocytidine-3'-phosphate
  modified_base 15: mod_base = OTHER; note = 2'-O-methylcytidine-3'-phosphate
  modified_base 16: mod_base = OTHER; note = 2'-fluoroadenosine-3'-phosphate
  modified_base 17: mod_base = OTHER; note = 2'-O-methylcytidine-3'-phosphate
  modified_base 18: mod_base = OTHER; note = 2'-O-methyladenosine-3'-phosphate
  modified_base 19: mod_base = OTHER; note = 2'-O-methylguanosine-3'-phosphate
  modified_base 20: mod_base = OTHER; note = 2'-O-methyluridine-3'-phosphate
  modified_base 21: mod_base = OTHER; note = 2'-O-methylguanosine-3'-phosphorothioate
  modified_base 22: mod_base = OTHER; note = 2'-O-methyladenosine-3'-phosphorothioate
  modified_base 23: mod_base = OTHER; note = 2'-O-methylguanosine
atggtgaaatgccccacagtgag

SEQ ID NO: 1958 - RNA, 21 nt, synthetic construct
  source 1..21: mol_type = other RNA
  modified_base 1: mod_base = OTHER; note = 2'-O-methylcytidine-3'-phosphorothioate
  modified_base 2: mod_base = OTHER; note = 2'-O-methyluridine-3'-phosphorothioate
  modified_base 3: mod_base = OTHER; note = 2'-O-methylguanosine-3'-phosphate
  modified_base 4: mod_base = OTHER; note = 2'-O-methyluridine-3'-phosphate
  modified_base 5: mod_base = OTHER; note = 2'-O-methylguanosine-3'-phosphate
  modified_base 6: mod_base = OTHER; note = 2'-O-methylguanosine-3'-phosphate
  modified_base 7: mod_base = OTHER; note = 2'-fluoroguanosine-3'-phosphate
  modified_base 8: mod_base = OTHER; note = 2'-O-methylguanosine-3'-phosphate
  modified_base 9: mod_base = OTHER; note = 2'-fluorocytidine-3'-phosphate
  modified_base 10: mod_base = OTHER; note = 2'-fluoroadenosine-3'-phosphate
  modified_base 11: mod_base = OTHER; note = 2'-fluorouridine-3'-phosphate
  modified_base 12: mod_base = OTHER; note = 2'-O-methyluridine-3'-phosphate
  modified_base 13: mod_base = OTHER; note = 2'-O-methyluridine-3'-phosphate
  modified_base 14: mod_base = OTHER; note = 2'-O-methylcytidine-3'-phosphate
  modified_base 15: mod_base = OTHER; note = 2'-O-methyladenosine-3'-phosphate
  modified_base 16: mod_base = OTHER; note = 2'-O-methylcytidine-3'-phosphate
  modified_base 17: mod_base = OTHER; note = 2'-O-methylcytidine-3'-phosphate
  modified_base 18: mod_base = OTHER; note = 2'-O-methyladenosine-3'-phosphate
  modified_base 19: mod_base = OTHER; note = 2'-O-methyluridine-3'-phosphate
  modified_base 20: mod_base = OTHER; note = 2'-O-methyluridine-3'-phosphate
  modified_base 21: mod_base = OTHER; note = 2'-O-methylcytidine
ctgtggggcatttcaccattc

SEQ ID NO: 1959 - RNA, 23 nt, synthetic construct
  source 1..23: mol_type = other RNA
  modified_base 1: mod_base = OTHER; note = 2'-O-methylguanosine-3'-phosphorothioate
  modified_base 2: mod_base = OTHER; note = 2'-fluoroadenosine-3'-phosphorothioate
  modified_base 3: mod_base = OTHER; note = 2'-O-methyladenosine-3'-phosphate
  modified_base 4: mod_base = OTHER; note = 2'-O-methyluridine-3'-phosphate
  modified_base 5: mod_base = OTHER; note = 2'-O-methylguanosine-3'-phosphate
  modified_base 6: mod_base = OTHER; note = 2'-O-methylguanosine-3'-phosphate
  modified_base 7: mod_base = OTHER; note = 2'-fluorouridine-3'-phosphate
  modified_base 8: mod_base = OTHER; note = 2'-O-methylguanosine-3'-phosphate
  modified_base 9: mod_base = OTHER; note = 2'-O-methyladenosine-3'-phosphate
  modified_base 10: mod_base = OTHER; note = 2'-O-methyladenosine-3'-phosphate
  modified_base 11: mod_base = OTHER; note = 2'-O-methyladenosine-3'-phosphate
  modified_base 12: mod_base = OTHER; note = 2'-fluorouridine-3'-phosphate
  modified_base 13: mod_base = OTHER; note = 2'-O-methylguanosine-3'-phosphate
  modified_base 14: mod_base = OTHER; note = 2'-fluorocytidine-3'-phosphate
  modified_base 15: mod_base = OTHER; note = 2'-O-methylcytidine-3'-phosphate
  modified_base 16: mod_base = OTHER; note = 2'-fluorocytidine-3'-phosphate
  modified_base 17: mod_base = OTHER; note = 2'-O-methylcytidine-3'-phosphate
  modified_base 18: mod_base = OTHER; note = 2'-O-methyladenosine-3'-phosphate
  modified_base 19: mod_base = OTHER; note = 2'-O-methylcytidine-3'-phosphate
  modified_base 20: mod_base = OTHER; note = 2'-O-methyladenosine-3'-phosphate
  modified_base 21: mod_base = OTHER; note = 2'-O-methylguanosine-3'-phosphorothioate
  modified_base 22: mod_base = OTHER; note = 2'-O-methyluridine-3'-phosphorothioate
  modified_base 23: mod_base = OTHER; note = 2'-O-methylguanosine
gaatggtgaaatgccccacagtg

SEQ ID NO: 1960 - RNA, 21 nt, synthetic construct
  source 1..21: mol_type = other RNA
  modified_base 1: mod_base = OTHER; note = 2'-O-methyluridine-3'-phosphorothioate
  modified_base 2: mod_base = OTHER; note = 2'-O-methylguanosine-3'-phosphorothioate
  modified_base 3: mod_base = OTHER; note = 2'-O-methylguanosine-3'-phosphate
  modified_base 4: mod_base = OTHER; note = 2'-O-methylguanosine-3'-phosphate
  modified_base 5: mod_base = OTHER; note = 2'-O-methylguanosine-3'-phosphate
  modified_base 6: mod_base = OTHER; note = 2'-O-methylcytidine-3'-phosphate
  modified_base 7: mod_base = OTHER; note = 2'-fluoroadenosine-3'-phosphate
  modified_base 8: mod_base = OTHER; note = 2'-O-methyluridine-3'-phosphate
  modified_base 9: mod_base = OTHER; note = 2'-fluorouridine-3'-phosphate
  modified_base 10: mod_base = OTHER; note = 2'-fluorouridine-3'-phosphate
  modified_base 11: mod_base = OTHER; note = 2'-fluorocytidine-3'-phosphate
  modified_base 12: mod_base = OTHER; note = 2'-O-methyladenosine-3'-phosphate
  modified_base 13: mod_base = OTHER; note = 2'-O-methylcytidine-3'-phosphate
  modified_base 14: mod_base = OTHER; note = 2'-O-methylcytidine-3'-phosphate
  modified_base 15: mod_base = OTHER; note = 2'-O-methyladenosine-3'-phosphate
  modified_base 16: mod_base = OTHER; note = 2'-O-methyluridine-3'-phosphate
  modified_base 17: mod_base = OTHER; note = 2'-O-methyluridine-3'-phosphate
  modified_base 18: mod_base = OTHER; note = 2'-O-methylcytidine-3'-phosphate
  modified_base 19: mod_base = OTHER; note = 2'-O-methyladenosine-3'-phosphate
  modified_base 20: mod_base = OTHER; note = 2'-O-methyladenosine-3'-phosphate
  modified_base 21: mod_base = OTHER; note = 2'-O-methyladenosine
tggggcatttcaccattcaaa

SEQ ID NO: 1961 - RNA, 23 nt, synthetic construct
  source 1..23: mol_type = other RNA
  modified_base 1: mod_base = OTHER; note = 2'-O-methyluridine-3'-phosphorothioate
  modified_base 2: mod_base = OTHER; note = 2'-fluorouridine-3'-phosphorothioate
  modified_base 3: mod_base = OTHER; note = 2'-O-methyluridine-3'-phosphate
  modified_base 4: mod_base = OTHER; note = 2'-O-methylguanosine-3'-phosphate
  modified_base 5: mod_base = OTHER; note = 2'-O-methyladenosine-3'-phosphate
  modified_base 6: mod_base = OTHER; note = 2'-O-methyladenosine-3'-phosphate
  modified_base 7: mod_base = OTHER; note = 2'-fluorouridine-3'-phosphate
  modified_base 8: mod_base = OTHER; note = 2'-O-methylguanosine-3'-phosphate
  modified_base 9: mod_base = OTHER; note = 2'-O-methylguanosine-3'-phosphate
  modified_base 10: mod_base = OTHER; note = 2'-O-methyluridine-3'-phosphate
  modified_base 11: mod_base = OTHER; note = 2'-O-methylguanosine-3'-phosphate
  modified_base 12: mod_base = OTHER; note = 2'-fluoroadenosine-3'-phosphate
  modified_base 13: mod_base = OTHER; note = 2'-O-methyladenosine-3'-phosphate
  modified_base 14: mod_base = OTHER; note = 2'-fluoroadenosine-3'-phosphate
  modified_base 15: mod_base = OTHER; note = 2'-O-methyluridine-3'-phosphate
  modified_base 16: mod_base = OTHER; note = 2'-fluoroguanosine-3'-phosphate
  modified_base 17: mod_base = OTHER; note = 2'-O-methylcytidine-3'-phosphate
  modified_base 18: mod_base = OTHER; note = 2'-O-methylcytidine-3'-phosphate
  modified_base 19: mod_base = OTHER; note = 2'-O-methylcytidine-3'-phosphate
  modified_base 20: mod_base = OTHER; note = 2'-O-methylcytidine-3'-phosphate
  modified_base 21: mod_base = OTHER; note = 2'-O-methyladenosine-3'-phosphorothioate
  modified_base 22: mod_base = OTHER; note = 2'-O-methylcytidine-3'-phosphorothioate
  modified_base 23: mod_base = OTHER; note = 2'-O-methyladenosine
tttgaatggtgaaatgccccaca

SEQ ID NO: 1962 - RNA, 21 nt, synthetic construct
  source 1..21: mol_type = other RNA
  modified_base 1: mod_base = OTHER; note = 2'-O-methylguanosine-3'-phosphorothioate
  modified_base 2: mod_base = OTHER; note = 2'-O-methylcytidine-3'-phosphorothioate
  modified_base 3: mod_base = OTHER; note = 2'-O-methyladenosine-3'-phosphate
  modified_base 4: mod_base = OTHER; note = 2'-O-methyluridine-3'-phosphate
  modified_base 5: mod_base = OTHER; note = 2'-O-methyluridine-3'-phosphate
  modified_base 6: mod_base = OTHER; note = 2'-O-methyluridine-3'-phosphate
  modified_base 7: mod_base = OTHER; note = 2'-fluorocytidine-3'-phosphate
  modified_base 8: mod_base = OTHER; note = 2'-O-methyladenosine-3'-phosphate
  modified_base 9: mod_base = OTHER; note = 2'-fluorocytidine-3'-phosphate
  modified_base 10: mod_base = OTHER; note = 2'-fluorocytidine-3'-phosphate
  modified_base 11: mod_base = OTHER; note = 2'-fluoroadenosine-3'-phosphate
  modified_base 12: mod_base = OTHER; note = 2'-O-methyluridine-3'-phosphate
  modified_base 13: mod_base = OTHER; note = 2'-O-methyluridine-3'-phosphate
  modified_base 14: mod_base = OTHER; note = 2'-O-methylcytidine-3'-phosphate
  modified_base 15: mod_base = OTHER; note = 2'-O-methyladenosine-3'-phosphate
  modified_base 16: mod_base = OTHER; note = 2'-O-methyladenosine-3'-phosphate
  modified_base 17: mod_base = OTHER; note = 2'-O-methyladenosine-3'-phosphate
  modified_base 18: mod_base = OTHER; note = 2'-O-methylcytidine-3'-phosphate
  modified_base 19: mod_base = OTHER; note = 2'-O-methyladenosine-3'-phosphate
  modified_base 20: mod_base = OTHER; note = 2'-O-methylguanosine-3'-phosphate
  modified_base 21: mod_base = OTHER; note = 2'-O-methylguanosine
gcatttcaccattcaaacagg

SEQ ID NO: 1963 - RNA, 23 nt, synthetic construct
  source 1..23: mol_type = other RNA
  modified_base 1: mod_base = OTHER; note = 2'-O-methylcytidine-3'-phosphorothioate
  modified_base 2: mod_base = OTHER; note = 2'-fluorocytidine-3'-phosphorothioate
  modified_base 3: mod_base = OTHER; note = 2'-O-methyluridine-3'-phosphate
  modified_base 4: mod_base = OTHER; note = 2'-O-methylguanosine-3'-phosphate
  modified_base 5: mod_base = OTHER; note = 2'-O-methyluridine-3'-phosphate
  modified_base 6: mod_base = OTHER; note = 2'-O-methyluridine-3'-phosphate
  modified_base 7: mod_base = OTHER; note = 2'-fluorouridine-3'-phosphate
  modified_base 8: mod_base = OTHER; note = 2'-O-methylguanosine-3'-phosphate
  modified_base 9: mod_base = OTHER; note = 2'-O-methyladenosine-3'-phosphate
  modified_base 10: mod_base = OTHER; note = 2'-O-methyladenosine-3'-phosphate
  modified_base 11: mod_base = OTHER; note = 2'-O-methyluridine-3'-phosphate
  modified_base 12: mod_base = OTHER; note = 2'-fluoroguanosine-3'-phosphate
  modified_base 13: mod_base = OTHER; note = 2'-O-methylguanosine-3'-phosphate
  modified_base 14: mod_base = OTHER; note = 2'-fluorouridine-3'-phosphate
  modified_base 15: mod_base = OTHER; note = 2'-O-methylguanosine-3'-phosphate
  modified_base 16: mod_base = OTHER; note = 2'-fluoroadenosine-3'-phosphate
  modified_base 17: mod_base = OTHER; note = 2'-O-methyladenosine-3'-phosphate
  modified_base 18: mod_base = OTHER; note = 2'-O-methyladenosine-3'-phosphate
  modified_base 19: mod_base = OTHER; note = 2'-O-methyluridine-3'-phosphate
  modified_base 20: mod_base = OTHER; note = 2'-O-methylguanosine-3'-phosphate
  modified_base 21: mod_base = OTHER; note = 2'-O-methylcytidine-3'-phosphorothioate
  modified_base 22: mod_base = OTHER; note = 2'-O-methylcytidine-3'-phosphorothioate
  modified_base 23: mod_base = OTHER; note = 2'-O-methylcytidine
cctgtttgaatggtgaaatgccc

SEQ ID NO: 1964 - RNA, 21 nt, synthetic construct
  source 1..21: mol_type = other RNA
  modified_base 1: mod_base = OTHER; note = 2'-O-methyluridine-3'-phosphorothioate
  modified_base 2: mod_base = OTHER; note = 2'-O-methyluridine-3'-phosphorothioate
  modified_base 3: mod_base = OTHER; note = 2'-O-methyluridine-3'-phosphate
  modified_base 4: mod_base = OTHER; note = 2'-O-methyladenosine-3'-phosphate
  modified_base 5: mod_base = OTHER; note = 2'-O-methyluridine-3'-phosphate
  modified_base 6: mod_base = OTHER; note = 2'-O-methyluridine-3'-phosphate
  modified_base 7: mod_base = OTHER; note = 2'-fluoroguanosine-3'-phosphate
  modified_base 8: mod_base = OTHER; note = 2'-O-methyladenosine-3'-phosphate
  modified_base 9: mod_base = OTHER; note = 2'-fluoroguanosine-3'-phosphate
  modified_base 10: mod_base = OTHER; note = 2'-fluorocytidine-3'-phosphate
  modified_base 11: mod_base = OTHER; note = 2'-fluorouridine-3'-phosphate
  modified_base 12: mod_base = OTHER; note = 2'-O-methylcytidine-3'-phosphate
  modified_base 13: mod_base = OTHER; note = 2'-O-methyluridine-3'-phosphate
  modified_base 14: mod_base = OTHER; note = 2'-O-methyluridine-3'-phosphate
  modified_base 15: mod_base = OTHER; note = 2'-O-methylguanosine-3'-phosphate
  modified_base 16: mod_base = OTHER; note = 2'-O-methyluridine-3'-phosphate
  modified_base 17: mod_base = OTHER; note = 2'-O-methyluridine-3'-phosphate
  modified_base 18: mod_base = OTHER; note = 2'-O-methylcytidine-3'-phosphate
  modified_base 19: mod_base = OTHER; note = 2'-O-methylcytidine-3'-phosphate
  modified_base 20: mod_base = OTHER; note = 2'-O-methylguanosine-3'-phosphate
  modified_base 21: mod_base = OTHER; note = 2'-O-methyluridine
tttattgagctcttgttccgt

SEQ ID NO: 1965 - RNA, 23 nt, synthetic construct
  source 1..23: mol_type = other RNA
  modified_base 1: mod_base = OTHER; note = 2'-O-methyladenosine-3'-phosphorothioate
  modified_base 2: mod_base = OTHER; note = 2'-fluorocytidine-3'-phosphorothioate
  modified_base 3: mod_base = OTHER; note = 2'-O-methylguanosine-3'-phosphate
  modified_base 4: mod_base = OTHER; note = 2'-O-methylguanosine-3'-phosphate
  modified_base 5: mod_base = OTHER; note = 2'-O-methyladenosine-3'-phosphate
  modified_base 6: mod_base = OTHER; note = 2'-O-methyladenosine-3'-phosphate
  modified_base 7: mod_base = OTHER; note = 2'-fluorocytidine-3'-phosphate
  modified_base 8: mod_base = OTHER; note = 2'-O-methyladenosine-3'-phosphate
  modified_base 9: mod_base = OTHER; note = 2'-O-methyladenosine-3'-phosphate
  modified_base 10: mod_base = OTHER; note = 2'-O-methylguanosine-3'-phosphate
  modified_base 11: mod_base = OTHER; note = 2'-O-methyladenosine-3'-phosphate
  modified_base 12: mod_base = OTHER; note = 2'-fluoroguanosine-3'-phosphate
  modified_base 13: mod_base = OTHER; note = 2'-O-methylcytidine-3'-phosphate
  modified_base 14: mod_base = OTHER; note = 2'-fluorouridine-3'-phosphate
  modified_base 15: mod_base = OTHER; note = 2'-O-methylcytidine-3'-phosphate
  modified_base 16: mod_base = OTHER; note = 2'-fluoroadenosine-3'-phosphate
  modified_base 17: mod_base = OTHER; note = 2'-O-methyladenosine-3'-phosphate
  modified_base 18: mod_base = OTHER; note = 2'-O-methyluridine-3'-phosphate
  modified_base 19: mod_base = OTHER; note = 2'-O-methyladenosine-3'-phosphate
  modified_base 20: mod_base = OTHER; note = 2'-O-methyladenosine-3'-phosphate
  modified_base 21: mod_base = OTHER; note = 2'-O-methyladenosine-3'-phosphorothioate
  modified_base 22: mod_base = OTHER; note = 2'-O-methyladenosine-3'-phosphorothioate
  modified_base 23: mod_base = OTHER; note = 2'-O-methylguanosine
acggaacaagagctcaataaaag

SEQ ID NO: 1966 - RNA, 21 nt, synthetic construct
  source 1..21: mol_type = other RNA
  modified_base 1: mod_base = OTHER; note = 2'-O-methylcytidine-3'-phosphorothioate
  modified_base 2: mod_base = OTHER; note = 2'-O-methylcytidine-3'-phosphorothioate
  modified_base 3: mod_base = OTHER; note = 2'-O-methylcytidine-3'-phosphate
  modified_base 4: mod_base = OTHER; note = 2'-O-methyluridine-3'-phosphate
  modified_base 5: mod_base = OTHER; note = 2'-O-methylcytidine-3'-phosphate
  modified_base 6: mod_base = OTHER; note = 2'-O-methyladenosine-3'-phosphate
  modified_base 7: mod_base = OTHER; note = 2'-fluorouridine-3'-phosphate
  modified_base 8: mod_base = OTHER; note = 2'-O-methylcytidine-3'-phosphate
  modified_base 9: mod_base = OTHER; note = 2'-fluorouridine-3'-phosphate
  modified_base 10: mod_base = OTHER; note = 2'-fluorocytidine-3'-phosphate
  modified_base 11: mod_base = OTHER; note = 2'-fluorocytidine-3'-phosphate
  modified_base 12: mod_base = OTHER; note = 2'-O-methyladenosine-3'-phosphate
  modified_base 13: mod_base = OTHER; note = 2'-O-methylguanosine-3'-phosphate
  modified_base 14: mod_base = OTHER; note = 2'-O-methylcytidine-3'-phosphate
  modified_base 15: mod_base = OTHER; note = 2'-O-methyluridine-3'-phosphate
  modified_base 16: mod_base = OTHER; note = 2'-O-methyladenosine-3'-phosphate
  modified_base 17: mod_base = OTHER; note = 2'-O-methyladenosine-3'-phosphate
  modified_base 18: mod_base = OTHER; note = 2'-O-methylcytidine-3'-phosphate
  modified_base 19: mod_base = OTHER; note = 2'-O-methyluridine-3'-phosphate
  modified_base 20: mod_base = OTHER; note = 2'-O-methylguanosine-3'-phosphate
  modified_base 21: mod_base = OTHER; note = 2'-O-methyluridine
ccctcatctccagctaactgt

SEQ ID NO: 1967 - RNA, 23 nt, synthetic construct
  source 1..23: mol_type = other RNA
  modified_base 1: mod_base = OTHER; note = 2'-O-methyladenosine-3'-phosphorothioate
  modified_base 2: mod_base = OTHER; note = 2'-fluorocytidine-3'-phosphorothioate
  modified_base 3: mod_base = OTHER; note = 2'-O-methyladenosine-3'-phosphate
  modified_base 4: mod_base = OTHER; note = 2'-O-methylguanosine-3'-phosphate
  modified_base 5: mod_base = OTHER; note = 2'-O-methyluridine-3'-phosphate
  modified_base 6: mod_base = OTHER; note = 2'-O-methyluridine-3'-phosphate
  modified_base 7: mod_base = OTHER; note = 2'-fluoroadenosine-3'-phosphate
  modified_base 8: mod_base = OTHER; note = 2'-O-methylguanosine-3'-phosphate
  modified_base 9: mod_base = OTHER; note = 2'-O-methylcytidine-3'-phosphate
  modified_base 10: mod_base = OTHER; note = 2'-O-methyluridine-3'-phosphate
  modified_base 11: mod_base = OTHER; note = 2'-O-methylguanosine-3'-phosphate
  modified_base 12: mod_base = OTHER; note = 2'-fluoroguanosine-3'-phosphate
  modified_base 13: mod_base = OTHER; note = 2'-O-methyladenosine-3'-phosphate
  modified_base 14: mod_base = OTHER; note = 2'-fluoroguanosine-3'-phosphate
  modified_base 15: mod_base = OTHER; note = 2'-O-methyladenosine-3'-phosphate
  modified_base 16: mod_base = OTHER; note = 2'-fluorouridine-3'-phosphate
  modified_base 17: mod_base = OTHER; note = 2'-O-methylguanosine-3'-phosphate
  modified_base 18: mod_base = OTHER; note = 2'-O-methyladenosine-3'-phosphate
  modified_base 19: mod_base = OTHER; note = 2'-O-methylguanosine-3'-phosphate
  modified_base 20: mod_base = OTHER; note = 2'-O-methylguanosine-3'-phosphate
  modified_base 21: mod_base = OTHER; note = 2'-O-methylguanosine-3'-phosphorothioate
  modified_base 22: mod_base = OTHER; note = 2'-O-methylcytidine-3'-phosphorothioate
  modified_base 23: mod_base = OTHER; note = 2'-O-methylcytidine
acagttagctggagatgagggcc

SEQ ID NO: 1968 - RNA, 21 nt, synthetic construct
  source 1..21: mol_type = other RNA
  modified_base 1: mod_base = OTHER; note = 2'-O-methyladenosine-3'-phosphorothioate
  modified_base 2: mod_base = OTHER; note = 2'-O-methylcytidine-3'-phosphorothioate
  modified_base 3: mod_base = OTHER; note = 2'-O-methyluridine-3'-phosphate
  modified_base 4: mod_base = OTHER; note = 2'-O-methylguanosine-3'-phosphate
  modified_base 5: mod_base = OTHER; note = 2'-O-methyladenosine-3'-phosphate
  modified_base 6: mod_base = OTHER; note = 2'-O-methylguanosine-3'-phosphate
  modified_base 7: mod_base = OTHER; note = 2'-fluorocytidine-3'-phosphate
  modified_base 8: mod_base = OTHER; note = 2'-O-methylcytidine-3'-phosphate
  modified_base 9: mod_base = OTHER; note = 2'-fluoroadenosine-3'-phosphate
  modified_base 10: mod_base = OTHER; note = 2'-fluoroguanosine-3'-phosphate
  modified_base 11: mod_base = OTHER; note = 2'-fluoroadenosine-3'-phosphate
  modified_base 12: mod_base = OTHER; note = 2'-O-methyladenosine-3'-phosphate
  modified_base 13: mod_base = OTHER; note = 2'-O-methyladenosine-3'-phosphate
  modified_base 14: mod_base = OTHER; note = 2'-O-methylcytidine-3'-phosphate
  modified_base 15: mod_base = OTHER; note = 2'-O-methylguanosine-3'-phosphate
  modified_base 16: mod_base = OTHER; note = 2'-O-methylcytidine-3'-phosphate
  modified_base 17: mod_base = OTHER; note = 2'-O-methyladenosine-3'-phosphate
  modified_base 18: mod_base = OTHER; note = 2'-O-methylguanosine-3'-phosphate
  modified_base 19: mod_base = OTHER; note = 2'-O-methyladenosine-3'-phosphate
  modified_base 20: mod_base = OTHER; note = 2'-O-methyluridine-3'-phosphate
  modified_base 21: mod_base = OTHER; note = 2'-O-methyluridine
actgagccagaaacgcagatt

SEQ ID NO: 1969 - RNA, 23 nt, synthetic construct
  source 1..23: mol_type = other RNA
  modified_base 1: mod_base = OTHER; note = 2'-O-methyladenosine-3'-phosphorothioate
  modified_base 2: mod_base = OTHER; note = 2'-fluoroadenosine-3'-phosphorothioate
  modified_base 3: mod_base = OTHER; note = 2'-O-methyluridine-3'-phosphate
  modified_base 4: mod_base = OTHER; note = 2'-O-methylcytidine-3'-phosphate
  modified_base 5: mod_base = OTHER; note = 2'-O-methyluridine-3'-phosphate
  modified_base 6: mod_base = OTHER; note = 2'-O-methylguanosine-3'-phosphate
  modified_base 7: mod_base = OTHER; note = 2'-fluorocytidine-3'-phosphate
  modified_base 8: mod_base = OTHER; note = 2'-O-methylguanosine-3'-phosphate
  modified_base 9: mod_base = OTHER; note = 2'-O-methyluridine-3'-phosphate
  modified_base 10: mod_base = OTHER; note = 2'-O-methyluridine-3'-phosphate
  modified_base 11: mod_base = OTHER; note = 2'-O-methyluridine-3'-phosphate
  modified_base 12: mod_base = OTHER; note = 2'-fluorocytidine-3'-phosphate
  modified_base 13: mod_base = OTHER; note = 2'-O-methyluridine-3'-phosphate
  modified_base 14: mod_base = OTHER; note = 2'-fluoroguanosine-3'-phosphate
  modified_base 15: mod_base = OTHER; note = 2'-O-methylguanosine-3'-phosphate
  modified_base 16: mod_base = OTHER; note = 2'-fluorocytidine-3'-phosphate
  modified_base 17: mod_base = OTHER; note = 2'-O-methyluridine-3'-phosphate
  modified_base 18: mod_base = OTHER; note = 2'-O-methylcytidine-3'-phosphate
  modified_base 19: mod_base = OTHER; note = 2'-O-methyladenosine-3'-phosphate
  modified_base 20: mod_base = OTHER; note = 2'-O-methylguanosine-3'-phosphate
  modified_base 21: mod_base = OTHER; note = 2'-O-methyluridine-3'-phosphorothioate
  modified_base 22: mod_base = OTHER; note = 2'-O-methyluridine-3'-phosphorothioate
  modified_base 23: mod_base = OTHER; note = 2'-O-methylcytidine
aatctgcgtttctggctcagttc

SEQ ID NO: 1970 - RNA, 21 nt, synthetic construct
  source 1..21: mol_type = other RNA
  modified_base 1: mod_base = OTHER; note = 2'-O-methyluridine-3'-phosphorothioate
  modified_base 2: mod_base = OTHER; note = 2'-O-methylguanosine-3'-phosphorothioate
  modified_base 3: mod_base = OTHER; note = 2'-O-methyladenosine-3'-phosphate
  modified_base 4: mod_base = OTHER; note = 2'-O-methylguanosine-3'-phosphate
  modified_base 5: mod_base = OTHER; note = 2'-O-methylcytidine-3'-phosphate
  modified_base 6: mod_base = OTHER; note = 2'-O-methylcytidine-3'-phosphate
  modified_base 7: mod_base = OTHER; note = 2'-fluoroadenosine-3'-phosphate
  modified_base 8: mod_base = OTHER; note = 2'-O-methylguanosine-3'-phosphate
  modified_base 9: mod_base = OTHER; note = 2'-fluoroadenosine-3'-phosphate
  modified_base 10: mod_base = OTHER; note = 2'-fluoroadenosine-3'-phosphate
  modified_base 11: mod_base = OTHER; note = 2'-fluoroadenosine-3'-phosphate
  modified_base 12: mod_base = OTHER; note = 2'-O-methylcytidine-3'-phosphate
  modified_base 13: mod_base = OTHER; note = 2'-O-methylguanosine-3'-phosphate
  modified_base 14: mod_base = OTHER; note = 2'-O-methylcytidine-3'-phosphate
  modified_base 15: mod_base = OTHER; note = 2'-O-methyladenosine-3'-phosphate
  modified_base 16: mod_base = OTHER; note = 2'-O-methylguanosine-3'-phosphate
  modified_base 17: mod_base = OTHER; note = 2'-O-methyladenosine-3'-phosphate
  modified_base 18: mod_base = OTHER; note = 2'-O-methyluridine-3'-phosphate
  modified_base 19: mod_base = OTHER; note = 2'-O-methyluridine-3'-phosphate
  modified_base 20: mod_base = OTHER; note = 2'-O-methylguanosine-3'-phosphate
  modified_base 21: mod_base = OTHER; note = 2'-O-methylguanosine
tgagccagaaacgcagattgg

SEQ ID NO: 1971 - RNA, 23 nt, synthetic construct
  source 1..23: mol_type = other RNA
  modified_base 1: mod_base = OTHER; note = 2'-O-methylcytidine-3'-phosphorothioate
  modified_base 2: mod_base = OTHER; note = 2'-fluorocytidine-3'-phosphorothioate
  modified_base 3: mod_base = OTHER; note = 2'-O-methyladenosine-3'-phosphate
  modified_base 4: mod_base = OTHER; note = 2'-O-methyladenosine-3'-phosphate
  modified_base 5: mod_base = OTHER; note = 2'-O-methyluridine-3'-phosphate
  modified_base 6: mod_base = OTHER; note = 2'-O-methylcytidine-3'-phosphate
  modified_base 7: mod_base = OTHER; note = 2'-fluorouridine-3'-phosphate
  modified_base 8: mod_base = OTHER; note = 2'-O-methylguanosine-3'-phosphate
  modified_base 9: mod_base = OTHER; note = 2'-O-methylcytidine-3'-phosphate
  modified_base 10: mod_base = OTHER; note = 2'-O-methylguanosine-3'-phosphate
  modified_base 11: mod_base = OTHER; note = 2'-O-methyluridine-3'-phosphate
  modified_base 12: mod_base = OTHER; note = 2'-fluorouridine-3'-phosphate
  modified_base 13: mod_base = OTHER; note = 2'-O-methyluridine-3'-phosphate
  modified_base 14: mod_base = OTHER; note = 2'-fluorocytidine-3'-phosphate
  modified_base 15: mod_base = OTHER; note = 2'-O-methyluridine-3'-phosphate
  modified_base 16: mod_base = OTHER; note = 2'-fluoroguanosine-3'-phosphate
  modified_base 17: mod_base = OTHER; note = 2'-O-methylguanosine-3'-phosphate
  modified_base 18: mod_base = OTHER; note = 2'-O-methylcytidine-3'-phosphate
  modified_base 19: mod_base = OTHER; note = 2'-O-methyluridine-3'-phosphate
  modified_base 20: mod_base = OTHER; note = 2'-O-methylcytidine-3'-phosphate
  modified_base 21: mod_base = OTHER; note = 2'-O-methyladenosine-3'-phosphorothioate
  modified_base 22: mod_base = OTHER; note = 2'-O-methylguanosine-3'-phosphorothioate
  modified_base 23: mod_base = OTHER; note = 2'-O-methyluridine
ccaatctgcgtttctggctcagt

SEQ ID NO: 1972 - RNA, 21 nt, synthetic construct
  source 1..21: mol_type = other RNA
  modified_base 1: mod_base = OTHER; note = 2'-O-methylguanosine-3'-phosphorothioate
  modified_base 2: mod_base = OTHER; note = 2'-O-methyladenosine-3'-phosphorothioate
  modified_base 3: mod_base = OTHER; note = 2'-O-methyladenosine-3'-phosphate
  modified_base 4: mod_base = OTHER; note = 2'-O-methylguanosine-3'-phosphate
  modified_base 5: mod_base = OTHER; note = 2'-O-methylcytidine-3'-phosphate
  modified_base 6: mod_base = OTHER; note = 2'-O-methylcytidine-3'-phosphate
  modified_base 7: mod_base = OTHER; note = 2'-fluoroadenosine-3'-phosphate
  modified_base 8: mod_base = OTHER; note = 2'-O-methyladenosine-3'-phosphate
  modified_base 9: mod_base = OTHER; note = 2'-fluoroguanosine-3'-phosphate
  modified_base 10: mod_base = OTHER; note = 2'-fluorocytidine-3'-phosphate
  modified_base 11: mod_base = OTHER; note = 2'-fluorocytidine-3'-phosphate
  modified_base 12: mod_base = OTHER; note = 2'-O-methyluridine-3'-phosphate
  modified_base 13: mod_base = OTHER; note = 2'-O-methylcytidine-3'-phosphate
  modified_base 14: mod_base = OTHER; note = 2'-O-methyluridine-3'-phosphate
  modified_base 15: mod_base = OTHER; note = 2'-O-methyluridine-3'-phosphate
  modified_base 16: mod_base = OTHER; note = 2'-O-methylcytidine-3'-phosphate
  modified_base 17: mod_base = OTHER; note = 2'-O-methyluridine-3'-phosphate
  modified_base 18: mod_base = OTHER; note = 2'-O-methyluridine-3'-phosphate
  modified_base 19: mod_base = OTHER; note = 2'-O-methyladenosine-3'-phosphate
  modified_base 20: mod_base = OTHER; note = 2'-O-methylcytidine-3'-phosphate
  modified_base 21: mod_base = OTHER; note = 2'-O-methyluridine
gaagccaagcctcttcttact

SEQ ID NO: 1973 - RNA, 23 nt, synthetic construct
  source 1..23: mol_type = other RNA
  modified_base 1: mod_base = OTHER; note = 2'-O-methyladenosine-3'-phosphorothioate
  modified_base 2: mod_base = OTHER; note = 2'-fluoroguanosine-3'-phosphorothioate
  modified_base 3: mod_base = OTHER; note = 2'-O-methyluridine-3'-phosphate
  modified_base 4: mod_base = OTHER; note = 2'-O-methyladenosine-3'-phosphate
  modified_base 5: mod_base = OTHER; note = 2'-O-methyladenosine-3'-phosphate
  modified_base 6: mod_base = OTHER; note = 2'-O-methylguanosine-3'-phosphate
  modified_base 7: mod_base = OTHER; note = 2'-fluoroadenosine-3'-phosphate
  modified_base 8: mod_base = OTHER; note = 2'-O-methyladenosine-3'-phosphate
  modified_base 9: mod_base = OTHER; note = 2'-O-methylguanosine-3'-phosphate
  modified_base 10: mod_base = OTHER; note = 2'-O-methyladenosine-3'-phosphate
  modified_base 11: mod_base = OTHER; note = 2'-O-methylguanosine-3'-phosphate
  modified_base 12: mod_base = OTHER; note = 2'-fluoroguanosine-3'-phosphate
  modified_base 13: mod_base = OTHER; note = 2'-O-methylcytidine-3'-phosphate
  modified_base 14: mod_base = OTHER; note = 2'-fluorouridine-3'-phosphate
  modified_base 15: mod_base = OTHER; note = 2'-O-methyluridine-3'-phosphate
  modified_base 16: mod_base = OTHER; note = 2'-fluoroguanosine-3'-phosphate
  modified_base 17: mod_base = OTHER; note = 2'-O-methylguanosine-3'-phosphate
  modified_base 18: mod_base = OTHER; note = 2'-O-methylcytidine-3'-phosphate
  modified_base 19: mod_base = OTHER; note = 2'-O-methyluridine-3'-phosphate
  modified_base 20: mod_base = OTHER; note = 2'-O-methyluridine-3'-phosphate
  modified_base 21: mod_base = OTHER; note = 2'-O-methylcytidine-3'-phosphorothioate
  modified_base 22: mod_base = OTHER; note = 2'-O-methyladenosine-3'-phosphorothioate
  modified_base 23: mod_base = OTHER; note = 2'-O-methylguanosine
agtaagaagaggcttggcttcag

SEQ ID NO: 1974 - RNA, 21 nt, synthetic construct
  source 1..21: mol_type = other RNA
  modified_base 1: mod_base = OTHER; note = 2'-O-methyladenosine-3'-phosphorothioate
  modified_base 2: mod_base = OTHER; note = 2'-O-methylguanosine-3'-phosphorothioate
  modified_base 3: mod_base = OTHER; note = 2'-O-methylcytidine-3'-phosphate
  modified_base 4: mod_base = OTHER; note = 2'-O-methylcytidine-3'-phosphate
  modified_base 5: mod_base = OTHER; note = 2'-O-methyladenosine-3'-phosphate
  modified_base 6: mod_base = OTHER; note = 2'-O-methyladenosine-3'-phosphate
  modified_base 7: mod_base = OTHER; note = 2'-fluoroguanosine-3'-phosphate
  modified_base 8: mod_base = OTHER; note = 2'-O-methylcytidine-3'-phosphate
  modified_base 9: mod_base = OTHER; note = 2'-fluorocytidine-3'-phosphate
  modified_base 10: mod_base = OTHER; note = 2'-fluorouridine-3'-phosphate
  modified_base 11: mod_base = OTHER; note = 2'-fluorocytidine-3'-phosphate
  modified_base 12: mod_base = OTHER; note = 2'-O-methyluridine-3'-phosphate
  modified_base 13: mod_base = OTHER; note = 2'-O-methyluridine-3'-phosphate
  modified_base 14: mod_base = OTHER; note = 2'-O-methylcytidine-3'-phosphate
  modified_base 15: mod_base = OTHER; note = 2'-O-methyluridine-3'-phosphate
  modified_base 16: mod_base = OTHER; note = 2'-O-methyluridine-3'-phosphate
  modified_base 17: mod_base = OTHER; note = 2'-O-methyladenosine-3'-phosphate
  modified_base 18: mod_base = OTHER; note = 2'-O-methylcytidine-3'-phosphate
  modified_base 19: mod_base = OTHER; note = 2'-O-methyluridine-3'-phosphate
  modified_base 20: mod_base = OTHER; note = 2'-O-methyluridine-3'-phosphate
  modified_base 21: mod_base = OTHER; note = 2'-O-methylcytidine
agccaagcctcttcttacttc

SEQ ID NO: 1975 - RNA, 23 nt, synthetic construct
  source 1..23: mol_type = other RNA
  modified_base 1: mod_base = OTHER; note = 2'-O-methylguanosine-3'-phosphorothioate
  modified_base 2: mod_base = OTHER; note = 2'-fluoroadenosine-3'-phosphorothioate
  modified_base 3: mod_base = OTHER; note = 2'-O-methyladenosine-3'-phosphate
  modified_base 4: mod_base = OTHER; note = 2'-O-methylguanosine-3'-phosphate
  modified_base 5: mod_base = OTHER; note = 2'-O-methyluridine-3'-phosphate
  modified_base 6: mod_base = OTHER; note = 2'-O-methyladenosine-3'-phosphate
  modified_base 7: mod_base = OTHER; note = 2'-fluoroadenosine-3'-phosphate
  modified_base 8: mod_base = OTHER; note = 2'-O-methylguanosine-3'-phosphate
  modified_base 9: mod_base = OTHER; note = 2'-O-methyladenosine-3'-phosphate
  modified_base 10: mod_base = OTHER; note = 2'-O-methyladenosine-3'-phosphate
  modified_base 11: mod_base = OTHER; note = 2'-O-methylguanosine-3'-phosphate
  modified_base 12: mod_base = OTHER; note = 2'-fluoroadenosine-3'-phosphate
  modified_base 13: mod_base = OTHER; note = 2'-O-methylguanosine-3'-phosphate
  modified_base 14: mod_base = OTHER; note = 2'-fluoroguanosine-3'-phosphate
  modified_base 15: mod_base = OTHER; note = 2'-O-methylcytidine-3'-phosphate
  modified_base 16: mod_base = OTHER; note = 2'-fluorouridine-3'-phosphate
  modified_base 17: mod_base = OTHER; note = 2'-O-methyluridine-3'-phosphate
  modified_base 18: mod_base = OTHER; note = 2'-O-methylguanosine-3'-phosphate
  modified_base 19: mod_base = OTHER; note = 2'-O-methylguanosine-3'-phosphate
  modified_base 20: mod_base = OTHER; note = 2'-O-methylcytidine-3'-phosphate
  modified_base 21: mod_base = OTHER; note = 2'-O-methyluridine-3'-phosphorothioate
  modified_base 22: mod_base = OTHER; note = 2'-O-methyluridine-3'-phosphorothioate
  modified_base 23: mod_base = OTHER; note = 2'-O-methylcytidine
gaagtaagaagaggcttggcttc

SEQ ID NO: 1976 - RNA, 21 nt, synthetic construct
  source 1..21: mol_type = other RNA
  modified_base 1: mod_base = OTHER; note = 2'-O-methylcytidine-3'-phosphorothioate
  modified_base 2: mod_base = OTHER; note = 2'-O-methylcytidine-3'-phosphorothioate
  modified_base 3: mod_base = OTHER; note = 2'-O-methylcytidine-3'-phosphate
  modified_base 4: mod_base = OTHER; note = 2'-O-methyladenosine-3'-phosphate
  modified_base 5: mod_base = OTHER; note = 2'-O-methyladenosine-3'-phosphate
  modified_base 6: mod_base = OTHER; note = 2'-O-methylguanosine-3'-phosphate
  modified_base 7: mod_base = OTHER; note = 2'-fluorocytidine-3'-phosphate
  modified_base 8: mod_base = OTHER; note = 2'-O-methyladenosine-3'-phosphate
  modified_base 9: mod_base = OTHER; note = 2'-fluoroadenosine-3'-phosphate
  modified_base 10: mod_base = OTHER; note = 2'-fluoroguanosine-3'-phosphate
  modified_base 11: mod_base = OTHER; note = 2'-fluorocytidine-3'-phosphate
  modified_base 12: mod_base = OTHER; note = 2'-O-methyladenosine-3'-phosphate
  modified_base 13: mod_base = OTHER; note = 2'-O-methylguanosine-3'-phosphate
  modified_base 14: mod_base = OTHER; note = 2'-O-methyladenosine-3'-phosphate
  modified_base 15: mod_base = OTHER; note = 2'-O-methylcytidine-3'-phosphate
  modified_base 16: mod_base = OTHER; note = 2'-O-methyladenosine-3'-phosphate
  modified_base 17: mod_base = OTHER; note = 2'-O-methyluridine-3'-phosphate
  modified_base 18: mod_base = OTHER; note = 2'-O-methyluridine-3'-phosphate
  modified_base 19: mod_base = OTHER; note = 2'-O-methyluridine-3'-phosphate
  modified_base 20: mod_base = OTHER; note = 2'-O-methyladenosine-3'-phosphate
  modified_base 21: mod_base = OTHER; note = 2'-O-methyluridine
cccaagcaagcagacatttat

SEQ ID NO: 1977 - RNA, 23 nt, synthetic construct
  source 1..23: mol_type = other RNA
  modified_base 1: mod_base = OTHER; note = 2'-O-methyladenosine-3'-phosphorothioate
  modified_base 2: mod_base = OTHER; note = 2'-fluorouridine-3'-phosphorothioate
  modified_base 3: mod_base = OTHER; note = 2'-O-methyladenosine-3'-phosphate
  modified_base 4: mod_base = OTHER; note = 2'-O-methyladenosine-3'-phosphate
  modified_base 5: mod_base = OTHER; note = 2'-O-methyladenosine-3'-phosphate
  modified_base 6: mod_base = OTHER; note = 2'-O-methyluridine-3'-phosphate
  modified_base 7: mod_base = OTHER; note = 2'-fluoroguanosine-3'-phosphate
  modified_base 8: mod_base = OTHER; note = 2'-O-methyluridine-3'-phosphate
  modified_base 9: mod_base = OTHER; note = 2'-O-methylcytidine-3'-phosphate
  modified_base 10: mod_base = OTHER; note = 2'-O-methyluridine-3'-phosphate
  modified_base 11: mod_base = OTHER; note = 2'-O-methylguanosine-3'-phosphate
  modified_base 12: mod_base = OTHER; note = 2'-fluorocytidine-3'-phosphate
  modified_base 13: mod_base = OTHER; note = 2'-O-methyluridine-3'-phosphate
  modified_base 14: mod_base = OTHER; note = 2'-fluorouridine-3'-phosphate
  modified_base 15: mod_base = OTHER; note = 2'-O-methylguanosine-3'-phosphate
  modified_base 16: mod_base = OTHER; note = 2'-fluorocytidine-3'-phosphate
  modified_base 17: mod_base = OTHER; note = 2'-O-methyluridine-3'-phosphate
  modified_base 18: mod_base = OTHER; note = 2'-O-methyluridine-3'-phosphate
  modified_base 19: mod_base = OTHER; note = 2'-O-methylguanosine-3'-phosphate
  modified_base 20: mod_base = OTHER; note = 2'-O-methylguanosine-3'-phosphate
  modified_base 21: mod_base = OTHER; note = 2'-O-methylguanosine-3'-phosphorothioate
  modified_base 22: mod_base = OTHER; note = 2'-O-methyluridine-3'-phosphorothioate
  modified_base 23: mod_base = OTHER; note = 2'-O-methylguanosine
ataaatgtctgcttgcttgggtg

SEQ ID NO: 1978 - RNA, 21 nt, synthetic construct
  source 1..21: mol_type = other RNA
  modified_base 1: mod_base = OTHER; note = 2'-O-methylcytidine-3'-phosphorothioate
  modified_base 2: mod_base = OTHER; note = 2'-O-methylcytidine-3'-phosphorothioate
  modified_base 3: mod_base = OTHER; note = 2'-O-methyladenosine-3'-phosphate
  modified_base 4: mod_base = OTHER; note = 2'-O-methyladenosine-3'-phosphate
  modified_base 5: mod_base = OTHER; note = 2'-O-methylguanosine-3'-phosphate
  modified_base 6: mod_base = OTHER; note = 2'-O-methylcytidine-3'-phosphate
  modified_base 7: mod_base = OTHER; note = 2'-fluoroadenosine-3'-phosphate
  modified_base 8: mod_base = OTHER; note = 2'-O-methyladenosine-3'-phosphate
  modified_base 9: mod_base = OTHER; note = 2'-fluoroguanosine-3'-phosphate
  modified_base 10: mod_base = OTHER; note = 2'-fluorocytidine-3'-phosphate
  modified_base 11: mod_base = OTHER; note = 2'-fluoroadenosine-3'-phosphate
  modified_base 12: mod_base = OTHER; note = 2'-O-methylguanosine-3'-phosphate
  modified_base 13: mod_base = OTHER; note = 2'-O-methyladenosine-3'-phosphate
  modified_base 14: mod_base = OTHER; note = 2'-O-methylcytidine-3'-phosphate
  modified_base 15: mod_base = OTHER; note = 2'-O-methyladenosine-3'-phosphate
  modified_base 16: mod_base = OTHER; note = 2'-O-methyluridine-3'-phosphate
  modified_base 17: mod_base = OTHER; note = 2'-O-methyluridine-3'-phosphate
  modified_base 18: mod_base = OTHER; note = 2'-O-methyluridine-3'-phosphate
  modified_base 19: mod_base = OTHER; note = 2'-O-methyladenosine-3'-phosphate
  modified_base 20: mod_base = OTHER; note = 2'-O-methyluridine-3'-phosphate
  modified_base 21: mod_base = OTHER; note = 2'-O-methylcytidine
ccaagcaagcagacatttatc

SEQ ID NO: 1979 - RNA, 23 nt, synthetic construct
  source 1..23: mol_type = other RNA
  modified_base 1: mod_base = OTHER; note = 2'-O-methylguanosine-3'-phosphorothioate
  modified_base 2: mod_base = OTHER; note = 2'-fluoroadenosine-3'-phosphorothioate
  modified_base 3: mod_base = OTHER; note = 2'-O-methyluridine-3'-phosphate
  modified_base 4: mod_base = OTHER; note = 2'-O-methyladenosine-3'-phosphate
  modified_base 5: mod_base = OTHER; note = 2'-O-methyladenosine-3'-phosphate
  modified_base 6: mod_base = OTHER; note = 2'-O-methyladenosine-3'-phosphate
  modified_base 7: mod_base = OTHER; note = 2'-fluorouridine-3'-phosphate
  modified_base 8: mod_base = OTHER; note = 2'-O-methylguanosine-3'-phosphate
  modified_base 9: mod_base = OTHER; note = 2'-O-methyluridine-3'-phosphate
  modified_base 10: mod_base = OTHER; note = 2'-O-methylcytidine-3'-phosphate
  modified_base 11: mod_base = OTHER; note = 2'-O-methyluridine-3'-phosphate
  modified_base 12: mod_base = OTHER; note = 2'-fluoroguanosine-3'-phosphate
  modified_base 13: mod_base = OTHER; note = 2'-O-methylcytidine-3'-phosphate
  modified_base 14: mod_base = OTHER; note = 2'-fluorouridine-3'-phosphate
  modified_base 15: mod_base = OTHER; note = 2'-O-methyluridine-3'-phosphate
  modified_base 16: mod_base = OTHER; note = 2'-fluoroguanosine-3'-phosphate
  modified_base 17: mod_base = OTHER; note = 2'-O-methylcytidine-3'-phosphate
  modified_base 18: mod_base = OTHER; note = 2'-O-methyluridine-3'-phosphate
  modified_base 19: mod_base = OTHER; note = 2'-O-methyluridine-3'-phosphate
  modified_base 20: mod_base = OTHER; note = 2'-O-methylguanosine-3'-phosphate
  modified_base 21: mod_base = OTHER; note = 2'-O-methylguanosine-3'-phosphorothioate
  modified_base 22: mod_base = OTHER; note = 2'-O-methylguanosine-3'-phosphorothioate
  modified_base 23: mod_base = OTHER; note = 2'-O-methyluridine
gataaatgtctgcttgcttgggt

SEQ ID NO: 1980 - RNA, 21 nt, synthetic construct
  source 1..21: mol_type = other RNA
  modified_base 1: mod_base = OTHER; note = 2'-O-methyluridine-3'-phosphorothioate
  modified_base 2: mod_base = OTHER; note = 2'-O-methyluridine-3'-phosphorothioate
  modified_base 3: mod_base = OTHER; note = 2'-O-methyluridine-3'-phosphate
  modified_base 4: mod_base = OTHER; note = 2'-O-methyluridine-3'-phosphate
  modified_base 5: mod_base = OTHER; note = 2'-O-methylguanosine-3'-phosphate
  modified_base 6: mod_base = OTHER; note = 2'-O-methylguanosine-3'-phosphate
  modified_base 7: mod_base = OTHER; note = 2'-fluoroguanosine-3'-phosphate
  modified_base 8: mod_base = OTHER; note = 2'-O-methyluridine-3'-phosphate
  modified_base 9: mod_base = OTHER; note = 2'-fluorocytidine-3'-phosphate
  modified_base 10: mod_base = OTHER; note = 2'-fluorouridine-3'-phosphate
  modified_base 11: mod_base = OTHER; note = 2'-fluoroguanosine-3'-phosphate
  modified_base 12: mod_base = OTHER; note = 2'-O-methyluridine-3'-phosphate
  modified_base 13: mod_base = OTHER; note = 2'-O-methylcytidine-3'-phosphate
  modified_base 14: mod_base = OTHER; note = 2'-O-methylcytidine-3'-phosphate
  modified_base 15: mod_base = OTHER; note = 2'-O-methyluridine-3'-phosphate
  modified_base 16: mod_base = OTHER; note = 2'-O-methylcytidine-3'-phosphate
  modified_base 17: mod_base = OTHER; note = 2'-O-methyluridine-3'-phosphate
  modified_base 18: mod_base = OTHER; note = 2'-O-methylcytidine-3'-phosphate
  modified_base 19: mod_base = OTHER; note = 2'-O-methyluridine-3'-phosphate
  modified_base 20: mod_base = OTHER; note = 2'-O-methylguanosine-3'-phosphate
  modified_base 21: mod_base = OTHER; note = 2'-O-methyluridine
ttttgggtctgtcctctctgt

SEQ ID NO: 1981 - RNA, 23 nt, synthetic construct
  source 1..23: mol_type = other RNA
  modified_base 1: mod_base = OTHER; note = 2'-O-methyladenosine-3'-phosphorothioate
  modified_base 2: mod_base = OTHER; note = 2'-fluorocytidine-3'-phosphorothioate
  modified_base 3: mod_base = OTHER; note = 2'-O-methyladenosine-3'-phosphate
  modified_base 4: mod_base = OTHER; note = 2'-O-methylguanosine-3'-phosphate
  modified_base 5: mod_base = OTHER; note = 2'-O-methyladenosine-3'-phosphate
  modified_base 6: mod_base = OTHER; note = 2'-O-methylguanosine-3'-phosphate
  modified_base 7: mod_base = OTHER; note = 2'-fluoroadenosine-3'-phosphate
  modified_base 8: mod_base = OTHER; note = 2'-O-methylguanosine-3'-phosphate
  modified_base 9: mod_base = OTHER; note = 2'-O-methylguanosine-3'-phosphate
  modified_base 10: mod_base = OTHER; note = 2'-O-methyladenosine-3'-phosphate
  modified_base 11: mod_base = OTHER; note = 2'-O-methylcytidine-3'-phosphate
  modified_base 12: mod_base = OTHER; note = 2'-fluoroadenosine-3'-phosphate
  modified_base 13: mod_base = OTHER; note = 2'-O-methylguanosine-3'-phosphate
  modified_base 14: mod_base = OTHER; note = 2'-fluoroadenosine-3'-phosphate
  modified_base 15: mod_base = OTHER; note = 2'-O-methylcytidine-3'-phosphate
  modified_base 16: mod_base = OTHER; note = 2'-fluorocytidine-3'-phosphate
  modified_base 17: mod_base = OTHER; note = 2'-O-methylcytidine-3'-phosphate
  modified_base 18: mod_base = OTHER; note = 2'-O-methyladenosine-3'-phosphate
  modified_base 19: mod_base = OTHER; note = 2'-O-methyladenosine-3'-phosphate
  modified_base 20: mod_base = OTHER; note = 2'-O-methyladenosine-3'-phosphate
  modified_base 21: mod_base = OTHER; note = 2'-O-methyladenosine-3'-phosphorothioate
  modified_base 22: mod_base = OTHER; note = 2'-O-methylguanosine-3'-phosphorothioate
  modified_base 23: mod_base = OTHER; note = 2'-O-methyladenosine
acagagaggacagacccaaaaga

SEQ ID NO: 1982 - RNA, 21 nt, synthetic construct
  source 1..21: mol_type = other RNA
  modified_base 1: mod_base = OTHER; note = 2'-O-methyluridine-3'-phosphorothioate
  modified_base 2: mod_base = OTHER; note = 2'-O-methylcytidine-3'-phosphorothioate
  modified_base 3: mod_base = OTHER; note = 2'-O-methyluridine-3'-phosphate
  modified_base 4: mod_base = OTHER; note = 2'-O-methylguanosine-3'-phosphate
  modified_base 5: mod_base = OTHER; note = 2'-O-methyluridine-3'-phosphate
  modified_base 6: mod_base = OTHER; note = 2'-O-methylcytidine-3'-phosphate
  modified_base 7: mod_base = OTHER; note = 2'-fluorocytidine-3'-phosphate
  modified_base 8: mod_base = OTHER; note = 2'-O-methyluridine-3'-phosphate
  modified_base 9: mod_base = OTHER; note = 2'-fluorocytidine-3'-phosphate
  modified_base 10: mod_base = OTHER; note = 2'-fluorouridine-3'-phosphate
  modified_base 11: mod_base = OTHER; note = 2'-fluorocytidine-3'-phosphate
  modified_base 12: mod_base = OTHER; note = 2'-O-methyluridine-3'-phosphate
  modified_base 13: mod_base = OTHER; note = 2'-O-methylguanosine-3'-phosphate
  modified_base 14: mod_base = OTHER; note = 2'-O-methyluridine-3'-phosphate
  modified_base 15: mod_base = OTHER; note = 2'-O-methyluridine-3'-phosphate
  modified_base 16: mod_base = OTHER; note = 2'-O-methylguanosine-3'-phosphate
  modified_base 17: mod_base = OTHER; note = 2'-O-methylcytidine-3'-phosphate
  modified_base 18: mod_base = OTHER; note = 2'-O-methylcytidine-3'-phosphate
  modified_base 19: mod_base = OTHER; note = 2'-O-methyluridine-3'-phosphate
  modified_base 20: mod_base = OTHER; note = 2'-O-methyluridine-3'-phosphate
  modified_base 21: mod_base = OTHER; note = 2'-O-methyluridine
tctgtcctctctgttgccttt

SEQ ID NO: 1983 - RNA, 23 nt, synthetic construct
  source 1..23: mol_type = other RNA
  modified_base 1: mod_base = OTHER; note = 2'-O-methyladenosine-3'-phosphorothioate
  modified_base 2: mod_base = OTHER; note = 2'-fluoroadenosine-3'-phosphorothioate
  modified_base 3: mod_base = OTHER; note = 2'-O-methyladenosine-3'-phosphate
  modified_base 4: mod_base = OTHER; note = 2'-O-methylguanosine-3'-phosphate
  modified_base 5: mod_base = OTHER; note = 2'-O-methylguanosine-3'-phosphate
  modified_base 6: mod_base = OTHER; note = 2'-O-methylcytidine-3'-phosphate
  modified_base 7: mod_base = OTHER; note = 2'-fluoroadenosine-3'-phosphate
  modified_base 8: mod_base = OTHER; note = 2'-O-methyladenosine-3'-phosphate
  modified_base 9: mod_base = OTHER; note = 2'-O-methylcytidine-3'-phosphate
  modified_base 10: mod_base = OTHER; note = 2'-O-methyladenosine-3'-phosphate
  modified_base 11: mod_base = OTHER; note = 2'-O-methylguanosine-3'-phosphate
  modified_base 12: mod_base = OTHER; note = 2'-fluoroadenosine-3'-phosphate
  modified_base 13: mod_base = OTHER; note = 2'-O-methylguanosine-3'-phosphate
  modified_base 14: mod_base = OTHER; note = 2'-fluoroadenosine-3'-phosphate
  modified_base 15: mod_base = OTHER; note = 2'-O-methylguanosine-3'-phosphate
  modified_base 16: mod_base = OTHER; note = 2'-fluoroguanosine-3'-phosphate
  modified_base 17: mod_base = OTHER; note = 2'-O-methyladenosine-3'-phosphate
  modified_base 18: mod_base = OTHER; note = 2'-O-methylcytidine-3'-phosphate
  modified_base 19: mod_base = OTHER; note = 2'-O-methyladenosine-3'-phosphate
  modified_base 20: mod_base = OTHER; note = 2'-O-methylguanosine-3'-phosphate
  modified_base 21: mod_base = OTHER; note = 2'-O-methyladenosine-3'-phosphorothioate
  modified_base 22: mod_base = OTHER; note = 2'-O-methylcytidine-3'-phosphorothioate
  modified_base 23: mod_base = OTHER; note = 2'-O-methylcytidine
aaaggcaacagagaggacagacc

SEQ ID NO: 1984 - RNA, 21 nt, synthetic construct
  source 1..21: mol_type = other RNA
  modified_base 1: mod_base = OTHER; note = 2'-O-methylcytidine-3'-phosphorothioate
  modified_base 2: mod_base = OTHER; note = 2'-O-methyluridine-3'-phosphorothioate
  modified_base 3: mod_base = OTHER; note = 2'-O-methylguanosine-3'-phosphate
  modified_base 4: mod_base = OTHER; note = 2'-O-methyluridine-3'-phosphate
  modified_base 5: mod_base = OTHER; note = 2'-O-methylcytidine-3'-phosphate
  modified_base 6: mod_base = OTHER; note = 2'-O-methylcytidine-3'-phosphate
  modified_base 7: mod_base = OTHER; note = 2'-fluorouridine-3'-phosphate
  modified_base 8: mod_base = OTHER; note = 2'-O-methylcytidine-3'-phosphate
  modified_base 9: mod_base = OTHER; note = 2'-fluorouridine-3'-phosphate
  modified_base 10: mod_base = OTHER; note = 2'-fluorocytidine-3'-phosphate
  modified_base 11: mod_base = OTHER; note = 2'-fluorouridine-3'-phosphate
  modified_base 12: mod_base = OTHER; note = 2'-O-methylguanosine-3'-phosphate
  modified_base 13: mod_base = OTHER; note = 2'-O-methyluridine-3'-phosphate
  modified_base 14: mod_base = OTHER; note = 2'-O-methyluridine-3'-phosphate
  modified_base 15: mod_base = OTHER; note = 2'-O-methylguanosine-3'-phosphate
  modified_base 16: mod_base = OTHER; note = 2'-O-methylcytidine-3'-phosphate
  modified_base 17: mod_base = OTHER; note = 2'-O-methylcytidine-3'-phosphate
  modified_base 18: mod_base = OTHER; note = 2'-O-methyluridine-3'-phosphate
  modified_base 19: mod_base = OTHER; note = 2'-O-methyluridine-3'-phosphate
  modified_base 20: mod_base = OTHER; note = 2'-O-methyluridine-3'-phosphate
  modified_base 21: mod_base = OTHER; note = 2'-O-methyluridine
ctgtcctctctgttgcctttt

SEQ ID NO: 1985 - RNA, 23 nt, synthetic construct
  source 1..23: mol_type = other RNA
  modified_base 1: mod_base = OTHER; note = 2'-O-methyladenosine-3'-phosphorothioate
  modified_base 2: mod_base = OTHER; note = 2'-fluoroadenosine-3'-phosphorothioate
  modified_base 3: mod_base = OTHER; note = 2'-O-methyladenosine-3'-phosphate
  modified_base 4: mod_base = OTHER; note = 2'-O-methyladenosine-3'-phosphate
  modified_base 5: mod_base = OTHER; note = 2'-O-methylguanosine-3'-phosphate
  modified_base 6: mod_base = OTHER; note = 2'-O-methylguanosine-3'-phosphate
  modified_base 7: mod_base = OTHER; note = 2'-fluorocytidine-3'-phosphate
  modified_base 8: mod_base = OTHER; note = 2'-O-methyladenosine-3'-phosphate
  modified_base 9: mod_base = OTHER; note = 2'-O-methyladenosine-3'-phosphate
  modified_base 10: mod_base = OTHER; note = 2'-O-methylcytidine-3'-phosphate
  modified_base 11: mod_base = OTHER; note = 2'-O-methyladenosine-3'-phosphate
  modified_base 12: mod_base = OTHER; note = 2'-fluoroguanosine-3'-phosphate
  modified_base 13: mod_base = OTHER; note = 2'-O-methyladenosine-3'-phosphate
  modified_base 14: mod_base = OTHER; note = 2'-fluoroguanosine-3'-phosphate
  modified_base 15: mod_base = OTHER; note = 2'-O-methyladenosine-3'-phosphate
  modified_base 16: mod_base = OTHER; note = 2'-fluoroguanosine-3'-phosphate
  modified_base 17: mod_base = OTHER; note = 2'-O-methylguanosine-3'-phosphate
  modified_base 18: mod_base = OTHER; note = 2'-O-methyladenosine-3'-phosphate
  modified_base 19: mod_base = OTHER; note = 2'-O-methylcytidine-3'-phosphate
  modified_base 20: mod_base = OTHER; note = 2'-O-methyladenosine-3'-phosphate
  modified_base 21: mod_base = OTHER; note = 2'-O-methylguanosine-3'-phosphorothioate
  modified_base 22: mod_base = OTHER; note = 2'-O-methyladenosine-3'-phosphorothioate
  modified_base 23: mod_base = OTHER; note = 2'-O-methylcytidine
aaaaggcaacagagaggacagac

SEQ ID NO: 1986 - RNA, 21 nt, synthetic construct
  source 1..21: mol_type = other RNA
  modified_base 1: mod_base = OTHER; note = 2'-O-methyluridine-3'-phosphorothioate
  modified_base 2: mod_base = OTHER; note = 2'-O-methylguanosine-3'-phosphorothioate
  modified_base 3: mod_base = OTHER; note = 2'-O-methyluridine-3'-phosphate
  modified_base 4: mod_base = OTHER; note = 2'-O-methylcytidine-3'-phosphate
  modified_base 5: mod_base = OTHER; note = 2'-O-methylcytidine-3'-phosphate
  modified_base 6: mod_base = OTHER; note = 2'-O-methyluridine-3'-phosphate
  modified_base 7: mod_base = OTHER; note = 2'-fluorocytidine-3'-phosphate
  modified_base 8: mod_base = OTHER; note = 2'-O-methyluridine-3'-phosphate
  modified_base 9: mod_base = OTHER; note = 2'-fluorocytidine-3'-phosphate
  modified_base 10: mod_base = OTHER; note = 2'-fluorouridine-3'-phosphate
  modified_base 11: mod_base = OTHER; note = 2'-fluoroguanosine-3'-phosphate
  modified_base 12: mod_base = OTHER; note = 2'-O-methyluridine-3'-phosphate
  modified_base 13: mod_base = OTHER; note = 2'-O-methyluridine-3'-phosphate
  modified_base 14: mod_base = OTHER; note = 2'-O-methylguanosine-3'-phosphate
  modified_base 15: mod_base = OTHER; note = 2'-O-methylcytidine-3'-phosphate
  modified_base 16: mod_base = OTHER; note = 2'-O-methylcytidine-3'-phosphate
  modified_base 17: mod_base = OTHER; note = 2'-O-methyluridine-3'-phosphate
  modified_base 18: mod_base = OTHER; note = 2'-O-methyluridine-3'-phosphate
  modified_base 19: mod_base = OTHER; note = 2'-O-methyluridine-3'-phosphate
  modified_base 20: mod_base = OTHER; note = 2'-O-methyluridine-3'-phosphate
  modified_base 21: mod_base = OTHER; note = 2'-O-methyluridine
tgtcctctctgttgccttttt

SEQ ID NO: 1987 - RNA, 22 nt, synthetic construct
  source 1..22: mol_type = other RNA
  modified_base 1: mod_base = OTHER; note = 2'-O-methyladenosine-3'-phosphorothioate
  modified_base 2: mod_base = OTHER; note = 2'-fluoroadenosine-3'-phosphorothioate
  modified_base 3: mod_base = OTHER; note = 2'-O-methyladenosine-3'-phosphate
  modified_base 4: mod_base = OTHER; note = 2'-O-methyladenosine-3'-phosphate
  modified_base 5: mod_base = OTHER; note = 2'-O-methyladenosine-3'-phosphate
  modified_base 6: mod_base = OTHER; note = 2'-fluoroguanosine-3'-phosphate
  modified_base 7: mod_base = OTHER; note = 2'-O-methylcytidine-3'-phosphate
  modified_base 8: mod_base = OTHER; note = 2'-O-methyladenosine-3'-phosphate
  modified_base 9: mod_base = OTHER; note = 2'-O-methyladenosine-3'-phosphate
  modified_base 10: mod_base = OTHER; note = 2'-O-methylcytidine-3'-phosphate
  modified_base 11: mod_base = OTHER; note = 2'-fluoroadenosine-3'-phosphate
  modified_base 12: mod_base = OTHER; note = 2'-O-methylguanosine-3'-phosphate
  modified_base 13: mod_base = OTHER; note = 2'-fluoroadenosine-3'-phosphate
  modified_base 14: mod_base = OTHER; note = 2'-O-methylguanosine-3'-phosphate
  modified_base 15: mod_base = OTHER; note = 2'-fluoroadenosine-3'-phosphate
  modified_base 16: mod_base = OTHER; note = 2'-O-methylguanosine-3'-phosphate
  modified_base 17: mod_base = OTHER; note = 2'-O-methylguanosine-3'-phosphate
  modified_base 18: mod_base = OTHER; note = 2'-O-methyladenosine-3'-phosphate
  modified_base 19: mod_base = OTHER; note = 2'-O-methylcytidine-3'-phosphate
  modified_base 20: mod_base = OTHER; note = 2'-O-methyladenosine-3'-phosphorothioate
  modified_base 21: mod_base = OTHER; note = 2'-O-methylguanosine-3'-phosphorothioate
  modified_base 22: mod_base = OTHER; note = 2'-O-methyladenosine
aaaaagcaacagagaggacaga

SEQ ID NO: 1988 - RNA, 21 nt, synthetic construct
  source 1..21: mol_type = other RNA
  modified_base 1: mod_base = OTHER; note = 2'-O-methylguanosine-3'-phosphorothioate
  modified_base 2: mod_base = OTHER; note = 2'-O-methyluridine-3'-phosphorothioate
  modified_base 3: mod_base = OTHER; note = 2'-O-methylcytidine-3'-phosphate
  modified_base 4: mod_base = OTHER; note = 2'-O-methylcytidine-3'-phosphate
  modified_base 5: mod_base = OTHER; note = 2'-O-methyluridine-3'-phosphate
  modified_base 6: mod_base = OTHER; note = 2'-O-methylcytidine-3'-phosphate
  modified_base 7: mod_base = OTHER; note = 2'-fluorouridine-3'-phosphate
  modified_base 8: mod_base = OTHER; note = 2'-O-methylcytidine-3'-phosphate
  modified_base 9: mod_base = OTHER; note = 2'-fluorouridine-3'-phosphate
  modified_base 10: mod_base = OTHER; note = 2'-fluoroguanosine-3'-phosphate
  modified_base 11: mod_base = OTHER; note = 2'-fluorouridine-3'-phosphate
  modified_base 12: mod_base = OTHER; note = 2'-O-methyluridine-3'-phosphate
  modified_base 13: mod_base = OTHER; note = 2'-O-methylguanosine-3'-phosphate
  modified_base 14: mod_base = OTHER; note = 2'-O-methylcytidine-3'-phosphate
  modified_base 15: mod_base = OTHER; note = 2'-O-methylcytidine-3'-phosphate
  modified_base 16: mod_base = OTHER; note = 2'-O-methyluridine-3'-phosphate
  modified_base 17: mod_base = OTHER; note = 2'-O-methyluridine-3'-phosphate
  modified_base 18: mod_base = OTHER; note = 2'-O-methyluridine-3'-phosphate
  modified_base 19: mod_base = OTHER; note = 2'-O-methyluridine-3'-phosphate
  modified_base 20: mod_base = OTHER; note = 2'-O-methyluridine-3'-phosphate
  modified_base 21: mod_base = OTHER; note = 2'-O-methyladenosine
gtcctctctgttgccttttta

SEQ ID NO: 1989 - RNA, 23 nt, synthetic construct
  source 1..23: mol_type = other RNA
  modified_base 1: mod_base = OTHER; note = 2'-O-methyluridine-3'-phosphorothioate
  modified_base 2: mod_base = OTHER; note = 2'-fluoroadenosine-3'-phosphorothioate
  modified_base 3: mod_base = OTHER; note = 2'-O-methyladenosine-3'-phosphate
  modified_base 4: mod_base = OTHER; note = 2'-O-methyladenosine-3'-phosphate
  modified_base 5: mod_base = OTHER; note = 2'-O-methyladenosine-3'-phosphate
  modified_base 6: mod_base = OTHER; note = 2'-O-methyladenosine-3'-phosphate
  modified_base 7: mod_base = OTHER; note = 2'-fluoroguanosine-3'-phosphate
  modified_base 8: mod_base = OTHER; note = 2'-O-methylguanosine-3'-phosphate
  modified_base 9: mod_base = OTHER; note = 2'-O-methylcytidine-3'-phosphate
  modified_base 10: mod_base = OTHER; note = 2'-O-methyladenosine-3'-phosphate
  modified_base 11: mod_base = OTHER; note = 2'-O-methyladenosine-3'-phosphate
  modified_base 12: mod_base = OTHER; note = 2'-fluorocytidine-3'-phosphate
  modified_base 13: mod_base = OTHER; note = 2'-O-methyladenosine-3'-phosphate
  modified_base 14: mod_base = OTHER; note = 2'-fluoroguanosine-3'-phosphate
  modified_base 15: mod_base = OTHER; note = 2'-O-methyladenosine-3'-phosphate
  modified_base 16: mod_base = OTHER; note = 2'-fluoroguanosine-3'-phosphate
  modified_base 17: mod_base = OTHER; note = 2'-O-methyladenosine-3'-phosphate
  modified_base 18: mod_base = OTHER; note = 2'-O-methylguanosine-3'-phosphate
  modified_base 19: mod_base = OTHER; note = 2'-O-methylguanosine-3'-phosphate
  modified_base 20: mod_base = OTHER; note = 2'-O-methyladenosine-3'-phosphate
  modified_base 21: mod_base = OTHER; note = 2'-O-methylcytidine-3'-phosphorothioate
  modified_base 22: mod_base = OTHER; note = 2'-O-methyladenosine-3'-phosphorothioate
  modified_base 23: mod_base = OTHER; note = 2'-O-methylguanosine
taaaaaggcaacagagaggacag

SEQ ID NO: 1990 - RNA, 21 nt, synthetic construct
  source 1..21: mol_type = other RNA
  modified_base 1: mod_base = OTHER; note = 2'-O-methylcytidine-3'-phosphorothioate
  modified_base 2: mod_base = OTHER; note = 2'-O-methylcytidine-3'-phosphorothioate
  modified_base 3: mod_base = OTHER; note = 2'-O-methyluridine-3'-phosphate
  modified_base 4: mod_base = OTHER; note = 2'-O-methylcytidine-3'-phosphate
  modified_base 5: mod_base = OTHER; note = 2'-O-methyluridine-3'-phosphate
  modified_base 6: mod_base = OTHER; note = 2'-O-methylcytidine-3'-phosphate
  modified_base 7: mod_base = OTHER; note = 2'-fluorouridine-3'-phosphate
  modified_base 8: mod_base = OTHER; note = 2'-O-methylguanosine-3'-phosphate
  modified_base 9: mod_base = OTHER; note = 2'-fluorouridine-3'-phosphate
  modified_base 10: mod_base = OTHER; note = 2'-fluorouridine-3'-phosphate
  modified_base 11: mod_base = OTHER; note = 2'-fluoroguanosine-3'-phosphate
  modified_base 12: mod_base = OTHER; note = 2'-O-methylcytidine-3'-phosphate
  modified_base 13: mod_base = OTHER; note = 2'-O-methylcytidine-3'-phosphate
  modified_base 14: mod_base = OTHER; note = 2'-O-methyluridine-3'-phosphate
  modified_base 15: mod_base = OTHER; note = 2'-O-methyluridine-3'-phosphate
  modified_base 16: mod_base = OTHER; note = 2'-O-methyluridine-3'-phosphate
  modified_base 17: mod_base = OTHER; note = 2'-O-methyluridine-3'-phosphate
  modified_base 18: mod_base = OTHER; note = 2'-O-methyluridine-3'-phosphate
  modified_base 19: mod_base = OTHER; note = 2'-O-methyladenosine-3'-phosphate
  modified_base 20: mod_base = OTHER; note = 2'-O-methylcytidine-3'-phosphate
  modified_base 21: mod_base = OTHER; note = 2'-O-methyladenosine
cctctctgttgcctttttaca

SEQ ID NO: 1991 - RNA, 23 nt, synthetic construct
  source 1..23: mol_type = other RNA
  modified_base 1: mod_base = OTHER; note = 2'-O-methyluridine-3'-phosphorothioate
  modified_base 2: mod_base = OTHER; note = 2'-fluoroguanosine-3'-phosphorothioate
  modified_base 3: mod_base = OTHER; note = 2'-O-methyluridine-3'-phosphate
  modified_base 4: mod_base = OTHER; note = 2'-O-methyladenosine-3'-phosphate
  modified_base 5: mod_base = OTHER; note = 2'-O-methyladenosine-3'-phosphate
  modified_base 6: mod_base = OTHER; note = 2'-O-methyladenosine-3'-phosphate
  modified_base 7: mod_base = OTHER; note = 2'-fluoroadenosine-3'-phosphate
  modified_base 8: mod_base = OTHER; note = 2'-O-methyladenosine-3'-phosphate
  modified_base 9: mod_base = OTHER; note = 2'-O-methylguanosine-3'-phosphate
  modified_base 10: mod_base = OTHER; note = 2'-O-methylguanosine-3'-phosphate
  modified_base 11: mod_base = OTHER; note = 2'-O-methylcytidine-3'-phosphate
  modified_base 12: mod_base = OTHER; note = 2'-fluoroadenosine-3'-phosphate
  modified_base 13: mod_base = OTHER; note = 2'-O-methyladenosine-3'-phosphate
  modified_base 14: mod_base = OTHER; note = 2'-fluorocytidine-3'-phosphate
  modified_base 15: mod_base = OTHER; note = 2'-O-methyladenosine-3'-phosphate
  modified_base 16: mod_base = OTHER; note = 2'-fluoroguanosine-3'-phosphate
  modified_base 17: mod_base = OTHER; note = 2'-O-methyladenosine-3'-phosphate
  modified_base 18: mod_base = OTHER; note = 2'-O-methylguanosine-3'-phosphate
  modified_base 19: mod_base = OTHER; note = 2'-O-methyladenosine-3'-phosphate
  modified_base 20: mod_base = OTHER; note = 2'-O-methylguanosine-3'-phosphate
  modified_base 21: mod_base = OTHER; note = 2'-O-methylguanosine-3'-phosphorothioate
  modified_base 22: mod_base = OTHER; note = 2'-O-methyladenosine-3'-phosphorothioate
  modified_base 23: mod_base = OTHER; note = 2'-O-methylcytidine
tgtaaaaaggcaacagagaggac

SEQ ID NO: 1992 - RNA, 21 nt, synthetic construct
  source 1..21: mol_type = other RNA
  modified_base 1: mod_base = OTHER; note = 2'-O-methylguanosine-3'-phosphorothioate
  modified_base 2: mod_base = OTHER; note = 2'-O-methyluridine-3'-phosphorothioate
  modified_base 3: mod_base = OTHER; note = 2'-O-methyluridine-3'-phosphate
  modified_base 4: mod_base = OTHER; note = 2'-O-methylguanosine-3'-phosphate
  modified_base 5: mod_base = OTHER; note = 2'-O-methylcytidine-3'-phosphate
  modified_base 6: mod_base = OTHER; note = 2'-O-methylcytidine-3'-phosphate
  modified_base 7: mod_base = OTHER; note = 2'-fluorouridine-3'-phosphate
  modified_base 8: mod_base = OTHER; note = 2'-O-methyluridine-3'-phosphate
  modified_base 9: mod_base = OTHER; note = 2'-fluorouridine-3'-phosphate
  modified_base 10: mod_base = OTHER; note = 2'-fluorouridine-3'-phosphate
  modified_base 11: mod_base = OTHER; note = 2'-fluorouridine-3'-phosphate
  modified_base 12: mod_base = OTHER; note = 2'-O-methyladenosine-3'-phosphate
  modified_base 13: mod_base = OTHER; note = 2'-O-methylcytidine-3'-phosphate
  modified_base 14: mod_base = OTHER; note = 2'-O-methyladenosine-3'-phosphate
  modified_base 15: mod_base = OTHER; note = 2'-O-methylguanosine-3'-phosphate
  modified_base 16: mod_base = OTHER; note = 2'-O-methylcytidine-3'-phosphate
  modified_base 17: mod_base = OTHER; note = 2'-O-methylcytidine-3'-phosphate
  modified_base 18: mod_base = OTHER; note = 2'-O-methyladenosine-3'-phosphate
  modified_base 19: mod_base = OTHER; note = 2'-O-methyladenosine-3'-phosphate
  modified_base 20: mod_base = OTHER; note = 2'-O-methylcytidine-3'-phosphate
  modified_base 21: mod_base = OTHER; note = 2'-O-methyluridine
gttgcctttttacagccaact

SEQ ID NO: 1993 - RNA, 23 nt, synthetic construct
  source 1..23: mol_type = other RNA
  modified_base 1: mod_base = OTHER; note = 2'-O-methyladenosine-3'-phosphorothioate
  modified_base 2: mod_base = OTHER; note = 2'-fluoroguanosine-3'-phosphorothioate
  modified_base 3: mod_base = OTHER; note = 2'-O-methyluridine-3'-phosphate
  modified_base 4: mod_base = OTHER; note = 2'-O-methyluridine-3'-phosphate
  modified_base 5: mod_base = OTHER; note = 2'-O-methylguanosine-3'-phosphate
  modified_base 6: mod_base = OTHER; note = 2'-O-methylguanosine-3'-phosphate
  modified_base 7: mod_base = OTHER; note = 2'-fluorocytidine-3'-phosphate
  modified_base 8: mod_base = OTHER; note = 2'-O-methyluridine-3'-phosphate
  modified_base 9: mod_base = OTHER; note = 2'-O-methylguanosine-3'-phosphate
  modified_base 10: mod_base = OTHER; note = 2'-O-methyluridine-3'-phosphate
  modified_base 11: mod_base = OTHER; note = 2'-O-methyladenosine-3'-phosphate
  modified_base 12: mod_base = OTHER; note = 2'-fluoroadenosine-3'-phosphate
  modified_base 13: mod_base = OTHER; note = 2'-O-methyladenosine-3'-phosphate
  modified_base 14: mod_base = OTHER; note = 2'-fluoroadenosine-3'-phosphate
  modified_base 15: mod_base = OTHER; note = 2'-O-methyladenosine-3'-phosphate
  modified_base 16: mod_base = OTHER; note = 2'-fluoroguanosine-3'-phosphate
  modified_base 17: mod_base = OTHER; note = 2'-O-methylguanosine-3'-phosphate
  modified_base 18: mod_base = OTHER; note = 2'-O-methylcytidine-3'-phosphate
  modified_base 19: mod_base = OTHER; note = 2'-O-methyladenosine-3'-phosphate
  modified_base 20: mod_base = OTHER; note = 2'-O-methyladenosine-3'-phosphate
  modified_base 21: mod_base = OTHER; note = 2'-O-methylcytidine-3'-phosphorothioate
  modified_base 22: mod_base = OTHER; note = 2'-O-methyladenosine-3'-phosphorothioate
  modified_base 23: mod_base = OTHER; note = 2'-O-methylguanosine
agttggctgtaaaaaggcaacag

SEQ ID NO: 1994 - RNA, 21 nt, synthetic construct
  source 1..21: mol_type = other RNA
  modified_base 1: mod_base = OTHER; note = 2'-O-methyluridine-3'-phosphorothioate
  modified_base 2: mod_base = OTHER; note = 2'-O-methylguanosine-3'-phosphorothioate
  modified_base 3: mod_base = OTHER; note = 2'-O-methylcytidine-3'-phosphate
  modified_base 4: mod_base = OTHER; note = 2'-O-methylcytidine-3'-phosphate
  modified_base 5: mod_base = OTHER; note = 2'-O-methyluridine-3'-phosphate
  modified_base 6: mod_base = OTHER; note = 2'-O-methyluridine-3'-phosphate
  modified_base 7: mod_base = OTHER; note = 2'-fluorouridine-3'-phosphate
  modified_base 8: mod_base = OTHER; note = 2'-O-methyluridine-3'-phosphate
  modified_base 9: mod_base = OTHER; note = 2'-fluorouridine-3'-phosphate
  modified_base 10: mod_base = OTHER; note = 2'-fluoroadenosine-3'-phosphate
  modified_base 11: mod_base = OTHER; note = 2'-fluorocytidine-3'-phosphate
  modified_base 12: mod_base = OTHER; note = 2'-O-methyladenosine-3'-phosphate
  modified_base 13: mod_base = OTHER; note = 2'-O-methylguanosine-3'-phosphate
  modified_base 14: mod_base = OTHER; note = 2'-O-methylcytidine-3'-phosphate
  modified_base 15: mod_base = OTHER; note = 2'-O-methylcytidine-3'-phosphate
  modified_base 16: mod_base = OTHER; note = 2'-O-methyladenosine-3'-phosphate
  modified_base 17: mod_base = OTHER; note = 2'-O-methyladenosine-3'-phosphate
  modified_base 18: mod_base = OTHER; note = 2'-O-methylcytidine-3'-phosphate
  modified_base 19: mod_base = OTHER; note = 2'-O-methyluridine-3'-phosphate
  modified_base 20: mod_base = OTHER; note = 2'-O-methyluridine-3'-phosphate
  modified_base 21: mod_base = OTHER; note = 2'-O-methyluridine
tgcctttttacagccaacttt

SEQ ID NO: 1995 - RNA, 23 nt, synthetic construct
  source 1..23: mol_type = other RNA
  modified_base 1: mod_base = OTHER; note = 2'-O-methyladenosine-3'-phosphorothioate
  modified_base 2: mod_base = OTHER; note = 2'-fluoroadenosine-3'-phosphorothioate
  modified_base 3: mod_base = OTHER; note = 2'-O-methyladenosine-3'-phosphate
  modified_base 4: mod_base = OTHER; note = 2'-O-methylguanosine-3'-phosphate
  modified_base 5: mod_base = OTHER; note = 2'-O-methyluridine-3'-phosphate
  modified_base 6: mod_base = OTHER; note = 2'-O-methyluridine-3'-phosphate
  modified_base 7: mod_base = OTHER; note = 2'-fluoroguanosine-3'-phosphate
  modified_base 8: mod_base = OTHER; note = 2'-O-methylguanosine-3'-phosphate
  modified_base 9: mod_base = OTHER; note = 2'-O-methylcytidine-3'-phosphate
  modified_base 10: mod_base = OTHER; note = 2'-O-methyluridine-3'-phosphate
  modified_base 11: mod_base = OTHER; note = 2'-O-methylguanosine-3'-phosphate
  modified_base 12: mod_base = OTHER; note = 2'-fluorouridine-3'-phosphate
  modified_base 13: mod_base = OTHER; note = 2'-O-methyladenosine-3'-phosphate
  modified_base 14: mod_base = OTHER; note = 2'-fluoroadenosine-3'-phosphate
  modified_base 15: mod_base = OTHER; note = 2'-O-methyladenosine-3'-phosphate
  modified_base 16: mod_base = OTHER; note = 2'-fluoroadenosine-3'-phosphate
  modified_base 17: mod_base = OTHER; note = 2'-O-methyladenosine-3'-phosphate
  modified_base 18: mod_base = OTHER; note = 2'-O-methylguanosine-3'-phosphate
  modified_base 19: mod_base = OTHER; note = 2'-O-methylguanosine-3'-phosphate
  modified_base 20: mod_base = OTHER; note = 2'-O-methylcytidine-3'-phosphate
  modified_base 21: mod_base = OTHER; note = 2'-O-methyladenosine-3'-phosphorothioate
  modified_base 22: mod_base = OTHER; note = 2'-O-methyladenosine-3'-phosphorothioate
  modified_base 23: mod_base = OTHER; note = 2'-O-methylcytidine
aaagttggctgtaaaaaggcaac

SEQ ID NO: 1996 - RNA, 21 nt, synthetic construct
  source 1..21: mol_type = other RNA
  modified_base 1: mod_base = OTHER; note = 2'-O-methylcytidine-3'-phosphorothioate
  modified_base 2: mod_base = OTHER; note = 2'-O-methylcytidine-3'-phosphorothioate
  modified_base 3: mod_base = OTHER; note = 2'-O-methyluridine-3'-phosphate
  modified_base 4: mod_base = OTHER; note = 2'-O-methyluridine-3'-phosphate
  modified_base 5: mod_base = OTHER; note = 2'-O-methyluridine-3'-phosphate
  modified_base 6: mod_base = OTHER; note = 2'-O-methyluridine-3'-phosphate
  modified_base 7: mod_base = OTHER; note = 2'-fluorouridine-3'-phosphate
  modified_base 8: mod_base = OTHER; note = 2'-O-methyladenosine-3'-phosphate
  modified_base 9: mod_base = OTHER; note = 2'-fluorocytidine-3'-phosphate
  modified_base 10: mod_base = OTHER; note = 2'-fluoroadenosine-3'-phosphate
  modified_base 11: mod_base = OTHER; note = 2'-fluoroguanosine-3'-phosphate
  modified_base 12: mod_base = OTHER; note = 2'-O-methylcytidine-3'-phosphate
  modified_base 13: mod_base = OTHER; note = 2'-O-methylcytidine-3'-phosphate
  modified_base 14: mod_base = OTHER; note = 2'-O-methyladenosine-3'-phosphate
  modified_base 15: mod_base = OTHER; note = 2'-O-methyladenosine-3'-phosphate
  modified_base 16: mod_base = OTHER; note = 2'-O-methylcytidine-3'-phosphate
  modified_base 17: mod_base = OTHER; note = 2'-O-methyluridine-3'-phosphate
  modified_base 18: mod_base = OTHER; note = 2'-O-methyluridine-3'-phosphate
  modified_base 19: mod_base = OTHER; note = 2'-O-methyluridine-3'-phosphate
  modified_base 20: mod_base = OTHER; note = 2'-O-methyluridine-3'-phosphate
  modified_base 21: mod_base = OTHER; note = 2'-O-methylcytidine
cctttttacagccaacttttc

SEQ ID NO: 1997 - RNA, 23 nt, synthetic construct
  source 1..23: mol_type = other RNA
  modified_base 1: mod_base = OTHER; note = 2'-O-methylguanosine-3'-phosphorothioate
  modified_base 2: mod_base = OTHER; note = 2'-fluoroadenosine-3'-phosphorothioate
  modified_base 3: mod_base = OTHER; note = 2'-O-methyladenosine-3'-phosphate
  modified_base 4: mod_base = OTHER; note = 2'-O-methyladenosine-3'-phosphate
  modified_base 5: mod_base = OTHER; note = 2'-O-methyladenosine-3'-phosphate
  modified_base 6: mod_base = OTHER; note = 2'-O-methylguanosine-3'-phosphate
  modified_base 7: mod_base = OTHER; note = 2'-fluorouridine-3'-phosphate
  modified_base 8: mod_base = OTHER; note = 2'-O-methyluridine-3'-phosphate
  modified_base 9: mod_base = OTHER; note = 2'-O-methylguanosine-3'-phosphate
  modified_base 10: mod_base = OTHER; note = 2'-O-methylguanosine-3'-phosphate
  modified_base 11: mod_base = OTHER; note = 2'-O-methylcytidine-3'-phosphate
  modified_base 12: mod_base = OTHER; note = 2'-fluorouridine-3'-phosphate
  modified_base 13: mod_base = OTHER; note = 2'-O-methylguanosine-3'-phosphate
  modified_base 14: mod_base = OTHER; note = 2'-fluorouridine-3'-phosphate
  modified_base 15: mod_base = OTHER; note = 2'-O-methyladenosine-3'-phosphate
  modified_base 16: mod_base = OTHER; note = 2'-fluoroadenosine-3'-phosphate
  modified_base 17: mod_base = OTHER; note = 2'-O-methyladenosine-3'-phosphate
  modified_base 18: mod_base = OTHER; note = 2'-O-methyladenosine-3'-phosphate
  modified_base 19: mod_base = OTHER; note = 2'-O-methyladenosine-3'-phosphate
  modified_base 20: mod_base = OTHER; note = 2'-O-methylguanosine-3'-phosphate
  modified_base 21: mod_base = OTHER; note = 2'-O-methylguanosine-3'-phosphorothioate
  modified_base 22: mod_base = OTHER; note = 2'-O-methylcytidine-3'-phosphorothioate
  modified_base 23: mod_base = OTHER; note = 2'-O-methyladenosine
gaaaagttggctgtaaaaaggca

SEQ ID NO: 1998 - RNA, 21 nt, synthetic construct
  source 1..21: mol_type = other RNA
  modified_base 1: mod_base = OTHER; note = 2'-O-methyluridine-3'-phosphorothioate
  modified_base 2: mod_base = OTHER; note = 2'-O-methyluridine-3'-phosphorothioate
  modified_base 3: mod_base = OTHER; note = 2'-O-methyluridine-3'-phosphate
  modified_base 4: mod_base = OTHER; note = 2'-O-methyluridine-3'-phosphate
  modified_base 5: mod_base = OTHER; note = 2'-O-methyladenosine-3'-phosphate
  modified_base 6: mod_base = OTHER; note = 2'-O-methylcytidine-3'-phosphate
  modified_base 7: mod_base = OTHER; note = 2'-fluoroadenosine-3'-phosphate
  modified_base 8: mod_base = OTHER; note = 2'-O-methylguanosine-3'-phosphate
  modified_base 9: mod_base = OTHER; note = 2'-fluorocytidine-3'-phosphate
  modified_base 10: mod_base = OTHER; note = 2'-fluorocytidine-3'-phosphate
  modified_base 11: mod_base = OTHER; note = 2'-fluoroadenosine-3'-phosphate
  modified_base 12: mod_base = OTHER; note = 2'-O-methyladenosine-3'-phosphate
  modified_base 13: mod_base = OTHER; note = 2'-O-methylcytidine-3'-phosphate
  modified_base 14: mod_base = OTHER; note = 2'-O-methyluridine-3'-phosphate
  modified_base 15: mod_base = OTHER; note = 2'-O-methyluridine-3'-phosphate
  modified_base 16: mod_base = OTHER; note = 2'-O-methyluridine-3'-phosphate
  modified_base 17: mod_base = OTHER; note = 2'-O-methyluridine-3'-phosphate
  modified_base 18: mod_base = OTHER; note = 2'-O-methylcytidine-3'-phosphate
  modified_base 19: mod_base = OTHER; note = 2'-O-methyluridine-3'-phosphate
  modified_base 20: mod_base = OTHER; note = 2'-O-methyladenosine-3'-phosphate
  modified_base 21: mod_base = OTHER; note = 2'-O-methylguanosine
ttttacagccaacttttctag

SEQ ID NO: 1999 - RNA, 23 nt, synthetic construct
  source 1..23: mol_type = other RNA
  modified_base 1: mod_base = OTHER; note = 2'-O-methylcytidine-3'-phosphorothioate
  modified_base 2: mod_base = OTHER; note = 2'-fluorouridine-3'-phosphorothioate
  modified_base 3: mod_base = OTHER; note = 2'-O-methyladenosine-3'-phosphate
  modified_base 4: mod_base = OTHER; note = 2'-O-methylguanosine-3'-phosphate
  modified_base 5: mod_base = OTHER; note = 2'-O-methyladenosine-3'-phosphate
  modified_base 6: mod_base = OTHER; note = 2'-O-methyladenosine-3'-phosphate
  modified_base 7: mod_base = OTHER; note = 2'-fluoroadenosine-3'-phosphate
  modified_base 8: mod_base = OTHER; note = 2'-O-methyladenosine-3'-phosphate
  modified_base 9: mod_base = OTHER; note = 2'-O-methylguanosine-3'-phosphate
  modified_base 10: mod_base = OTHER; note = 2'-O-methyluridine-3'-phosphate
  modified_base 11: mod_base = OTHER; note = 2'-O-methyluridine-3'-phosphate
  modified_base 12: mod_base = OTHER; note = 2'-fluoroguanosine-3'-phosphate
  modified_base 13: mod_base = OTHER; note = 2'-O-methylguanosine-3'-phosphate
  modified_base 14: mod_base = OTHER; note = 2'-fluorocytidine-3'-phosphate
  modified_base 15: mod_base = OTHER; note = 2'-O-methyluridine-3'-phosphate
  modified_base 16: mod_base = OTHER; note = 2'-fluoroguanosine-3'-phosphate
  modified_base 17: mod_base = OTHER; note = 2'-O-methyluridine-3'-phosphate
  modified_base 18: mod_base = OTHER; note = 2'-O-methyladenosine-3'-phosphate
  modified_base 19: mod_base = OTHER; note = 2'-O-methyladenosine-3'-phosphate
  modified_base 20: mod_base = OTHER; note = 2'-O-methyladenosine-3'-phosphate
  modified_base 21: mod_base = OTHER; note = 2'-O-methyladenosine-3'-phosphorothioate
  modified_base 22: mod_base = OTHER; note = 2'-O-methyladenosine-3'-phosphorothioate
  modified_base 23: mod_base = OTHER; note = 2'-O-methylguanosine
ctagaaaagttggctgtaaaaag

SEQ ID NO: 2000 - RNA, 21 nt, synthetic construct
  source 1..21: mol_type = other RNA
  modified_base 1: mod_base = OTHER; note = 2'-O-methylguanosine-3'-phosphorothioate
  modified_base 2: mod_base = OTHER; note = 2'-O-methylcytidine-3'-phosphorothioate
  modified_base 3: mod_base = OTHER; note = 2'-O-methylcytidine-3'-phosphate
  modified_base 4: mod_base = OTHER; note = 2'-O-methyladenosine-3'-phosphate
  modified_base 5: mod_base = OTHER; note = 2'-O-methyladenosine-3'-phosphate
  modified_base 6: mod_base = OTHER; note = 2'-O-methylcytidine-3'-phosphate
  modified_base 7: mod_base = OTHER; note = 2'-fluorouridine-3'-phosphate
  modified_base 8: mod_base = OTHER; note = 2'-O-methyluridine-3'-phosphate
  modified_base 9: mod_base = OTHER; note = 2'-fluorouridine-3'-phosphate
  modified_base 10: mod_base = OTHER; note = 2'-fluorouridine-3'-phosphate
  modified_base 11: mod_base = OTHER; note = 2'-fluorocytidine-3'-phosphate
  modified_base 12: mod_base = OTHER; note = 2'-O-methyluridine-3'-phosphate
  modified_base 13: mod_base = OTHER; note = 2'-O-methyladenosine-3'-phosphate
  modified_base 14: mod_base = OTHER; note = 2'-O-methylguanosine-3'-phosphate
  modified_base 15: mod_base = OTHER; note = 2'-O-methyladenosine-3'-phosphate
  modified_base 16: mod_base = OTHER; note = 2'-O-methylcytidine-3'-phosphate
  modified_base 17: mod_base = OTHER; note = 2'-O-methylcytidine-3'-phosphate
  modified_base 18: mod_base = OTHER; note = 2'-O-methyluridine-3'-phosphate
  modified_base 19: mod_base = OTHER; note = 2'-O-methylguanosine-3'-phosphate
  modified_base 20: mod_base = OTHER; note = 2'-O-methyluridine-3'-phosphate
  modified_base 21: mod_base = OTHER; note = 2'-O-methyluridine
gccaacttttctagacctgtt

SEQ ID NO: 2001 - RNA, 23 nt, synthetic construct
  source 1..23: mol_type = other RNA
  modified_base 1: mod_base = OTHER; note = 2'-O-methyladenosine-3'-phosphorothioate
  modified_base 2: mod_base = OTHER; note = 2'-fluoroadenosine-3'-phosphorothioate
  modified_base 3: mod_base = OTHER; note = 2'-O-methylcytidine-3'-phosphate
  modified_base 4: mod_base = OTHER; note = 2'-O-methyladenosine-3'-phosphate
  modified_base 5: mod_base = OTHER; note = 2'-O-methylguanosine-3'-phosphate
  modified_base 6: mod_base = OTHER; note = 2'-O-methylguanosine-3'-phosphate
  modified_base 7: mod_base = OTHER; note = 2'-fluorouridine-3'-phosphate
  modified_base 8: mod_base = OTHER; note = 2'-O-methylcytidine-3'-phosphate
  modified_base 9: mod_base = OTHER; note = 2'-O-methyluridine-3'-phosphate
  modified_base 10: mod_base = OTHER; note = 2'-O-methyladenosine-3'-phosphate
  modified_base 11: mod_base = OTHER; note = 2'-O-methylguanosine-3'-phosphate
  modified_base 12: mod_base = OTHER; note = 2'-fluoroadenosine-3'-phosphate
  modified_base 13: mod_base = OTHER; note = 2'-O-methyladenosine-3'-phosphate
  modified_base 14: mod_base = OTHER; note = 2'-fluoroadenosine-3'-phosphate
  modified_base 15: mod_base = OTHER; note = 2'-O-methyladenosine-3'-phosphate
  modified_base 16: mod_base = OTHER; note = 2'-fluoroguanosine-3'-phosphate
  modified_base 17: mod_base = OTHER; note = 2'-O-methyluridine-3'-phosphate
  modified_base 18: mod_base = OTHER; note = 2'-O-methyluridine-3'-phosphate
  modified_base 19: mod_base = OTHER; note = 2'-O-methylguanosine-3'-phosphate
  modified_base 20: mod_base = OTHER; note = 2'-O-methylguanosine-3'-phosphate
  modified_base 21: mod_base = OTHER; note = 2'-O-methylcytidine-3'-phosphorothioate
  modified_base 22: mod_base = OTHER; note = 2'-O-methyluridine-3'-phosphorothioate
  modified_base 23: mod_base = OTHER; note = 2'-O-methylguanosine
aacaggtctagaaaagttggctg

SEQ ID NO: 2002 - RNA, 21 nt, synthetic construct
  source 1..21: mol_type = other RNA
  modified_base 1: mod_base = OTHER; note = 2'-O-methylcytidine-3'-phosphorothioate
  modified_base 2: mod_base = OTHER; note = 2'-O-methylcytidine-3'-phosphorothioate
  modified_base 3: mod_base = OTHER; note = 2'-O-methyladenosine-3'-phosphate
  modified_base 4: mod_base = OTHER; note = 2'-O-methyladenosine-3'-phosphate
  modified_base 5: mod_base = OTHER; note = 2'-O-methylcytidine-3'-phosphate
  modified_base 6: mod_base = OTHER; note = 2'-O-methyluridine-3'-phosphate
  modified_base 7: mod_base = OTHER; note = 2'-fluorouridine-3'-phosphate
  modified_base 8: mod_base = OTHER; note = 2'-O-methyluridine-3'-phosphate
  modified_base 9: mod_base = OTHER; note = 2'-fluorouridine-3'-phosphate
  modified_base 10: mod_base = OTHER; note = 2'-fluorocytidine-3'-phosphate
  modified_base 11: mod_base = OTHER; note = 2'-fluorouridine-3'-phosphate
  modified_base 12: mod_base = OTHER; note = 2'-O-methyladenosine-3'-phosphate
  modified_base 13: mod_base = OTHER; note = 2'-O-methylguanosine-3'-phosphate
  modified_base 14: mod_base = OTHER; note = 2'-O-methyladenosine-3'-phosphate
  modified_base 15: mod_base = OTHER; note = 2'-O-methylcytidine-3'-phosphate
  modified_base 16: mod_base = OTHER; note = 2'-O-methylcytidine-3'-phosphate
  modified_base 17: mod_base = OTHER; note = 2'-O-methyluridine-3'-phosphate
  modified_base 18: mod_base = OTHER; note = 2'-O-methylguanosine-3'-phosphate
  modified_base 19: mod_base = OTHER; note = 2'-O-methyluridine-3'-phosphate
  modified_base 20: mod_base = OTHER; note = 2'-O-methyluridine-3'-phosphate
  modified_base 21: mod_base = OTHER; note = 2'-O-methyluridine
ccaacttttctagacctgttt

SEQ ID NO: 2003 - RNA, 23 nt, synthetic construct
  source 1..23: mol_type = other RNA
  modified_base 1: mod_base = OTHER; note = 2'-O-methyladenosine-3'-phosphorothioate
  modified_base 2: mod_base = OTHER; note = 2'-fluoroadenosine-3'-phosphorothioate
  modified_base 3: mod_base = OTHER; note = 2'-O-methyladenosine-3'-phosphate
  modified_base 4: mod_base = OTHER; note = 2'-O-methylcytidine-3'-phosphate
  modified_base 5: mod_base = OTHER; note = 2'-O-methyladenosine-3'-phosphate
  modified_base 6: mod_base = OTHER; note = 2'-O-methylguanosine-3'-phosphate
  modified_base 7: mod_base = OTHER; note = 2'-fluoroguanosine-3'-phosphate
  modified_base 8: mod_base = OTHER; note = 2'-O-methyluridine-3'-phosphate
  modified_base 9: mod_base = OTHER; note = 2'-O-methylcytidine-3'-phosphate
  modified_base 10: mod_base = OTHER; note = 2'-O-methyluridine-3'-phosphate
  modified_base 11: mod_base = OTHER; note = 2'-O-methyladenosine-3'-phosphate
  modified_base 12: mod_base = OTHER; note = 2'-fluoroguanosine-3'-phosphate
  modified_base 13: mod_base = OTHER; note = 2'-O-methyladenosine-3'-phosphate
  modified_base 14: mod_base = OTHER; note = 2'-fluoroadenosine-3'-phosphate
  modified_base 15: mod_base = OTHER; note = 2'-O-methyladenosine-3'-phosphate
  modified_base 16: mod_base = OTHER; note = 2'-fluoroadenosine-3'-phosphate
  modified_base 17: mod_base = OTHER; note = 2'-O-methylguanosine-3'-phosphate
  modified_base 18: mod_base = OTHER; note = 2'-O-methyluridine-3'-phosphate
  modified_base 19: mod_base = OTHER; note = 2'-O-methyluridine-3'-phosphate
  modified_base 20: mod_base = OTHER; note = 2'-O-methylguanosine-3'-phosphate
  modified_base 21: mod_base = OTHER; note = 2'-O-methylguanosine-3'-phosphorothioate
  modified_base 22: mod_base = OTHER; note = 2'-O-methylcytidine-3'-phosphorothioate
  modified_base 23: mod_base = OTHER; note = 2'-O-methyluridine
aaacaggtctagaaaagttggct

SEQ ID NO: 2004 - RNA, 21 nt, synthetic construct
  source 1..21: mol_type = other RNA
  modified_base 1: mod_base = OTHER; note = 2'-O-methylcytidine-3'-phosphorothioate
  modified_base 2: mod_base = OTHER; note = 2'-O-methyladenosine-3'-phosphorothioate
  modified_base 3: mod_base = OTHER; note = 2'-O-methyladenosine-3'-phosphate
  modified_base 4: mod_base = OTHER; note = 2'-O-methylcytidine-3'-phosphate
  modified_base 5: mod_base = OTHER; note = 2'-O-methyluridine-3'-phosphate
  modified_base 6: mod_base = OTHER; note = 2'-O-methyluridine-3'-phosphate
  modified_base 7: mod_base = OTHER; note = 2'-fluorouridine-3'-phosphate
  modified_base 8: mod_base = OTHER; note = 2'-O-methyluridine-3'-phosphate
  modified_base 9: mod_base = OTHER; note = 2'-fluorocytidine-3'-phosphate
  modified_base 10: mod_base = OTHER; note = 2'-fluorouridine-3'-phosphate
  modified_base 11: mod_base = OTHER; note = 2'-fluoroadenosine-3'-phosphate
  modified_base 12: mod_base = OTHER; note = 2'-O-methylguanosine-3'-phosphate
  modified_base 13: mod_base = OTHER; note = 2'-O-methyladenosine-3'-phosphate
  modified_base 14: mod_base = OTHER; note = 2'-O-methylcytidine-3'-phosphate
  modified_base 15: mod_base = OTHER; note = 2'-O-methylcytidine-3'-phosphate
  modified_base 16: mod_base = OTHER; note = 2'-O-methyluridine-3'-phosphate
  modified_base 17: mod_base = OTHER; note = 2'-O-methylguanosine-3'-phosphate
  modified_base 18: mod_base = OTHER; note = 2'-O-methyluridine-3'-phosphate
  modified_base 19: mod_base = OTHER; note = 2'-O-methyluridine-3'-phosphate
  modified_base 20: mod_base = OTHER; note = 2'-O-methyluridine-3'-phosphate
  modified_base 21: mod_base = OTHER; note = 2'-O-methyluridine
caacttttctagacctgtttt

SEQ ID NO: 2005 - RNA, 23 nt, synthetic construct
  source 1..23: mol_type = other RNA
  modified_base 1: mod_base = OTHER; note = 2'-O-methyladenosine-3'-phosphorothioate
  modified_base 2: mod_base = OTHER; note = 2'-fluoroadenosine-3'-phosphorothioate
  modified_base 3: mod_base = OTHER; note = 2'-O-methyladenosine-3'-phosphate
  modified_base 4: mod_base = OTHER; note = 2'-O-methyladenosine-3'-phosphate
  modified_base 5: mod_base = OTHER; note = 2'-O-methylcytidine-3'-phosphate
  modified_base 6: mod_base = OTHER; note = 2'-O-methyladenosine-3'-phosphate
  modified_base 7: mod_base = OTHER; note = 2'-fluoroguanosine-3'-phosphate
  modified_base 8: mod_base = OTHER; note = 2'-O-methylguanosine-3'-phosphate
  modified_base 9: mod_base = OTHER; note = 2'-O-methyluridine-3'-phosphate
  modified_base 10: mod_base = OTHER; note = 2'-O-methylcytidine-3'-phosphate
  modified_base 11: mod_base = OTHER; note = 2'-O-methyluridine-3'-phosphate
  modified_base 12: mod_base = OTHER; note = 2'-fluoroadenosine-3'-phosphate
  modified_base 13: mod_base = OTHER; note = 2'-O-methylguanosine-3'-phosphate
  modified_base 14: mod_base = OTHER; note = 2'-fluoroadenosine-3'-phosphate
  modified_base 15: mod_base = OTHER; note = 2'-O-methyladenosine-3'-phosphate
  modified_base 16: mod_base = OTHER; note = 2'-fluoroadenosine-3'-phosphate
  modified_base 17: mod_base = OTHER; note = 2'-O-methyladenosine-3'-phosphate
  modified_base 18: mod_base = OTHER; note = 2'-O-methylguanosine-3'-phosphate
  modified_base 19: mod_base = OTHER; note = 2'-O-methyluridine-3'-phosphate
  modified_base 20: mod_base = OTHER; note = 2'-O-methyluridine-3'-phosphate
  modified_base 21: mod_base = OTHER; note = 2'-O-methylguanosine-3'-phosphorothioate
  modified_base 22: mod_base = OTHER; note = 2'-O-methylguanosine-3'-phosphorothioate
  modified_base 23: mod_base = OTHER; note = 2'-O-methylcytidine
aaaacaggtctagaaaagttggc

SEQ ID NO: 2006 - RNA, 21 nt, synthetic construct
  source 1..21: mol_type = other RNA
  modified_base 1: mod_base = OTHER; note = 2'-O-methyladenosine-3'-phosphorothioate
  modified_base 2: mod_base = OTHER; note = 2'-O-methylcytidine-3'-phosphorothioate
  modified_base 3: mod_base = OTHER; note = 2'-O-methyluridine-3'-phosphate
  modified_base 4: mod_base = OTHER; note = 2'-O-methyluridine-3'-phosphate
  modified_base 5: mod_base = OTHER; note = 2'-O-methyluridine-3'-phosphate
  modified_base 6: mod_base = OTHER; note = 2'-O-methyluridine-3'-phosphate
  modified_base 7: mod_base = OTHER; note = 2'-fluorocytidine-3'-phosphate
  modified_base 8: mod_base = OTHER; note = 2'-O-methyluridine-3'-phosphate
  modified_base 9: mod_base = OTHER; note = 2'-fluoroadenosine-3'-phosphate
  modified_base 10: mod_base = OTHER; note = 2'-fluoroguanosine-3'-phosphate
  modified_base 11: mod_base = OTHER; note = 2'-fluoroadenosine-3'-phosphate
  modified_base 12: mod_base = OTHER; note = 2'-O-methylcytidine-3'-phosphate
  modified_base 13: mod_base = OTHER; note = 2'-O-methylcytidine-3'-phosphate
  modified_base 14: mod_base = OTHER; note = 2'-O-methyluridine-3'-phosphate
  modified_base 15: mod_base = OTHER; note = 2'-O-methylguanosine-3'-phosphate
  modified_base 16: mod_base = OTHER; note = 2'-O-methyluridine-3'-phosphate
  modified_base 17: mod_base = OTHER; note = 2'-O-methyluridine-3'-phosphate
  modified_base 18: mod_base = OTHER; note = 2'-O-methyluridine-3'-phosphate
  modified_base 19: mod_base = OTHER; note = 2'-O-methyluridine-3'-phosphate
  modified_base 20: mod_base = OTHER; note = 2'-O-methylguanosine-3'-phosphate
  modified_base 21: mod_base = OTHER; note = 2'-O-methylcytidine
acttttctagacctgttttgc

SEQ ID NO: 2007 - RNA, 23 nt, synthetic construct
  source 1..23: mol_type = other RNA
  modified_base 1: mod_base = OTHER; note = 2'-O-methylguanosine-3'-phosphorothioate
  modified_base 2: mod_base = OTHER; note = 2'-fluorocytidine-3'-phosphorothioate
  modified_base 3: mod_base = OTHER; note = 2'-O-methyladenosine-3'-phosphate
  modified_base 4: mod_base = OTHER; note = 2'-O-methyladenosine-3'-phosphate
  modified_base 5: mod_base = OTHER; note = 2'-O-methyladenosine-3'-phosphate
  modified_base 6: mod_base = OTHER; note = 2'-O-methyladenosine-3'-phosphate
  modified_base 7: mod_base = OTHER; note = 2'-fluorocytidine-3'-phosphate
  modified_base 8: mod_base = OTHER; note = 2'-O-methyladenosine-3'-phosphate
  modified_base 9: mod_base = OTHER; note = 2'-O-methylguanosine-3'-phosphate
  modified_base 10: mod_base = OTHER; note = 2'-O-methylguanosine-3'-phosphate
  modified_base 11: mod_base = OTHER; note = 2'-O-methyluridine-3'-phosphate
  modified_base 12: mod_base = OTHER; note = 2'-fluorocytidine-3'-phosphate
  modified_base 13: mod_base = OTHER; note = 2'-O-methyluridine-3'-phosphate
  modified_base 14: mod_base = OTHER; note = 2'-fluoroadenosine-3'-phosphate
  modified_base 15: mod_base = OTHER; note = 2'-O-methylguanosine-3'-phosphate
  modified_base 16: mod_base = OTHER; note = 2'-fluoroadenosine-3'-phosphate
  modified_base 17: mod_base = OTHER; note = 2'-O-methyladenosine-3'-phosphate
  modified_base 18: mod_base = OTHER; note = 2'-O-methyladenosine-3'-phosphate
  modified_base 19: mod_base = OTHER; note = 2'-O-methyladenosine-3'-phosphate
  modified_base 20: mod_base = OTHER; note = 2'-O-methylguanosine-3'-phosphate
  modified_base 21: mod_base = OTHER; note = 2'-O-methyluridine-3'-phosphorothioate
  modified_base 22: mod_base = OTHER; note = 2'-O-methyluridine-3'-phosphorothioate
  modified_base 23: mod_base = OTHER; note = 2'-O-methylguanosine
gcaaaacaggtctagaaaagttg

SEQ ID NO: 2008 - RNA, 21 nt, synthetic construct
  source 1..21: mol_type = other RNA
  modified_base 1: mod_base = OTHER; note = 2'-O-methyluridine-3'-phosphorothioate
  modified_base 2: mod_base = OTHER; note = 2'-O-methyluridine-3'-phosphorothioate
  modified_base 3: mod_base = OTHER; note = 2'-O-methyluridine-3'-phosphate
  modified_base 4: mod_base = OTHER; note = 2'-O-methyluridine-3'-phosphate
  modified_base 5: mod_base = OTHER; note = 2'-O-methylcytidine-3'-phosphate
  modified_base 6: mod_base = OTHER; note = 2'-O-methyluridine-3'-phosphate
  modified_base 7: mod_base = OTHER; note = 2'-fluoroadenosine-3'-phosphate
  modified_base 8: mod_base = OTHER; note = 2'-O-methylguanosine-3'-phosphate
  modified_base 9: mod_base = OTHER; note = 2'-fluoroadenosine-3'-phosphate
  modified_base 10: mod_base = OTHER; note = 2'-fluorocytidine-3'-phosphate
  modified_base 11: mod_base = OTHER; note = 2'-fluorocytidine-3'-phosphate
  modified_base 12: mod_base = OTHER; note = 2'-O-methyluridine-3'-phosphate
  modified_base 13: mod_base = OTHER; note = 2'-O-methylguanosine-3'-phosphate
  modified_base 14: mod_base = OTHER; note = 2'-O-methyluridine-3'-phosphate
  modified_base 15: mod_base = OTHER; note = 2'-O-methyluridine-3'-phosphate
  modified_base 16: mod_base = OTHER; note = 2'-O-methyluridine-3'-phosphate
  modified_base 17: mod_base = OTHER; note = 2'-O-methyluridine-3'-phosphate
  modified_base 18: mod_base = OTHER; note = 2'-O-methylguanosine-3'-phosphate
  modified_base 19: mod_base = OTHER; note = 2'-O-methylcytidine-3'-phosphate
  modified_base 20: mod_base = OTHER; note = 2'-O-methyluridine-3'-phosphate
  modified_base 21: mod_base = OTHER; note = 2'-O-methyluridine
ttttctagacctgttttgctt

SEQ ID NO: 2009 - RNA, 23 nt, synthetic construct
  source 1..23: mol_type = other RNA
  modified_base 1: mod_base = OTHER; note = 2'-O-methyladenosine-3'-phosphorothioate
  modified_base 2: mod_base = OTHER; note = 2'-fluoroadenosine-3'-phosphorothioate
  modified_base 3: mod_base = OTHER; note = 2'-O-methylguanosine-3'-phosphate
  modified_base 4: mod_base = OTHER; note = 2'-O-methylcytidine-3'-phosphate
  modified_base 5: mod_base = OTHER; note = 2'-O-methyladenosine-3'-phosphate
  modified_base 6: mod_base = OTHER; note = 2'-O-methyladenosine-3'-phosphate
  modified_base 7: mod_base = OTHER; note = 2'-fluoroadenosine-3'-phosphate
  modified_base 8: mod_base = OTHER; note = 2'-O-methyladenosine-3'-phosphate
  modified_base 9: mod_base = OTHER; note = 2'-O-methylcytidine-3'-phosphate
  modified_base 10: mod_base = OTHER; note = 2'-O-methyladenosine-3'-phosphate
  modified_base 11: mod_base = OTHER; note = 2'-O-methylguanosine-3'-phosphate
  modified_base 12: mod_base = OTHER; note = 2'-fluoroguanosine-3'-phosphate
  modified_base 13: mod_base = OTHER; note = 2'-O-methyluridine-3'-phosphate
  modified_base 14: mod_base = OTHER; note = 2'-fluorocytidine-3'-phosphate
  modified_base 15: mod_base = OTHER; note = 2'-O-methyluridine-3'-phosphate
  modified_base 16: mod_base = OTHER; note = 2'-fluoroadenosine-3'-phosphate
  modified_base 17: mod_base = OTHER; note = 2'-O-methylguanosine-3'-phosphate
  modified_base 18: mod_base = OTHER; note = 2'-O-methyladenosine-3'-phosphate
  modified_base 19: mod_base = OTHER; note = 2'-O-methyladenosine-3'-phosphate
  modified_base 20: mod_base = OTHER; note = 2'-O-methyladenosine-3'-phosphate
  modified_base 21: mod_base = OTHER; note = 2'-O-methyladenosine-3'-phosphorothioate
  modified_base 22: mod_base = OTHER; note = 2'-O-methylguanosine-3'-phosphorothioate
  modified_base 23: mod_base = OTHER; note = 2'-O-methyluridine
aagcaaaacaggtctagaaaagt

SEQ ID NO: 2010 - RNA, 21 nt, synthetic construct
  source 1..21: mol_type = other RNA
  modified_base 1: mod_base = OTHER; note = 2'-O-methyluridine-3'-phosphorothioate
  modified_base 2: mod_base = OTHER; note = 2'-O-methyluridine-3'-phosphorothioate
  modified_base 3: mod_base = OTHER; note = 2'-O-methyluridine-3'-phosphate
  modified_base 4: mod_base = OTHER; note = 2'-O-methylcytidine-3'-phosphate
  modified_base 5: mod_base = OTHER; note = 2'-O-methyluridine-3'-phosphate
  modified_base 6: mod_base = OTHER; note = 2'-O-methyladenosine-3'-phosphate
  modified_base 7: mod_base = OTHER; note = 2'-fluoroguanosine-3'-phosphate
  modified_base 8: mod_base = OTHER; note = 2'-O-methyladenosine-3'-phosphate
  modified_base 9: mod_base = OTHER; note = 2'-fluorocytidine-3'-phosphate
  modified_base 10: mod_base = OTHER; note = 2'-fluorocytidine-3'-phosphate
  modified_base 11: mod_base = OTHER; note = 2'-fluorouridine-3'-phosphate
  modified_base 12: mod_base = OTHER; note = 2'-O-methylguanosine-3'-phosphate
  modified_base 13: mod_base = OTHER; note = 2'-O-methyluridine-3'-phosphate
  modified_base 14: mod_base = OTHER; note = 2'-O-methyluridine-3'-phosphate
  modified_base 15: mod_base = OTHER; note = 2'-O-methyluridine-3'-phosphate
  modified_base 16: mod_base = OTHER; note = 2'-O-methyluridine-3'-phosphate
  modified_base 17: mod_base = OTHER; note = 2'-O-methylguanosine-3'-phosphate
  modified_base 18: mod_base = OTHER; note = 2'-O-methylcytidine-3'-phosphate
  modified_base 19: mod_base = OTHER; note = 2'-O-methyluridine-3'-phosphate
  modified_base 20: mod_base = OTHER; note = 2'-O-methyluridine-3'-phosphate
  modified_base 21: mod_base = OTHER; note = 2'-O-methyluridine
tttctagacctgttttgcttt

SEQ ID NO: 2011 - RNA, 23 nt, synthetic construct
  source 1..23: mol_type = other RNA
  modified_base 1: mod_base = OTHER; note = 2'-O-methyladenosine-3'-phosphorothioate
  modified_base 2: mod_base = OTHER; note = 2'-fluoroadenosine-3'-phosphorothioate
  modified_base 3: mod_base = OTHER; note = 2'-O-methyladenosine-3'-phosphate
  modified_base 4: mod_base = OTHER; note = 2'-O-methylguanosine-3'-phosphate
  modified_base 5: mod_base = OTHER; note = 2'-O-methylcytidine-3'-phosphate
  modified_base 6: mod_base = OTHER; note = 2'-O-methyladenosine-3'-phosphate
  modified_base 7: mod_base = OTHER; note = 2'-fluoroadenosine-3'-phosphate
  modified_base 8: mod_base = OTHER; note = 2'-O-methyladenosine-3'-phosphate
  modified_base 9: mod_base = OTHER; note = 2'-O-methyladenosine-3'-phosphate
  modified_base 10: mod_base = OTHER; note = 2'-O-methylcytidine-3'-phosphate
  modified_base 11: mod_base = OTHER; note = 2'-O-methyladenosine-3'-phosphate
  modified_base 12: mod_base = OTHER; note = 2'-fluoroguanosine-3'-phosphate
  modified_base 13: mod_base = OTHER; note = 2'-O-methylguanosine-3'-phosphate
  modified_base 14: mod_base = OTHER; note = 2'-fluorouridine-3'-phosphate
  modified_base 15: mod_base = OTHER; note = 2'-O-methylcytidine-3'-phosphate
  modified_base 16: mod_base = OTHER; note = 2'-fluorouridine-3'-phosphate
  modified_base 17: mod_base = OTHER; note = 2'-O-methyladenosine-3'-phosphate
  modified_base 18: mod_base = OTHER; note = 2'-O-methylguanosine-3'-phosphate
  modified_base 19: mod_base = OTHER; note = 2'-O-methyladenosine-3'-phosphate
  modified_base 20: mod_base = OTHER; note = 2'-O-methyladenosine-3'-phosphate
  modified_base 21: mod_base = OTHER; note = 2'-O-methyladenosine-3'-phosphorothioate
  modified_base 22: mod_base = OTHER; note = 2'-O-methyladenosine-3'-phosphorothioate
  modified_base 23: mod_base = OTHER; note = 2'-O-methylguanosine
aaagcaaaacaggtctagaaaag

SEQ ID NO: 2012 - RNA, 21 nt, synthetic construct
  source 1..21: mol_type = other RNA
  modified_base 1: mod_base = OTHER; note = 2'-O-methyluridine-3'-phosphorothioate
  modified_base 2: mod_base = OTHER; note = 2'-O-methylcytidine-3'-phosphorothioate
  modified_base 3: mod_base = OTHER; note = 2'-O-methyluridine-3'-phosphate
  modified_base 4: mod_base = OTHER; note = 2'-O-methyladenosine-3'-phosphate
  modified_base 5: mod_base = OTHER; note = 2'-O-methylguanosine-3'-phosphate
  modified_base 6: mod_base = OTHER; note = 2'-O-methyladenosine-3'-phosphate
  modified_base 7: mod_base = OTHER; note = 2'-fluorocytidine-3'-phosphate
  modified_base 8: mod_base = OTHER; note = 2'-O-methylcytidine-3'-phosphate
  modified_base 9: mod_base = OTHER; note = 2'-fluorouridine-3'-phosphate
  modified_base 10: mod_base = OTHER; note = 2'-fluoroguanosine-3'-phosphate
  modified_base 11: mod_base = OTHER; note = 2'-fluorouridine-3'-phosphate
  modified_base 12: mod_base = OTHER; note = 2'-O-methyluridine-3'-phosphate
  modified_base 13: mod_base = OTHER; note = 2'-O-methyluridine-3'-phosphate
  modified_base 14: mod_base = OTHER; note = 2'-O-methyluridine-3'-phosphate
  modified_base 15: mod_base = OTHER; note = 2'-O-methylguanosine-3'-phosphate
  modified_base 16: mod_base = OTHER; note = 2'-O-methylcytidine-3'-phosphate
  modified_base 17: mod_base = OTHER; note = 2'-O-methyluridine-3'-phosphate
  modified_base 18: mod_base = OTHER; note = 2'-O-methyluridine-3'-phosphate
  modified_base 19: mod_base = OTHER; note = 2'-O-methyluridine-3'-phosphate
  modified_base 20: mod_base = OTHER; note = 2'-O-methyluridine-3'-phosphate
  modified_base 21: mod_base = OTHER; note = 2'-O-methylguanosine
tctagacctgttttgcttttg

SEQ ID NO: 2013 - RNA, 23 nt, synthetic construct
  source 1..23: mol_type = other RNA
  modified_base 1: mod_base = OTHER; note = 2'-O-methylcytidine-3'-phosphorothioate
  modified_base 2: mod_base = OTHER; note = 2'-fluoroadenosine-3'-phosphorothioate
  modified_base 3: mod_base = OTHER; note = 2'-O-methyladenosine-3'-phosphate
  modified_base 4: mod_base = OTHER; note = 2'-O-methyladenosine-3'-phosphate
  modified_base 5: mod_base = OTHER; note = 2'-O-methyladenosine-3'-phosphate
  modified_base 6: mod_base = OTHER; note = 2'-O-methylguanosine-3'-phosphate
  modified_base 7: mod_base = OTHER; note = 2'-fluorocytidine-3'-phosphate
  modified_base 8: mod_base = OTHER; note = 2'-O-methyladenosine-3'-phosphate
  modified_base 9: mod_base = OTHER; note = 2'-O-methyladenosine-3'-phosphate
  modified_base 10: mod_base = OTHER; note = 2'-O-methyladenosine-3'-phosphate
  modified_base 11: mod_base = OTHER; note = 2'-O-methyladenosine-3'-phosphate
  modified_base 12: mod_base = OTHER; note = 2'-fluorocytidine-3'-phosphate
  modified_base 13: mod_base = OTHER; note = 2'-O-methyladenosine-3'-phosphate
  modified_base 14: mod_base = OTHER; note = 2'-fluoroguanosine-3'-phosphate
  modified_base 15: mod_base = OTHER; note = 2'-O-methylguanosine-3'-phosphate
  modified_base 16: mod_base = OTHER; note = 2'-fluorouridine-3'-phosphate
  modified_base 17: mod_base = OTHER; note = 2'-O-methylcytidine-3'-phosphate
  modified_base 18: mod_base = OTHER; note = 2'-O-methyluridine-3'-phosphate
  modified_base 19: mod_base = OTHER; note = 2'-O-methyladenosine-3'-phosphate
  modified_base 20: mod_base = OTHER; note = 2'-O-methylguanosine-3'-phosphate
  modified_base 21: mod_base = OTHER; note = 2'-O-methyladenosine-3'-phosphorothioate
  modified_base 22: mod_base = OTHER; note = 2'-O-methyladenosine-3'-phosphorothioate
  modified_base 23: mod_base = OTHER; note = 2'-O-methyladenosine
caaaagcaaaacaggtctagaaa

SEQ ID NO: 2014 - RNA, 21 nt, synthetic construct
  source 1..21: mol_type = other RNA
  modified_base 1: mod_base = OTHER; note = 2'-O-methylcytidine-3'-phosphorothioate
  modified_base 2: mod_base = OTHER; note = 2'-O-methyluridine-3'-phosphorothioate
  modified_base 3: mod_base = OTHER; note = 2'-O-methyladenosine-3'-phosphate
  modified_base 4: mod_base = OTHER; note = 2'-O-methylguanosine-3'-phosphate
  modified_base 5: mod_base = OTHER; note = 2'-O-methyladenosine-3'-phosphate
  modified_base 6: mod_base = OTHER; note = 2'-O-methylcytidine-3'-phosphate
  modified_base 7: mod_base = OTHER; note = 2'-fluorocytidine-3'-phosphate
  modified_base 8: mod_base = OTHER; note = 2'-O-methyluridine-3'-phosphate
  modified_base 9: mod_base = OTHER; note = 2'-fluoroguanosine-3'-phosphate
  modified_base 10: mod_base = OTHER; note = 2'-fluorouridine-3'-phosphate
  modified_base 11: mod_base = OTHER; note = 2'-fluorouridine-3'-phosphate
  modified_base 12: mod_base = OTHER; note = 2'-O-methyluridine-3'-phosphate
  modified_base 13: mod_base = OTHER; note = 2'-O-methyluridine-3'-phosphate
  modified_base 14: mod_base = OTHER; note = 2'-O-methylguanosine-3'-phosphate
  modified_base 15: mod_base = OTHER; note = 2'-O-methylcytidine-3'-phosphate
  modified_base 16: mod_base = OTHER; note = 2'-O-methyluridine-3'-phosphate
  modified_base 17: mod_base = OTHER; note = 2'-O-methyluridine-3'-phosphate
  modified_base 18: mod_base = OTHER; note = 2'-O-methyluridine-3'-phosphate
  modified_base 19: mod_base = OTHER; note = 2'-O-methyluridine-3'-phosphate
  modified_base 20: mod_base = OTHER; note = 2'-O-methylguanosine-3'-phosphate
  modified_base 21: mod_base = OTHER; note = 2'-O-methyluridine
ctagacctgttttgcttttgt

SEQ ID NO: 2015 - RNA, 23 nt, synthetic construct
  source 1..23: mol_type = other RNA
  modified_base 1: mod_base = OTHER; note = 2'-O-methyladenosine-3'-phosphorothioate
  modified_base 2: mod_base = OTHER; note = 2'-fluorocytidine-3'-phosphorothioate
  modified_base 3: mod_base = OTHER; note = 2'-O-methyladenosine-3'-phosphate
  modified_base 4: mod_base = OTHER; note = 2'-O-methyladenosine-3'-phosphate
  modified_base 5: mod_base = OTHER; note = 2'-O-methyladenosine-3'-phosphate
  modified_base 6: mod_base = OTHER; note = 2'-O-methyladenosine-3'-phosphate
  modified_base 7: mod_base = OTHER; note = 2'-fluoroguanosine-3'-phosphate
  modified_base 8: mod_base = OTHER; note = 2'-O-methylcytidine-3'-phosphate
  modified_base 9: mod_base = OTHER; note = 2'-O-methyladenosine-3'-phosphate
  modified_base 10: mod_base = OTHER; note = 2'-O-methyladenosine-3'-phosphate
  modified_base 11: mod_base = OTHER; note = 2'-O-methyladenosine-3'-phosphate
  modified_base 12: mod_base = OTHER; note = 2'-fluoroadenosine-3'-phosphate
  modified_base 13: mod_base = OTHER; note = 2'-O-methylcytidine-3'-phosphate
  modified_base 14: mod_base = OTHER; note = 2'-fluoroadenosine-3'-phosphate
  modified_base 15: mod_base = OTHER; note = 2'-O-methylguanosine-3'-phosphate
  modified_base 16: mod_base = OTHER; note = 2'-fluoroguanosine-3'-phosphate
  modified_base 17: mod_base = OTHER; note = 2'-O-methyluridine-3'-phosphate
  modified_base 18: mod_base = OTHER; note = 2'-O-methylcytidine-3'-phosphate
  modified_base 19: mod_base = OTHER; note = 2'-O-methyluridine-3'-phosphate
  modified_base 20: mod_base = OTHER; note = 2'-O-methyladenosine-3'-phosphate
  modified_base 21: mod_base = OTHER; note = 2'-O-methylguanosine-3'-phosphorothioate
  modified_base 22: mod_base = OTHER; note = 2'-O-methyladenosine-3'-phosphorothioate
  modified_base 23: mod_base = OTHER; note = 2'-O-methyladenosine
acaaaagcaaaacaggtctagaa

SEQ ID NO: 2016 - RNA, 21 nt, synthetic construct
  source 1..21: mol_type = other RNA
  modified_base 1: mod_base = OTHER; note = 2'-O-methyluridine-3'-phosphorothioate
  modified_base 2: mod_base = OTHER; note = 2'-O-methyladenosine-3'-phosphorothioate
  modified_base 3: mod_base = OTHER; note = 2'-O-methylguanosine-3'-phosphate
  modified_base 4: mod_base = OTHER; note = 2'-O-methyladenosine-3'-phosphate
  modified_base 5: mod_base = OTHER; note = 2'-O-methylcytidine-3'-phosphate
  modified_base 6: mod_base = OTHER; note = 2'-O-methylcytidine-3'-phosphate
  modified_base 7: mod_base = OTHER; note = 2'-fluorouridine-3'-phosphate
  modified_base 8: mod_base = OTHER; note = 2'-O-methylguanosine-3'-phosphate
  modified_base 9: mod_base = OTHER; note = 2'-fluorouridine-3'-phosphate
  modified_base 10: mod_base = OTHER; note = 2'-fluorouridine-3'-phosphate
  modified_base 11: mod_base = OTHER; note = 2'-fluorouridine-3'-phosphate
  modified_base 12: mod_base = OTHER; note = 2'-O-methyluridine-3'-phosphate
  modified_base 13: mod_base = OTHER; note = 2'-O-methylguanosine-3'-phosphate
  modified_base 14: mod_base = OTHER; note = 2'-O-methylcytidine-3'-phosphate
  modified_base 15: mod_base = OTHER; note = 2'-O-methyluridine-3'-phosphate
  modified_base 16: mod_base = OTHER; note = 2'-O-methyluridine-3'-phosphate
  modified_base 17: mod_base = OTHER; note = 2'-O-methyluridine-3'-phosphate
  modified_base 18: mod_base = OTHER; note = 2'-O-methyluridine-3'-phosphate
  modified_base 19: mod_base = OTHER; note = 2'-O-methylguanosine-3'-phosphate
  modified_base 20: mod_base = OTHER; note = 2'-O-methyluridine-3'-phosphate
  modified_base 21: mod_base = OTHER; note = 2'-O-methyladenosine
tagacctgttttgcttttgta

SEQ ID NO: 2017 - RNA, 23 nt, synthetic construct
  source 1..23: mol_type = other RNA
  modified_base 1: mod_base = OTHER; note = 2'-O-methyluridine-3'-phosphorothioate
  modified_base 2: mod_base = OTHER; note = 2'-fluoroadenosine-3'-phosphorothioate
  modified_base 3: mod_base = OTHER; note = 2'-O-methylcytidine-3'-phosphate
  modified_base 4: mod_base = OTHER; note = 2'-O-methyladenosine-3'-phosphate
  modified_base 5: mod_base = OTHER; note = 2'-O-methyladenosine-3'-phosphate
  modified_base 6: mod_base = OTHER; note = 2'-O-methyladenosine-3'-phosphate
  modified_base 7: mod_base = OTHER; note = 2'-fluoroadenosine-3'-phosphate
  modified_base 8: mod_base = OTHER; note = 2'-O-methylguanosine-3'-phosphate
  modified_base 9: mod_base = OTHER; note = 2'-O-methylcytidine-3'-phosphate
  modified_base 10: mod_base = OTHER; note = 2'-O-methyladenosine-3'-phosphate
  modified_base 11: mod_base = OTHER; note = 2'-O-methyladenosine-3'-phosphate
  modified_base 12: mod_base = OTHER; note = 2'-fluoroadenosine-3'-phosphate
  modified_base 13: mod_base = OTHER; note = 2'-O-methyladenosine-3'-phosphate
  modified_base 14: mod_base = OTHER; note = 2'-fluorocytidine-3'-phosphate
  modified_base 15: mod_base = OTHER; note = 2'-O-methyladenosine-3'-phosphate
  modified_base 16: mod_base = OTHER; note = 2'-fluoroguanosine-3'-phosphate
  modified_base 17: mod_base = OTHER; note = 2'-O-methylguanosine-3'-phosphate
  modified_base 18: mod_base = OTHER; note = 2'-O-methyluridine-3'-phosphate
  modified_base 19: mod_base = OTHER; note = 2'-O-methylcytidine-3'-phosphate
  modified_base 20: mod_base = OTHER; note = 2'-O-methyluridine-3'-phosphate
  modified_base 21: mod_base = OTHER; note = 2'-O-methyladenosine-3'-phosphorothioate
  modified_base 22: mod_base = OTHER; note = 2'-O-methylguanosine-3'-phosphorothioate
  modified_base 23: mod_base = OTHER; note = 2'-O-methyladenosine
tacaaaagcaaaacaggtctaga

SEQ ID NO: 2018 - RNA, 21 nt, synthetic construct
  source 1..21: mol_type = other RNA
  modified_base 1: mod_base = OTHER; note = 2'-O-methyladenosine-3'-phosphorothioate
  modified_base 2: mod_base = OTHER; note = 2'-O-methylguanosine-3'-phosphorothioate
  modified_base 3: mod_base = OTHER; note = 2'-O-methyladenosine-3'-phosphate
  modified_base 4: mod_base = OTHER; note = 2'-O-methylcytidine-3'-phosphate
  modified_base 5: mod_base = OTHER; note = 2'-O-methylcytidine-3'-phosphate
  modified_base 6: mod_base = OTHER; note = 2'-O-methyluridine-3'-phosphate
  modified_base 7: mod_base = OTHER; note = 2'-fluoroguanosine-3'-phosphate
  modified_base 8: mod_base = OTHER; note = 2'-O-methyluridine-3'-phosphate
  modified_base 9: mod_base = OTHER; note = 2'-fluorouridine-3'-phosphate
  modified_base 10: mod_base = OTHER; note = 2'-fluorouridine-3'-phosphate
  modified_base 11: mod_base = OTHER; note = 2'-fluorouridine-3'-phosphate
  modified_base 12: mod_base = OTHER; note = 2'-O-methylguanosine-3'-phosphate
  modified_base 13: mod_base = OTHER; note = 2'-O-methylcytidine-3'-phosphate
  modified_base 14: mod_base = OTHER; note = 2'-O-methyluridine-3'-phosphate
  modified_base 15: mod_base = OTHER; note = 2'-O-methyluridine-3'-phosphate
  modified_base 16: mod_base = OTHER; note = 2'-O-methyluridine-3'-phosphate
  modified_base 17: mod_base = OTHER; note = 2'-O-methyluridine-3'-phosphate
  modified_base 18: mod_base = OTHER; note = 2'-O-methylguanosine-3'-phosphate
  modified_base 19: mod_base = OTHER; note = 2'-O-methyluridine-3'-phosphate
  modified_base 20: mod_base = OTHER; note = 2'-O-methyladenosine-3'-phosphate
  modified_base 21: mod_base = OTHER; note = 2'-O-methyladenosine
agacctgttttgcttttgtaa

SEQ ID NO: 2019 - RNA, 23 nt, synthetic construct
  source 1..23: mol_type = other RNA
  modified_base 1: mod_base = OTHER; note = 2'-O-methyluridine-3'-phosphorothioate
  modified_base 2: mod_base = OTHER; note = 2'-fluorouridine-3'-phosphorothioate
  modified_base 3: mod_base = OTHER; note = 2'-O-methyladenosine-3'-phosphate
  modified_base 4: mod_base = OTHER; note = 2'-O-methylcytidine-3'-phosphate
  modified_base 5: mod_base = OTHER; note = 2'-O-methyladenosine-3'-phosphate
  modified_base 6: mod_base = OTHER; note = 2'-O-methyladenosine-3'-phosphate
  modified_base 7: mod_base = OTHER; note = 2'-fluoroadenosine-3'-phosphate
  modified_base 8: mod_base = OTHER; note = 2'-O-methyladenosine-3'-phosphate
  modified_base 9: mod_base = OTHER; note = 2'-O-methylguanosine-3'-phosphate
  modified_base 10: mod_base = OTHER; note = 2'-O-methylcytidine-3'-phosphate
  modified_base 11: mod_base = OTHER; note = 2'-O-methyladenosine-3'-phosphate
  modified_base 12: mod_base = OTHER; note = 2'-fluoroadenosine-3'-phosphate
  modified_base 13: mod_base = OTHER; note = 2'-O-methyladenosine-3'-phosphate
  modified_base 14: mod_base = OTHER; note = 2'-fluoroadenosine-3'-phosphate
  modified_base 15: mod_base = OTHER; note = 2'-O-methylcytidine-3'-phosphate
  modified_base 16: mod_base = OTHER; note = 2'-fluoroadenosine-3'-phosphate
  modified_base 17: mod_base = OTHER; note = 2'-O-methylguanosine-3'-phosphate
  modified_base 18: mod_base = OTHER; note = 2'-O-methylguanosine-3'-phosphate
  modified_base 19: mod_base = OTHER; note = 2'-O-methyluridine-3'-phosphate
  modified_base 20: mod_base = OTHER; note = 2'-O-methylcytidine-3'-phosphate
  modified_base 21: mod_base = OTHER; note = 2'-O-methyluridine-3'-phosphorothioate
  modified_base 22: mod_base = OTHER; note = 2'-O-methyladenosine-3'-phosphorothioate
  modified_base 23: mod_base = OTHER; note = 2'-O-methylguanosine
ttacaaaagcaaaacaggtctag

SEQ ID NO: 2020 - RNA, 21 nt, synthetic construct
  source 1..21: mol_type = other RNA
  modified_base 1: mod_base = OTHER; note = 2'-O-methylguanosine-3'-phosphorothioate
  modified_base 2: mod_base = OTHER; note = 2'-O-methyladenosine-3'-phosphorothioate
  modified_base 3: mod_base = OTHER; note = 2'-O-methylcytidine-3'-phosphate
  modified_base 4: mod_base = OTHER; note = 2'-O-methylcytidine-3'-phosphate
  modified_base 5: mod_base = OTHER; note = 2'-O-methyluridine-3'-phosphate
  modified_base 6: mod_base = OTHER; note = 2'-O-methylguanosine-3'-phosphate
  modified_base 7: mod_base = OTHER; note = 2'-fluorouridine-3'-phosphate
  modified_base 8: mod_base = OTHER; note = 2'-O-methyluridine-3'-phosphate
  modified_base 9: mod_base = OTHER; note = 2'-fluorouridine-3'-phosphate
  modified_base 10: mod_base = OTHER; note = 2'-fluorouridine-3'-phosphate
  modified_base 11: mod_base = OTHER; note = 2'-fluoroguanosine-3'-phosphate
  modified_base 12: mod_base = OTHER; note = 2'-O-methylcytidine-3'-phosphate
  modified_base 13: mod_base = OTHER; note = 2'-O-methyluridine-3'-phosphate
  modified_base 14: mod_base = OTHER; note = 2'-O-methyluridine-3'-phosphate
  modified_base 15: mod_base = OTHER; note = 2'-O-methyluridine-3'-phosphate
  modified_base 16: mod_base = OTHER; note = 2'-O-methyluridine-3'-phosphate
  modified_base 17: mod_base = OTHER; note = 2'-O-methylguanosine-3'-phosphate
  modified_base 18: mod_base = OTHER; note = 2'-O-methyluridine-3'-phosphate
  modified_base 19: mod_base = OTHER; note = 2'-O-methyladenosine-3'-phosphate
  modified_base 20: mod_base = OTHER; note = 2'-O-methyladenosine-3'-phosphate
  modified_base 21: mod_base = OTHER; note = 2'-O-methylcytidine
gacctgttttgcttttgtaac

SEQ ID NO: 2021 - RNA, 23 nt, synthetic construct
  source 1..23: mol_type = other RNA
  modified_base 1: mod_base = OTHER; note = 2'-O-methylguanosine-3'-phosphorothioate
  modified_base 2: mod_base = OTHER; note = 2'-fluorouridine-3'-phosphorothioate
  modified_base 3: mod_base = OTHER; note = 2'-O-methyluridine-3'-phosphate
  modified_base 4: mod_base = OTHER; note = 2'-O-methyladenosine-3'-phosphate
  modified_base 5: mod_base = OTHER; note = 2'-O-methylcytidine-3'-phosphate
  modified_base 6: mod_base = OTHER; note = 2'-O-methyladenosine-3'-phosphate
  modified_base 7: mod_base = OTHER; note = 2'-fluoroadenosine-3'-phosphate
  modified_base 8: mod_base = OTHER; note = 2'-O-methyladenosine-3'-phosphate
  modified_base 9: mod_base = OTHER; note = 2'-O-methyladenosine-3'-phosphate
  modified_base 10: mod_base = OTHER; note = 2'-O-methylguanosine-3'-phosphate
  modified_base 11: mod_base = OTHER; note = 2'-O-methylcytidine-3'-phosphate
  modified_base 12: mod_base = OTHER; note = 2'-fluoroadenosine-3'-phosphate
  modified_base 13: mod_base = OTHER; note = 2'-O-methyladenosine-3'-phosphate
  modified_base 14: mod_base = OTHER; note = 2'-fluoroadenosine-3'-phosphate
  modified_base 15: mod_base = OTHER; note = 2'-O-methyladenosine-3'-phosphate
  modified_base 16: mod_base = OTHER; note = 2'-fluorocytidine-3'-phosphate
  modified_base 17: mod_base = OTHER; note = 2'-O-methyladenosine-3'-phosphate
  modified_base 18: mod_base = OTHER; note = 2'-O-methylguanosine-3'-phosphate
  modified_base 19: mod_base = OTHER; note = 2'-O-methylguanosine-3'-phosphate
  modified_base 20: mod_base = OTHER; note = 2'-O-methyluridine-3'-phosphate
  modified_base 21: mod_base = OTHER; note = 2'-O-methylcytidine-3'-phosphorothioate
  modified_base 22: mod_base = OTHER; note = 2'-O-methyluridine-3'-phosphorothioate
  modified_base 23: mod_base = OTHER; note = 2'-O-methyladenosine
gttacaaaagcaaaacaggtcta

SEQ ID NO: 2022 - RNA, 21 nt, synthetic construct
  source 1..21: mol_type = other RNA
  modified_base 1: mod_base = OTHER; note = 2'-O-methyladenosine-3'-phosphorothioate
  modified_base 2: mod_base = OTHER; note = 2'-O-methylcytidine-3'-phosphorothioate
  modified_base 3: mod_base = OTHER; note = 2'-O-methylcytidine-3'-phosphate
  modified_base 4: mod_base = OTHER; note = 2'-O-methyluridine-3'-phosphate
  modified_base 5: mod_base = OTHER; note = 2'-O-methylguanosine-3'-phosphate
  modified_base 6: mod_base = OTHER; note = 2'-O-methyluridine-3'-phosphate
  modified_base 7: mod_base = OTHER; note = 2'-fluorouridine-3'-phosphate
  modified_base 8: mod_base = OTHER; note = 2'-O-methyluridine-3'-phosphate
  modified_base 9: mod_base = OTHER; note = 2'-fluorouridine-3'-phosphate
  modified_base 10: mod_base = OTHER; note = 2'-fluoroguanosine-3'-phosphate
  modified_base 11: mod_base = OTHER; note = 2'-fluorocytidine-3'-phosphate
  modified_base 12: mod_base = OTHER; note = 2'-O-methyluridine-3'-phosphate
  modified_base 13: mod_base = OTHER; note = 2'-O-methyluridine-3'-phosphate
  modified_base 14: mod_base = OTHER; note = 2'-O-methyluridine-3'-phosphate
  modified_base 15: mod_base = OTHER; note = 2'-O-methyluridine-3'-phosphate
  modified_base 16: mod_base = OTHER; note = 2'-O-methylguanosine-3'-phosphate
  modified_base 17: mod_base = OTHER; note = 2'-O-methyluridine-3'-phosphate
  modified_base 18: mod_base = OTHER; note = 2'-O-methyladenosine-3'-phosphate
  modified_base 19: mod_base = OTHER; note = 2'-O-methyladenosine-3'-phosphate
  modified_base 20: mod_base = OTHER; note = 2'-O-methylcytidine-3'-phosphate
  modified_base 21: mod_base = OTHER; note = 2'-O-methyluridine
acctgttttgcttttgtaact

SEQ ID NO: 2023 - RNA, 23 nt, synthetic construct
  source 1..23: mol_type = other RNA
  modified_base 1: mod_base = OTHER; note = 2'-O-methyladenosine-3'-phosphorothioate
  modified_base 2: mod_base = OTHER; note = 2'-fluoroguanosine-3'-phosphorothioate
  modified_base 3: mod_base = OTHER; note = 2'-O-methyluridine-3'-phosphate
  modified_base 4: mod_base = OTHER; note = 2'-O-methyluridine-3'-phosphate
  modified_base 5: mod_base = OTHER; note = 2'-O-methyladenosine-3'-phosphate
  modified_base 6: mod_base = OTHER; note = 2'-O-methylcytidine-3'-phosphate
  modified_base 7: mod_base = OTHER; note = 2'-fluoroadenosine-3'-phosphate
  modified_base 8: mod_base = OTHER; note = 2'-O-methyladenosine-3'-phosphate
  modified_base 9: mod_base = OTHER; note = 2'-O-methyladenosine-3'-phosphate
  modified_base 10: mod_base = OTHER; note = 2'-O-methyladenosine-3'-phosphate
  modified_base 11: mod_base = OTHER; note = 2'-O-methylguanosine-3'-phosphate
  modified_base 12: mod_base = OTHER; note = 2'-fluorocytidine-3'-phosphate
  modified_base 13: mod_base = OTHER; note = 2'-O-methyladenosine-3'-phosphate
  modified_base 14: mod_base = OTHER; note = 2'-fluoroadenosine-3'-phosphate
  modified_base 15: mod_base = OTHER; note = 2'-O-methyladenosine-3'-phosphate
  modified_base 16: mod_base = OTHER; note = 2'-fluoroadenosine-3'-phosphate
  modified_base 17: mod_base = OTHER; note = 2'-O-methylcytidine-3'-phosphate
  modified_base 18: mod_base = OTHER; note = 2'-O-methyladenosine-3'-phosphate
  modified_base 19: mod_base = OTHER; note = 2'-O-methylguanosine-3'-phosphate
  modified_base 20: mod_base = OTHER; note = 2'-O-methylguanosine-3'-phosphate
  modified_base 21: mod_base = OTHER; note = 2'-O-methyluridine-3'-phosphorothioate
  modified_base 22: mod_base = OTHER; note = 2'-O-methylcytidine-3'-phosphorothioate
  modified_base 23: mod_base = OTHER; note = 2'-O-methyluridine
agttacaaaagcaaaacaggtct

SEQ ID NO: 2024 - RNA, 21 nt, synthetic construct
  source 1..21: mol_type = other RNA
  modified_base 1: mod_base = OTHER; note = 2'-O-methylcytidine-3'-phosphorothioate
  modified_base 2: mod_base = OTHER; note = 2'-O-methyluridine-3'-phosphorothioate
  modified_base 3: mod_base = OTHER; note = 2'-O-methylguanosine-3'-phosphate
  modified_base 4: mod_base = OTHER; note = 2'-O-methyluridine-3'-phosphate
  modified_base 5: mod_base = OTHER; note = 2'-O-methyluridine-3'-phosphate
  modified_base 6: mod_base = OTHER; note = 2'-O-methyluridine-3'-phosphate
  modified_base 7: mod_base = OTHER; note = 2'-fluorouridine-3'-phosphate
  modified_base 8: mod_base = OTHER; note = 2'-O-methylguanosine-3'-phosphate
  modified_base 9: mod_base = OTHER; note = 2'-fluorocytidine-3'-phosphate
  modified_base 10: mod_base = OTHER; note = 2'-fluorouridine-3'-phosphate
  modified_base 11: mod_base = OTHER; note = 2'-fluorouridine-3'-phosphate
  modified_base 12: mod_base = OTHER; note = 2'-O-methyluridine-3'-phosphate
  modified_base 13: mod_base = OTHER; note = 2'-O-methyluridine-3'-phosphate
  modified_base 14: mod_base = OTHER; note = 2'-O-methylguanosine-3'-phosphate
  modified_base 15: mod_base = OTHER; note = 2'-O-methyluridine-3'-phosphate
  modified_base 16: mod_base = OTHER; note = 2'-O-methyladenosine-3'-phosphate
  modified_base 17: mod_base = OTHER; note = 2'-O-methyladenosine-3'-phosphate
  modified_base 18: mod_base = OTHER; note = 2'-O-methylcytidine-3'-phosphate
  modified_base 19: mod_base = OTHER; note = 2'-O-methyluridine-3'-phosphate
  modified_base 20: mod_base = OTHER; note = 2'-O-methyluridine-3'-phosphate
  modified_base 21: mod_base = OTHER; note = 2'-O-methylguanosine
ctgttttgcttttgtaacttg

SEQ ID NO: 2025 - RNA, 23 nt, synthetic construct
  source 1..23: mol_type = other RNA
  modified_base 1: mod_base = OTHER; note = 2'-O-methylcytidine-3'-phosphorothioate
  modified_base 2: mod_base = OTHER; note = 2'-fluoroadenosine-3'-phosphorothioate
  modified_base 3: mod_base = OTHER; note = 2'-O-methyladenosine-3'-phosphate
  modified_base 4: mod_base = OTHER; note = 2'-O-methylguanosine-3'-phosphate
  modified_base 5: mod_base = OTHER; note = 2'-O-methyluridine-3'-phosphate
  modified_base 6: mod_base = OTHER; note = 2'-O-methyluridine-3'-phosphate
  modified_base 7: mod_base = OTHER; note = 2'-fluoroadenosine-3'-phosphate
  modified_base 8: mod_base = OTHER; note = 2'-O-methylcytidine-3'-phosphate
  modified_base 9: mod_base = OTHER; note = 2'-O-methyladenosine-3'-phosphate
  modified_base 10: mod_base = OTHER; note = 2'-O-methyladenosine-3'-phosphate
  modified_base 11: mod_base = OTHER; note = 2'-O-methyladenosine-3'-phosphate
  modified_base 12: mod_base = OTHER; note = 2'-fluoroadenosine-3'-phosphate
  modified_base 13: mod_base = OTHER; note = 2'-O-methylguanosine-3'-phosphate
  modified_base 14: mod_base = OTHER; note = 2'-fluorocytidine-3'-phosphate
  modified_base 15: mod_base = OTHER; note = 2'-O-methyladenosine-3'-phosphate
  modified_base 16: mod_base = OTHER; note = 2'-fluoroadenosine-3'-phosphate
  modified_base 17: mod_base = OTHER; note = 2'-O-methyladenosine-3'-phosphate
  modified_base 18: mod_base = OTHER; note = 2'-O-methyladenosine-3'-phosphate
  modified_base 19: mod_base = OTHER; note = 2'-O-methylcytidine-3'-phosphate
  modified_base 20: mod_base = OTHER; note = 2'-O-methyladenosine-3'-phosphate
  modified_base 21: mod_base = OTHER; note = 2'-O-methylguanosine-3'-phosphorothioate
  modified_base 22: mod_base = OTHER; note = 2'-O-methylguanosine-3'-phosphorothioate
  modified_base 23: mod_base = OTHER; note = 2'-O-methyluridine
caagttacaaaagcaaaacaggt

SEQ ID NO: 2026 - RNA, 21 nt, synthetic construct
  source 1..21: mol_type = other RNA
  modified_base 1: mod_base = OTHER; note = 2'-O-methylguanosine-3'-phosphorothioate
  modified_base 2: mod_base = OTHER; note = 2'-O-methyluridine-3'-phosphorothioate
  modified_base 3: mod_base = OTHER; note = 2'-O-methyluridine-3'-phosphate
  modified_base 4: mod_base = OTHER; note = 2'-O-methyluridine-3'-phosphate
  modified_base 5: mod_base = OTHER; note = 2'-O-methyluridine-3'-phosphate
  modified_base 6: mod_base = OTHER; note = 2'-O-methylguanosine-3'-phosphate
  modified_base 7: mod_base = OTHER; note = 2'-fluorocytidine-3'-phosphate
  modified_base 8: mod_base = OTHER; note = 2'-O-methyluridine-3'-phosphate
  modified_base 9: mod_base = OTHER; note = 2'-fluorouridine-3'-phosphate
  modified_base 10: mod_base = OTHER; note = 2'-fluorouridine-3'-phosphate
  modified_base 11: mod_base = OTHER; note = 2'-fluorouridine-3'-phosphate
  modified_base 12: mod_base = OTHER; note = 2'-O-methylguanosine-3'-phosphate
  modified_base 13: mod_base = OTHER; note = 2'-O-methyluridine-3'-phosphate
  modified_base 14: mod_base = OTHER; note = 2'-O-methyladenosine-3'-phosphate
  modified_base 15: mod_base = OTHER; note = 2'-O-methyladenosine-3'-phosphate
  modified_base 16: mod_base = OTHER; note = 2'-O-methylcytidine-3'-phosphate
  modified_base 17: mod_base = OTHER; note = 2'-O-methyluridine-3'-phosphate
  modified_base 18: mod_base = OTHER; note = 2'-O-methyluridine-3'-phosphate
  modified_base 19: mod_base = OTHER; note = 2'-O-methylguanosine-3'-phosphate
  modified_base 20: mod_base = OTHER; note = 2'-O-methyladenosine-3'-phosphate
  modified_base 21: mod_base = OTHER; note = 2'-O-methyladenosine
gttttgcttttgtaacttgaa

SEQ ID NO: 2027 - RNA, 23 nt, synthetic construct
  source 1..23: mol_type = other RNA
  modified_base 1: mod_base = OTHER; note = 2'-O-methyluridine-3'-phosphorothioate
  modified_base 2: mod_base = OTHER; note = 2'-fluorouridine-3'-phosphorothioate
  modified_base 3: mod_base = OTHER; note = 2'-O-methylcytidine-3'-phosphate
  modified_base 4: mod_base = OTHER; note = 2'-O-methyladenosine-3'-phosphate
  modified_base 5: mod_base = OTHER; note = 2'-O-methyladenosine-3'-phosphate
  modified_base 6: mod_base = OTHER; note = 2'-O-methylguanosine-3'-phosphate
  modified_base 7: mod_base = OTHER; note = 2'-fluorouridine-3'-phosphate
  modified_base 8: mod_base = OTHER; note = 2'-O-methyluridine-3'-phosphate
  modified_base 9: mod_base = OTHER; note = 2'-O-methyladenosine-3'-phosphate
  modified_base 10: mod_base = OTHER; note = 2'-O-methylcytidine-3'-phosphate
  modified_base 11: mod_base = OTHER; note = 2'-O-methyladenosine-3'-phosphate
  modified_base 12: mod_base = OTHER; note = 2'-fluoroadenosine-3'-phosphate
  modified_base 13: mod_base = OTHER; note = 2'-O-methyladenosine-3'-phosphate
  modified_base 14: mod_base = OTHER; note = 2'-fluoroadenosine-3'-phosphate
  modified_base 15: mod_base = OTHER; note = 2'-O-methylguanosine-3'-phosphate
  modified_base 16: mod_base = OTHER; note = 2'-fluorocytidine-3'-phosphate
  modified_base 17: mod_base = OTHER; note = 2'-O-methyladenosine-3'-phosphate
  modified_base 18: mod_base = OTHER; note = 2'-O-methyladenosine-3'-phosphate
  modified_base 19: mod_base = OTHER; note = 2'-O-methyladenosine-3'-phosphate
  modified_base 20: mod_base = OTHER; note = 2'-O-methyladenosine-3'-phosphate
  modified_base 21: mod_base = OTHER; note = 2'-O-methylcytidine-3'-phosphorothioate
  modified_base 22: mod_base = OTHER; note = 2'-O-methyladenosine-3'-phosphorothioate
  modified_base 23: mod_base = OTHER; note = 2'-O-methylguanosine
ttcaagttacaaaagcaaaacag

SEQ ID NO: 2028 - RNA, 21 nt, synthetic construct
  source 1..21: mol_type = other RNA
  modified_base 1: mod_base = OTHER; note = 2'-O-methyluridine-3'-phosphorothioate
  modified_base 2: mod_base = OTHER; note = 2'-O-methyluridine-3'-phosphorothioate
  modified_base 3: mod_base = OTHER; note = 2'-O-methyluridine-3'-phosphate
  modified_base 4: mod_base = OTHER; note = 2'-O-methylguanosine-3'-phosphate
  modified_base 5: mod_base = OTHER; note = 2'-O-methylcytidine-3'-phosphate
  modified_base 6: mod_base = OTHER; note = 2'-O-methyluridine-3'-phosphate
  modified_base 7: mod_base = OTHER; note = 2'-fluorouridine-3'-phosphate
  modified_base 8: mod_base = OTHER; note = 2'-O-methyluridine-3'-phosphate
  modified_base 9: mod_base = OTHER; note = 2'-fluorouridine-3'-phosphate
  modified_base 10: mod_base = OTHER; note = 2'-fluoroguanosine-3'-phosphate
  modified_base 11: mod_base = OTHER; note = 2'-fluorouridine-3'-phosphate
  modified_base 12: mod_base = OTHER; note = 2'-O-methyladenosine-3'-phosphate
  modified_base 13: mod_base = OTHER; note = 2'-O-methyladenosine-3'-phosphate
  modified_base 14: mod_base = OTHER; note = 2'-O-methylcytidine-3'-phosphate
  modified_base 15: mod_base = OTHER; note = 2'-O-methyluridine-3'-phosphate
  modified_base 16: mod_base = OTHER; note = 2'-O-methyluridine-3'-phosphate
  modified_base 17: mod_base = OTHER; note = 2'-O-methylguanosine-3'-phosphate
  modified_base 18: mod_base = OTHER; note = 2'-O-methyladenosine-3'-phosphate
  modified_base 19: mod_base = OTHER; note = 2'-O-methyladenosine-3'-phosphate
  modified_base 20: mod_base = OTHER; note = 2'-O-methylguanosine-3'-phosphate
  modified_base 21: mod_base = OTHER; note = 2'-O-methyladenosine
tttgcttttgtaacttgaaga

SEQ ID NO: 2029 - RNA, 23 nt, synthetic construct
  source 1..23: mol_type = other RNA
  modified_base 1: mod_base = OTHER; note = 2'-O-methyluridine-3'-phosphorothioate
  modified_base 2: mod_base = OTHER; note = 2'-fluorocytidine-3'-phosphorothioate
  modified_base 3: mod_base = OTHER; note = 2'-O-methyluridine-3'-phosphate
  modified_base 4: mod_base = OTHER; note = 2'-O-methyluridine-3'-phosphate
  modified_base 5: mod_base = OTHER; note = 2'-O-methylcytidine-3'-phosphate
  modified_base 6: mod_base = OTHER; note = 2'-O-methyladenosine-3'-phosphate
  modified_base 7: mod_base = OTHER; note = 2'-fluoroadenosine-3'-phosphate
  modified_base 8: mod_base = OTHER; note = 2'-O-methylguanosine-3'-phosphate
  modified_base 9: mod_base = OTHER; note = 2'-O-methyluridine-3'-phosphate
  modified_base 10: mod_base = OTHER; note = 2'-O-methyluridine-3'-phosphate
  modified_base 11: mod_base = OTHER; note = 2'-O-methyladenosine-3'-phosphate
  modified_base 12: mod_base = OTHER; note = 2'-fluorocytidine-3'-phosphate
  modified_base 13: mod_base = OTHER; note = 2'-O-methyladenosine-3'-phosphate
  modified_base 14: mod_base = OTHER; note = 2'-fluoroadenosine-3'-phosphate
  modified_base 15: mod_base = OTHER; note = 2'-O-methyladenosine-3'-phosphate
  modified_base 16: mod_base = OTHER; note = 2'-fluoroadenosine-3'-phosphate
  modified_base 17: mod_base = OTHER; note = 2'-O-methylguanosine-3'-phosphate
  modified_base 18: mod_base = OTHER; note = 2'-O-methylcytidine-3'-phosphate
  modified_base 19: mod_base = OTHER; note = 2'-O-methyladenosine-3'-phosphate
  modified_base 20: mod_base = OTHER; note = 2'-O-methyladenosine-3'-phosphate
  modified_base 21: mod_base = OTHER; note = 2'-O-methyladenosine-3'-phosphorothioate
  modified_base 22: mod_base = OTHER; note = 2'-O-methyladenosine-3'-phosphorothioate
  modified_base 23: mod_base = OTHER; note = 2'-O-methylcytidine
tcttcaagttacaaaagcaaaac

SEQ ID NO: 2030 - RNA, 21 nt, synthetic construct
  source 1..21: mol_type = other RNA
  modified_base 1: mod_base = OTHER; note = 2'-O-methyluridine-3'-phosphorothioate
  modified_base 2: mod_base = OTHER; note = 2'-O-methyluridine-3'-phosphorothioate
  modified_base 3: mod_base = OTHER; note = 2'-O-methylguanosine-3'-phosphate
  modified_base 4: mod_base = OTHER; note = 2'-O-methylcytidine-3'-phosphate
  modified_base 5: mod_base = OTHER; note = 2'-O-methyluridine-3'-phosphate
  modified_base 6: mod_base = OTHER; note = 2'-O-methyluridine-3'-phosphate
  modified_base 7: mod_base = OTHER; note = 2'-fluorouridine-3'-phosphate
  modified_base 8: mod_base = OTHER; note = 2'-O-methyluridine-3'-phosphate
  modified_base 9: mod_base = OTHER; note = 2'-fluoroguanosine-3'-phosphate
  modified_base 10: mod_base = OTHER; note = 2'-fluorouridine-3'-phosphate
  modified_base 11: mod_base = OTHER; note = 2'-fluoroadenosine-3'-phosphate
  modified_base 12: mod_base = OTHER; note = 2'-O-methyladenosine-3'-phosphate
  modified_base 13: mod_base = OTHER; note = 2'-O-methylcytidine-3'-phosphate
  modified_base 14: mod_base = OTHER; note = 2'-O-methyluridine-3'-phosphate
  modified_base 15: mod_base = OTHER; note = 2'-O-methyluridine-3'-phosphate
  modified_base 16: mod_base = OTHER; note = 2'-O-methylguanosine-3'-phosphate
  modified_base 17: mod_base = OTHER; note = 2'-O-methyladenosine-3'-phosphate
  modified_base 18: mod_base = OTHER; note = 2'-O-methyladenosine-3'-phosphate
  modified_base 19: mod_base = OTHER; note = 2'-O-methylguanosine-3'-phosphate
  modified_base 20: mod_base = OTHER; note = 2'-O-methyladenosine-3'-phosphate
  modified_base 21: mod_base = OTHER; note = 2'-O-methyluridine
ttgcttttgtaacttgaagat

SEQ ID NO: 2031 - RNA, 23 nt, synthetic construct
  source 1..23: mol_type = other RNA
  modified_base 1: mod_base = OTHER; note = 2'-O-methyladenosine-3'-phosphorothioate
  modified_base 2: mod_base = OTHER; note = 2'-fluorouridine-3'-phosphorothioate
  modified_base 3: mod_base = OTHER; note = 2'-O-methylcytidine-3'-phosphate
  modified_base 4: mod_base = OTHER; note = 2'-O-methyluridine-3'-phosphate
  modified_base 5: mod_base = OTHER; note = 2'-O-methyluridine-3'-phosphate
  modified_base 6: mod_base = OTHER; note = 2'-O-methylcytidine-3'-phosphate
  modified_base 7: mod_base = OTHER; note = 2'-fluoroadenosine-3'-phosphate
  modified_base 8: mod_base = OTHER; note = 2'-O-methyladenosine-3'-phosphate
  modified_base 9: mod_base = OTHER; note = 2'-O-methylguanosine-3'-phosphate
  modified_base 10: mod_base = OTHER; note = 2'-O-methyluridine-3'-phosphate
  modified_base 11: mod_base = OTHER; note = 2'-O-methyluridine-3'-phosphate
  modified_base 12: mod_base = OTHER; note = 2'-fluoroadenosine-3'-phosphate
  modified_base 13: mod_base = OTHER; note = 2'-O-methylcytidine-3'-phosphate
  modified_base 14: mod_base = OTHER; note = 2'-fluoroadenosine-3'-phosphate
  modified_base 15: mod_base = OTHER; note = 2'-O-methyladenosine-3'-phosphate
  modified_base 16: mod_base = OTHER; note = 2'-fluoroadenosine-3'-phosphate
  modified_base 17: mod_base = OTHER; note = 2'-O-methyladenosine-3'-phosphate
  modified_base 18: mod_base = OTHER; note = 2'-O-methylguanosine-3'-phosphate
  modified_base 19: mod_base = OTHER; note = 2'-O-methylcytidine-3'-phosphate
  modified_base 20: mod_base = OTHER; note = 2'-O-methyladenosine-3'-phosphate
  modified_base 21: mod_base = OTHER; note = 2'-O-methyladenosine-3'-phosphorothioate
  modified_base 22: mod_base = OTHER; note = 2'-O-methyladenosine-3'-phosphorothioate
  modified_base 23: mod_base = OTHER; note = 2'-O-methyladenosine
atcttcaagttacaaaagcaaaa

SEQ ID NO: 2032 - RNA, 21 nt, synthetic construct
  source 1..21: mol_type = other RNA
  modified_base 1: mod_base = OTHER; note = 2'-O-methylcytidine-3'-phosphorothioate
  modified_base 2: mod_base = OTHER; note = 2'-O-methyluridine-3'-phosphorothioate
  modified_base 3: mod_base = OTHER; note = 2'-O-methyluridine-3'-phosphate
  modified_base 4: mod_base = OTHER; note = 2'-O-methyluridine-3'-phosphate
  modified_base 5: mod_base = OTHER; note = 2'-O-methyluridine-3'-phosphate
  modified_base 6: mod_base = OTHER; note = 2'-O-methylguanosine-3'-phosphate
  modified_base 7: mod_base = OTHER; note = 2'-fluorouridine-3'-phosphate
  modified_base 8: mod_base = OTHER; note = 2'-O-methyladenosine-3'-phosphate
  modified_base 9: mod_base = OTHER; note = 2'-fluoroadenosine-3'-phosphate
  modified_base 10: mod_base = OTHER; note = 2'-fluorocytidine-3'-phosphate
  modified_base 11: mod_base = OTHER; note = 2'-fluorouridine-3'-phosphate
  modified_base 12: mod_base = OTHER; note = 2'-O-methyluridine-3'-phosphate
  modified_base 13: mod_base = OTHER; note = 2'-O-methylguanosine-3'-phosphate
  modified_base 14: mod_base = OTHER; note = 2'-O-methyladenosine-3'-phosphate
  modified_base 15: mod_base = OTHER; note = 2'-O-methyladenosine-3'-phosphate
  modified_base 16: mod_base = OTHER; note = 2'-O-methylguanosine-3'-phosphate
  modified_base 17: mod_base = OTHER; note = 2'-O-methyladenosine-3'-phosphate
  modified_base 18: mod_base = OTHER; note = 2'-O-methyluridine-3'-phosphate
  modified_base 19: mod_base = OTHER; note = 2'-O-methyladenosine-3'-phosphate
  modified_base 20: mod_base = OTHER; note = 2'-O-methyluridine-3'-phosphate
  modified_base 21: mod_base = OTHER; note = 2'-O-methyluridine
cttttgtaacttgaagatatt

SEQ ID NO: 2033 - RNA, 23 nt, synthetic construct
  source 1..23: mol_type = other RNA
  modified_base 1: mod_base = OTHER; note = 2'-O-methyladenosine-3'-phosphorothioate
  modified_base 2: mod_base = OTHER; note = 2'-fluoroadenosine-3'-phosphorothioate
  modified_base 3: mod_base = OTHER; note = 2'-O-methyluridine-3'-phosphate
  modified_base 4: mod_base = OTHER; note = 2'-O-methyladenosine-3'-phosphate
  modified_base 5: mod_base = OTHER; note = 2'-O-methyluridine-3'-phosphate
  modified_base 6: mod_base = OTHER; note = 2'-O-methylcytidine-3'-phosphate
  modified_base 7: mod_base = OTHER; note = 2'-fluorouridine-3'-phosphate
  modified_base 8: mod_base = OTHER; note = 2'-O-methyluridine-3'-phosphate
  modified_base 9: mod_base = OTHER; note = 2'-O-methylcytidine-3'-phosphate
  modified_base 10: mod_base = OTHER; note = 2'-O-methyladenosine-3'-phosphate
  modified_base 11: mod_base = OTHER; note = 2'-O-methyladenosine-3'-phosphate
  modified_base 12: mod_base = OTHER; note = 2'-fluoroguanosine-3'-phosphate
  modified_base 13: mod_base = OTHER; note = 2'-O-methyluridine-3'-phosphate
  modified_base 14: mod_base = OTHER; note = 2'-fluorouridine-3'-phosphate
  modified_base 15: mod_base = OTHER; note = 2'-O-methyladenosine-3'-phosphate
  modified_base 16: mod_base = OTHER; note = 2'-fluorocytidine-3'-phosphate
  modified_base 17: mod_base = OTHER; note = 2'-O-methyladenosine-3'-phosphate
  modified_base 18: mod_base = OTHER; note = 2'-O-methyladenosine-3'-phosphate
  modified_base 19: mod_base = OTHER; note = 2'-O-methyladenosine-3'-phosphate
  modified_base 20: mod_base = OTHER; note = 2'-O-methyladenosine-3'-phosphate
  modified_base 21: mod_base = OTHER; note = 2'-O-methylguanosine-3'-phosphorothioate
  modified_base 22: mod_base = OTHER; note = 2'-O-methylcytidine-3'-phosphorothioate
  modified_base 23: mod_base = OTHER; note = 2'-O-methyladenosine
aatatcttcaagttacaaaagca

SEQ ID NO: 2034 - RNA, 21 nt, synthetic construct
  source 1..21: mol_type = other RNA
  modified_base 1: mod_base = OTHER; note = 2'-O-methyluridine-3'-phosphorothioate
  modified_base 2: mod_base = OTHER; note = 2'-O-methyluridine-3'-phosphorothioate
  modified_base 3: mod_base = OTHER; note = 2'-O-methyluridine-3'-phosphate
  modified_base 4: mod_base = OTHER; note = 2'-O-methyluridine-3'-phosphate
  modified_base 5: mod_base = OTHER; note = 2'-O-methylguanosine-3'-phosphate
  modified_base 6: mod_base = OTHER; note = 2'-O-methyluridine-3'-phosphate
  modified_base 7: mod_base = OTHER; note = 2'-fluoroadenosine-3'-phosphate
  modified_base 8: mod_base = OTHER; note = 2'-O-methyladenosine-3'-phosphate
  modified_base 9: mod_base = OTHER; note = 2'-fluorocytidine-3'-phosphate
  modified_base 10: mod_base = OTHER; note = 2'-fluorouridine-3'-phosphate
  modified_base 11: mod_base = OTHER; note = 2'-fluorouridine-3'-phosphate
  modified_base 12: mod_base = OTHER; note = 2'-O-methylguanosine-3'-phosphate
  modified_base 13: mod_base = OTHER; note = 2'-O-methyladenosine-3'-phosphate
  modified_base 14: mod_base = OTHER; note = 2'-O-methyladenosine-3'-phosphate
  modified_base 15: mod_base = OTHER; note = 2'-O-methylguanosine-3'-phosphate
  modified_base 16: mod_base = OTHER; note = 2'-O-methyladenosine-3'-phosphate
  modified_base 17: mod_base = OTHER; note = 2'-O-methyluridine-3'-phosphate
  modified_base 18: mod_base = OTHER; note = 2'-O-methyladenosine-3'-phosphate
  modified_base 19: mod_base = OTHER; note = 2'-O-methyluridine-3'-phosphate
  modified_base 20: mod_base = OTHER; note = 2'-O-methyluridine-3'-phosphate
  modified_base 21: mod_base = OTHER; note = 2'-O-methyluridine
ttttgtaacttgaagatattt

SEQ ID NO: 2035 - RNA, 23 nt, synthetic construct
  source 1..23: mol_type = other RNA
  modified_base 1: mod_base = OTHER; note = 2'-O-methyladenosine-3'-phosphorothioate
  modified_base 2: mod_base = OTHER; note = 2'-fluoroadenosine-3'-phosphorothioate
  modified_base 3: mod_base = OTHER; note = 2'-O-methyladenosine-3'-phosphate
  modified_base 4: mod_base = OTHER; note = 2'-O-methyluridine-3'-phosphate
  modified_base 5: mod_base = OTHER; note = 2'-O-methyladenosine-3'-phosphate
  modified_base 6: mod_base = OTHER; note = 2'-O-methyluridine-3'-phosphate
  modified_base 7: mod_base = OTHER; note = 2'-fluorocytidine-3'-phosphate
  modified_base 8: mod_base = OTHER; note = 2'-O-methyluridine-3'-phosphate
  modified_base 9: mod_base = OTHER; note = 2'-O-methyluridine-3'-phosphate
  modified_base 10: mod_base = OTHER; note = 2'-O-methylcytidine-3'-phosphate
  modified_base 11: mod_base = OTHER; note = 2'-O-methyladenosine-3'-phosphate
  modified_base 12: mod_base = OTHER; note = 2'-fluoroadenosine-3'-phosphate
  modified_base 13: mod_base = OTHER; note = 2'-O-methylguanosine-3'-phosphate
  modified_base 14: mod_base = OTHER; note = 2'-fluorouridine-3'-phosphate
  modified_base 15: mod_base = OTHER; note = 2'-O-methyluridine-3'-phosphate
  modified_base 16: mod_base = OTHER; note = 2'-fluoroadenosine-3'-phosphate
  modified_base 17: mod_base = OTHER; note = 2'-O-methylcytidine-3'-phosphate
  modified_base 18: mod_base = OTHER; note = 2'-O-methyladenosine-3'-phosphate
  modified_base 19: mod_base = OTHER; note = 2'-O-methyladenosine-3'-phosphate
  modified_base 20: mod_base = OTHER; note = 2'-O-methyladenosine-3'-phosphate
  modified_base 21: mod_base = OTHER; note = 2'-O-methyladenosine-3'-phosphorothioate
  modified_base 22: mod_base = OTHER; note = 2'-O-methylguanosine-3'-phosphorothioate
  modified_base 23: mod_base = OTHER; note = 2'-O-methylcytidine
aaatatcttcaagttacaaaagc

SEQ ID NO: 2036 - RNA, 21 nt, synthetic construct
  source 1..21: mol_type = other RNA
  modified_base 1: mod_base = OTHER; note = 2'-O-methyluridine-3'-phosphorothioate
  modified_base 2: mod_base = OTHER; note = 2'-O-methyluridine-3'-phosphorothioate
  modified_base 3: mod_base = OTHER; note = 2'-O-methyluridine-3'-phosphate
  modified_base 4: mod_base = OTHER; note = 2'-O-methylguanosine-3'-phosphate
  modified_base 5: mod_base = OTHER; note = 2'-O-methyluridine-3'-phosphate
  modified_base 6: mod_base = OTHER; note = 2'-O-methyladenosine-3'-phosphate
  modified_base 7: mod_base = OTHER; note = 2'-fluoroadenosine-3'-phosphate
  modified_base 8: mod_base = OTHER; note = 2'-O-methylcytidine-3'-phosphate
  modified_base 9: mod_base = OTHER; note = 2'-fluorouridine-3'-phosphate
  modified_base 10: mod_base = OTHER; note = 2'-fluorouridine-3'-phosphate
  modified_base 11: mod_base = OTHER; note = 2'-fluoroguanosine-3'-phosphate
  modified_base 12: mod_base = OTHER; note = 2'-O-methyladenosine-3'-phosphate
  modified_base 13: mod_base = OTHER; note = 2'-O-methyladenosine-3'-phosphate
  modified_base 14: mod_base = OTHER; note = 2'-O-methylguanosine-3'-phosphate
  modified_base 15: mod_base = OTHER; note = 2'-O-methyladenosine-3'-phosphate
  modified_base 16: mod_base = OTHER; note = 2'-O-methyluridine-3'-phosphate
  modified_base 17: mod_base = OTHER; note = 2'-O-methyladenosine-3'-phosphate
  modified_base 18: mod_base = OTHER; note = 2'-O-methyluridine-3'-phosphate
  modified_base 19: mod_base = OTHER; note = 2'-O-methyluridine-3'-phosphate
  modified_base 20: mod_base = OTHER; note = 2'-O-methyluridine-3'-phosphate
  modified_base 21: mod_base = OTHER; note = 2'-O-methyladenosine
tttgtaacttgaagatattta

SEQ ID NO: 2037 - RNA, 23 nt, synthetic construct
  source 1..23: mol_type = other RNA
  modified_base 1: mod_base = OTHER; note = 2'-O-methyluridine-3'-phosphorothioate
  modified_base 2: mod_base = OTHER; note = 2'-fluoroadenosine-3'-phosphorothioate
  modified_base 3: mod_base = OTHER; note = 2'-O-methyladenosine-3'-phosphate
  modified_base 4: mod_base = OTHER; note = 2'-O-methyladenosine-3'-phosphate
  modified_base 5: mod_base = OTHER; note = 2'-O-methyluridine-3'-phosphate
  modified_base 6: mod_base = OTHER; note = 2'-O-methyladenosine-3'-phosphate
  modified_base 7: mod_base = OTHER; note = 2'-fluorouridine-3'-phosphate
  modified_base 8: mod_base = OTHER; note = 2'-O-methylcytidine-3'-phosphate
  modified_base 9: mod_base = OTHER; note = 2'-O-methyluridine-3'-phosphate
  modified_base 10: mod_base = OTHER; note = 2'-O-methyluridine-3'-phosphate
  modified_base 11: mod_base = OTHER; note = 2'-O-methylcytidine-3'-phosphate
  modified_base 12: mod_base = OTHER; note = 2'-fluoroadenosine-3'-phosphate
  modified_base 13: mod_base = OTHER; note = 2'-O-methyladenosine-3'-phosphate
  modified_base 14: mod_base = OTHER; note = 2'-fluoroguanosine-3'-phosphate
  modified_base 15: mod_base = OTHER; note = 2'-O-methyluridine-3'-phosphate
  modified_base 16: mod_base = OTHER; note = 2'-fluorouridine-3'-phosphate
  modified_base 17: mod_base = OTHER; note = 2'-O-methyladenosine-3'-phosphate
  modified_base 18: mod_base = OTHER; note = 2'-O-methylcytidine-3'-phosphate
  modified_base 19: mod_base = OTHER; note = 2'-O-methyladenosine-3'-phosphate
  modified_base 20: mod_base = OTHER; note = 2'-O-methyladenosine-3'-phosphate
  modified_base 21: mod_base = OTHER; note = 2'-O-methyladenosine-3'-phosphorothioate
  modified_base 22: mod_base = OTHER; note = 2'-O-methyladenosine-3'-phosphorothioate
  modified_base 23: mod_base = OTHER; note = 2'-O-methylguanosine
taaatatcttcaagttacaaaag

SEQ ID NO: 2038 - RNA, 21 nt, synthetic construct
  source 1..21: mol_type = other RNA
  modified_base 1: mod_base = OTHER; note = 2'-O-methyluridine-3'-phosphorothioate
  modified_base 2: mod_base = OTHER; note = 2'-O-methyladenosine-3'-phosphorothioate
  modified_base 3: mod_base = OTHER; note = 2'-O-methyladenosine-3'-phosphate
  modified_base 4: mod_base = OTHER; note = 2'-O-methylcytidine-3'-phosphate
  modified_base 5: mod_base = OTHER; note = 2'-O-methyluridine-3'-phosphate
  modified_base 6: mod_base = OTHER; note = 2'-O-methyluridine-3'-phosphate
  modified_base 7: mod_base = OTHER; note = 2'-fluoroguanosine-3'-phosphate
  modified_base 8: mod_base = OTHER; note = 2'-O-methyladenosine-3'-phosphate
  modified_base 9: mod_base = OTHER; note = 2'-fluoroadenosine-3'-phosphate
  modified_base 10: mod_base = OTHER; note = 2'-fluoroguanosine-3'-phosphate
  modified_base 11: mod_base = OTHER; note = 2'-fluoroadenosine-3'-phosphate
  modified_base 12: mod_base = OTHER; note = 2'-O-methyluridine-3'-phosphate
  modified_base 13: mod_base = OTHER; note = 2'-O-methyladenosine-3'-phosphate
  modified_base 14: mod_base = OTHER; note = 2'-O-methyluridine-3'-phosphate
  modified_base 15: mod_base = OTHER; note = 2'-O-methyluridine-3'-phosphate
  modified_base 16: mod_base = OTHER; note = 2'-O-methyluridine-3'-phosphate
  modified_base 17: mod_base = OTHER; note = 2'-O-methyladenosine-3'-phosphate
  modified_base 18: mod_base = OTHER; note = 2'-O-methyluridine-3'-phosphate
  modified_base 19: mod_base = OTHER; note = 2'-O-methyluridine-3'-phosphate
  modified_base 20: mod_base = OTHER; note = 2'-O-methylcytidine-3'-phosphate
  modified_base 21: mod_base = OTHER; note = 2'-O-methyluridine
taacttgaagatatttattct

SEQ ID NO: 2039 - RNA, 23 nt, synthetic construct
  source 1..23: mol_type = other RNA
  modified_base 1: mod_base = OTHER; note = 2'-O-methyladenosine-3'-phosphorothioate
  modified_base 2: mod_base = OTHER; note = 2'-fluoroguanosine-3'-phosphorothioate
  modified_base 3: mod_base = OTHER; note = 2'-O-methyladenosine-3'-phosphate
  modified_base 4: mod_base = OTHER; note = 2'-O-methyladenosine-3'-phosphate
  modified_base 5: mod_base = OTHER; note = 2'-O-methyluridine-3'-phosphate
  modified_base 6: mod_base = OTHER; note = 2'-O-methyladenosine-3'-phosphate
  modified_base 7: mod_base = OTHER; note = 2'-fluoroadenosine-3'-phosphate
  modified_base 8: mod_base = OTHER; note = 2'-O-methyladenosine-3'-phosphate
  modified_base 9: mod_base = OTHER; note = 2'-O-methyluridine-3'-phosphate
  modified_base 10: mod_base = OTHER; note = 2'-O-methyladenosine-3'-phosphate
  modified_base 11: mod_base = OTHER; note = 2'-O-methyluridine-3'-phosphate
  modified_base 12: mod_base = OTHER; note = 2'-fluorocytidine-3'-phosphate
  modified_base 13: mod_base = OTHER; note = 2'-O-methyluridine-3'-phosphate
  modified_base 14: mod_base = OTHER; note = 2'-fluorouridine-3'-phosphate
  modified_base 15: mod_base = OTHER; note = 2'-O-methylcytidine-3'-phosphate
  modified_base 16: mod_base = OTHER; note = 2'-fluoroadenosine-3'-phosphate
  modified_base 17: mod_base = OTHER; note = 2'-O-methyladenosine-3'-phosphate
  modified_base 18: mod_base = OTHER; note = 2'-O-methylguanosine-3'-phosphate
  modified_base 19: mod_base = OTHER; note = 2'-O-methyluridine-3'-phosphate
  modified_base 20: mod_base = OTHER; note = 2'-O-methyluridine-3'-phosphate
  modified_base 21: mod_base = OTHER; note = 2'-O-methyladenosine-3'-phosphorothioate
  modified_base 22: mod_base = OTHER; note = 2'-O-methylcytidine-3'-phosphorothioate
  modified_base 23: mod_base = OTHER; note = 2'-O-methyladenosine
agaataaatatcttcaagttaca

SEQ ID NO: 2040 - RNA, 21 nt, synthetic construct
  source 1..21: mol_type = other RNA
  modified_base 1: mod_base = OTHER; note = 2'-O-methyladenosine-3'-phosphorothioate
  modified_base 2: mod_base = OTHER; note = 2'-O-methyladenosine-3'-phosphorothioate
  modified_base 3: mod_base = OTHER; note = 2'-O-methylcytidine-3'-phosphate
  modified_base 4: mod_base = OTHER; note = 2'-O-methyluridine-3'-phosphate
  modified_base 5: mod_base = OTHER; note = 2'-O-methyluridine-3'-phosphate
  modified_base 6: mod_base = OTHER; note = 2'-O-methylguanosine-3'-phosphate
  modified_base 7: mod_base = OTHER; note = 2'-fluoroadenosine-3'-phosphate
  modified_base 8: mod_base = OTHER; note = 2'-O-methyladenosine-3'-phosphate
  modified_base 9: mod_base = OTHER; note = 2'-fluoroguanosine-3'-phosphate
  modified_base 10: mod_base = OTHER; note = 2'-fluoroadenosine-3'-phosphate
  modified_base 11: mod_base = OTHER; note = 2'-fluorouridine-3'-phosphate
  modified_base 12: mod_base = OTHER; note = 2'-O-methyladenosine-3'-phosphate
  modified_base 13: mod_base = OTHER; note = 2'-O-methyluridine-3'-phosphate
  modified_base 14: mod_base = OTHER; note = 2'-O-methyluridine-3'-phosphate
  modified_base 15: mod_base = OTHER; note = 2'-O-methyluridine-3'-phosphate
  modified_base 16: mod_base = OTHER; note = 2'-O-methyladenosine-3'-phosphate
  modified_base 17: mod_base = OTHER; note = 2'-O-methyluridine-3'-phosphate
  modified_base 18: mod_base = OTHER; note = 2'-O-methyluridine-3'-phosphate
  modified_base 19: mod_base = OTHER; note = 2'-O-methylcytidine-3'-phosphate
  modified_base 20: mod_base = OTHER; note = 2'-O-methyluridine-3'-phosphate
  modified_base 21: mod_base = OTHER; note = 2'-O-methylguanosine
aacttgaagatatttattctg

SEQ ID NO: 2041 - RNA, 23 nt, synthetic construct
  source 1..23: mol_type = other RNA
  modified_base 1: mod_base = OTHER; note = 2'-O-methylcytidine-3'-phosphorothioate
  modified_base 2: mod_base = OTHER; note = 2'-fluoroadenosine-3'-phosphorothioate
  modified_base 3: mod_base = OTHER; note = 2'-O-methylguanosine-3'-phosphate
  modified_base 4: mod_base = OTHER; note = 2'-O-methyladenosine-3'-phosphate
  modified_base 5: mod_base = OTHER; note = 2'-O-methyladenosine-3'-phosphate
  modified_base 6: mod_base = OTHER; note = 2'-O-methyluridine-3'-phosphate
  modified_base 7: mod_base = OTHER; note = 2'-fluoroadenosine-3'-phosphate
  modified_base 8: mod_base = OTHER; note = 2'-O-methyladenosine-3'-phosphate
  modified_base 9: mod_base = OTHER; note = 2'-O-methyladenosine-3'-phosphate
  modified_base 10: mod_base = OTHER; note = 2'-O-methyluridine-3'-phosphate
  modified_base 11: mod_base = OTHER; note = 2'-O-methyladenosine-3'-phosphate
  modified_base 12: mod_base = OTHER; note = 2'-fluorouridine-3'-phosphate
  modified_base 13: mod_base = OTHER; note = 2'-O-methylcytidine-3'-phosphate
  modified_base 14: mod_base = OTHER; note = 2'-fluorouridine-3'-phosphate
  modified_base 15: mod_base = OTHER; note = 2'-O-methyluridine-3'-phosphate
  modified_base 16: mod_base = OTHER; note = 2'-fluorocytidine-3'-phosphate
  modified_base 17: mod_base = OTHER; note = 2'-O-methyladenosine-3'-phosphate
  modified_base 18: mod_base = OTHER; note = 2'-O-methyladenosine-3'-phosphate
  modified_base 19: mod_base = OTHER; note = 2'-O-methylguanosine-3'-phosphate
  modified_base 20: mod_base = OTHER; note = 2'-O-methyluridine-3'-phosphate
  modified_base 21: mod_base = OTHER; note = 2'-O-methyluridine-3'-phosphorothioate
  modified_base 22: mod_base = OTHER; note = 2'-O-methyladenosine-3'-phosphorothioate
  modified_base 23: mod_base = OTHER; note = 2'-O-methylcytidine
cagaataaatatcttcaagttac

SEQ ID NO: 2042 - RNA, 21 nt, synthetic construct
  source 1..21: mol_type = other RNA
  modified_base 1: mod_base = OTHER; note = 2'-O-methyladenosine-3'-phosphorothioate
  modified_base 2: mod_base = OTHER; note = 2'-O-methyladenosine-3'-phosphorothioate
  modified_base 3: mod_base = OTHER; note = 2'-O-methylguanosine-3'-phosphate
  modified_base 4: mod_base = OTHER; note = 2'-O-methyladenosine-3'-phosphate
  modified_base 5: mod_base = OTHER; note = 2'-O-methyluridine-3'-phosphate
  modified_base 6: mod_base = OTHER; note = 2'-O-methyladenosine-3'-phosphate
  modified_base 7: mod_base = OTHER; note = 2'-fluorouridine-3'-phosphate
  modified_base 8: mod_base = OTHER; note = 2'-O-methyluridine-3'-phosphate
  modified_base 9: mod_base = OTHER; note = 2'-fluorouridine-3'-phosphate
  modified_base 10: mod_base = OTHER; note = 2'-fluoroadenosine-3'-phosphate
  modified_base 11: mod_base = OTHER; note = 2'-fluorouridine-3'-phosphate
  modified_base 12: mod_base = OTHER; note = 2'-O-methyluridine-3'-phosphate
  modified_base 13: mod_base = OTHER; note = 2'-O-methylcytidine-3'-phosphate
  modified_base 14: mod_base = OTHER; note = 2'-O-methyluridine-3'-phosphate
  modified_base 15: mod_base = OTHER; note = 2'-O-methylguanosine-3'-phosphate
  modified_base 16: mod_base = OTHER; note = 2'-O-methylguanosine-3'-phosphate
  modified_base 17: mod_base = OTHER; note = 2'-O-methylguanosine-3'-phosphate
  modified_base 18: mod_base = OTHER; note = 2'-O-methyluridine-3'-phosphate
  modified_base 19: mod_base = OTHER; note = 2'-O-methyluridine-3'-phosphate
  modified_base 20: mod_base = OTHER; note = 2'-O-methyluridine-3'-phosphate
  modified_base 21: mod_base = OTHER; note = 2'-O-methyluridine
aagatatttattctgggtttt

SEQ ID NO: 2043 - RNA, 23 nt, synthetic construct
  source 1..23: mol_type = other RNA
  modified_base 1: mod_base = OTHER; note = 2'-O-methyladenosine-3'-phosphorothioate
  modified_base 2: mod_base = OTHER; note = 2'-fluoroadenosine-3'-phosphorothioate
  modified_base 3: mod_base = OTHER; note = 2'-O-methyladenosine-3'-phosphate
  modified_base 4: mod_base = OTHER; note = 2'-O-methyladenosine-3'-phosphate
  modified_base 5: mod_base = OTHER; note = 2'-O-methylcytidine-3'-phosphate
  modified_base 6: mod_base = OTHER; note = 2'-O-methylcytidine-3'-phosphate
  modified_base 7: mod_base = OTHER; note = 2'-fluorocytidine-3'-phosphate
  modified_base 8: mod_base = OTHER; note = 2'-O-methyladenosine-3'-phosphate
  modified_base 9: mod_base = OTHER; note = 2'-O-methylguanosine-3'-phosphate
  modified_base 10: mod_base = OTHER; note = 2'-O-methyladenosine-3'-phosphate
  modified_base 11: mod_base = OTHER; note = 2'-O-methyladenosine-3'-phosphate
  modified_base 12: mod_base = OTHER; note = 2'-fluorouridine-3'-phosphate
  modified_base 13: mod_base = OTHER; note = 2'-O-methyladenosine-3'-phosphate
  modified_base 14: mod_base = OTHER; note = 2'-fluoroadenosine-3'-phosphate
  modified_base 15: mod_base = OTHER; note = 2'-O-methyladenosine-3'-phosphate
  modified_base 16: mod_base = OTHER; note = 2'-fluorouridine-3'-phosphate
  modified_base 17: mod_base = OTHER; note = 2'-O-methyladenosine-3'-phosphate
  modified_base 18: mod_base = OTHER; note = 2'-O-methyluridine-3'-phosphate
  modified_base 19: mod_base = OTHER; note = 2'-O-methylcytidine-3'-phosphate
  modified_base 20: mod_base = OTHER; note = 2'-O-methyluridine-3'-phosphate
  modified_base 21: mod_base = OTHER; note = 2'-O-methyluridine-3'-phosphorothioate
  modified_base 22: mod_base = OTHER; note = 2'-O-methylcytidine-3'-phosphorothioate
  modified_base 23: mod_base = OTHER; note = 2'-O-methyladenosine
aaaacccagaataaatatcttca

SEQ ID NO: 2044 - RNA, 21 nt, synthetic construct
  source 1..21: mol_type = other RNA
  modified_base 1: mod_base = OTHER; note = 2'-O-methyladenosine-3'-phosphorothioate
  modified_base 2: mod_base = OTHER; note = 2'-O-methylguanosine-3'-phosphorothioate
  modified_base 3: mod_base = OTHER; note = 2'-O-methyladenosine-3'-phosphate
  modified_base 4: mod_base = OTHER; note = 2'-O-methyluridine-3'-phosphate
  modified_base 5: mod_base = OTHER; note = 2'-O-methyladenosine-3'-phosphate
  modified_base 6: mod_base = OTHER; note = 2'-O-methyluridine-3'-phosphate
  modified_base 7: mod_base = OTHER; note = 2'-fluorouridine-3'-phosphate
  modified_base 8: mod_base = OTHER; note = 2'-O-methyluridine-3'-phosphate
  modified_base 9: mod_base = OTHER; note = 2'-fluoroadenosine-3'-phosphate
  modified_base 10: mod_base = OTHER; note = 2'-fluorouridine-3'-phosphate
  modified_base 11: mod_base = OTHER; note = 2'-fluorouridine-3'-phosphate
  modified_base 12: mod_base = OTHER; note = 2'-O-methylcytidine-3'-phosphate
  modified_base 13: mod_base = OTHER; note = 2'-O-methyluridine-3'-phosphate
  modified_base 14: mod_base = OTHER; note = 2'-O-methylguanosine-3'-phosphate
  modified_base 15: mod_base = OTHER; note = 2'-O-methylguanosine-3'-phosphate
  modified_base 16: mod_base = OTHER; note = 2'-O-methylguanosine-3'-phosphate
  modified_base 17: mod_base = OTHER; note = 2'-O-methyluridine-3'-phosphate
  modified_base 18: mod_base = OTHER; note = 2'-O-methyluridine-3'-phosphate
  modified_base 19: mod_base = OTHER; note = 2'-O-methyluridine-3'-phosphate
  modified_base 20: mod_base = OTHER; note = 2'-O-methyluridine-3'-phosphate
  modified_base 21: mod_base = OTHER; note = 2'-O-methylguanosine
agatatttattctgggttttg

SEQ ID NO: 2045 - RNA, 23 nt, synthetic construct
  source 1..23: mol_type = other RNA
  modified_base 1: mod_base = OTHER; note = 2'-O-methylcytidine-3'-phosphorothioate
  modified_base 2: mod_base = OTHER; note = 2'-fluoroadenosine-3'-phosphorothioate
  modified_base 3: mod_base = OTHER; note = 2'-O-methyladenosine-3'-phosphate
  modified_base 4: mod_base = OTHER; note = 2'-O-methyladenosine-3'-phosphate
  modified_base 5: mod_base = OTHER; note = 2'-O-methyladenosine-3'-phosphate
  modified_base 6: mod_base = OTHER; note = 2'-O-methylcytidine-3'-phosphate
  modified_base 7: mod_base = OTHER; note = 2'-fluorocytidine-3'-phosphate
  modified_base 8: mod_base = OTHER; note = 2'-O-methylcytidine-3'-phosphate
  modified_base 9: mod_base = OTHER; note = 2'-O-methyladenosine-3'-phosphate
  modified_base 10: mod_base = OTHER; note = 2'-O-methylguanosine-3'-phosphate
  modified_base 11: mod_base = OTHER; note = 2'-O-methyladenosine-3'-phosphate
  modified_base 12: mod_base = OTHER; note = 2'-fluoroadenosine-3'-phosphate
  modified_base 13: mod_base = OTHER; note = 2'-O-methyluridine-3'-phosphate
  modified_base 14: mod_base = OTHER; note = 2'-fluoroadenosine-3'-phosphate
  modified_base 15: mod_base = OTHER; note = 2'-O-methyladenosine-3'-phosphate
  modified_base 16: mod_base = OTHER; note = 2'-fluoroadenosine-3'-phosphate
  modified_base 17: mod_base = OTHER; note = 2'-O-methyluridine-3'-phosphate
  modified_base 18: mod_base = OTHER; note = 2'-O-methyladenosine-3'-phosphate
  modified_base 19: mod_base = OTHER; note = 2'-O-methyluridine-3'-phosphate
  modified_base 20: mod_base = OTHER; note = 2'-O-methylcytidine-3'-phosphate
  modified_base 21: mod_base = OTHER; note = 2'-O-methyluridine-3'-phosphorothioate
  modified_base 22: mod_base = OTHER; note = 2'-O-methyluridine-3'-phosphorothioate
  modified_base 23: mod_base = OTHER; note = 2'-O-methylcytidine
caaaacccagaataaatatcttc

SEQ ID NO: 2046 - RNA, 21 nt, synthetic construct
  source 1..21: mol_type = other RNA
  modified_base 1: mod_base = OTHER; note = 2'-O-methyladenosine-3'-phosphorothioate
  modified_base 2: mod_base = OTHER; note = 2'-O-methyluridine-3'-phosphorothioate
  modified_base 3: mod_base = OTHER; note = 2'-O-methyladenosine-3'-phosphate
  modified_base 4: mod_base = OTHER; note = 2'-O-methyluridine-3'-phosphate
  modified_base 5: mod_base = OTHER; note = 2'-O-methyluridine-3'-phosphate
  modified_base 6: mod_base = OTHER; note = 2'-O-methyluridine-3'-phosphate
  modified_base 7: mod_base = OTHER; note = 2'-fluoroadenosine-3'-phosphate
  modified_base 8: mod_base = OTHER; note = 2'-O-methyluridine-3'-phosphate
  modified_base 9: mod_base = OTHER; note = 2'-fluorouridine-3'-phosphate
  modified_base 10: mod_base = OTHER; note = 2'-fluorocytidine-3'-phosphate
  modified_base 11: mod_base = OTHER; note = 2'-fluorouridine-3'-phosphate
  modified_base 12: mod_base = OTHER; note = 2'-O-methylguanosine-3'-phosphate
  modified_base 13: mod_base = OTHER; note = 2'-O-methylguanosine-3'-phosphate
  modified_base 14: mod_base = OTHER; note = 2'-O-methylguanosine-3'-phosphate
  modified_base 15: mod_base = OTHER; note = 2'-O-methyluridine-3'-phosphate
  modified_base 16: mod_base = OTHER; note = 2'-O-methyluridine-3'-phosphate
  modified_base 17: mod_base = OTHER; note = 2'-O-methyluridine-3'-phosphate
  modified_base 18: mod_base = OTHER; note = 2'-O-methyluridine-3'-phosphate
  modified_base 19: mod_base = OTHER; note = 2'-O-methylguanosine-3'-phosphate
  modified_base 20: mod_base = OTHER; note = 2'-O-methyluridine-3'-phosphate
  modified_base 21: mod_base = OTHER; note = 2'-O-methyladenosine
atatttattctgggttttgta

SEQ ID NO: 2047 - RNA, 23 nt, synthetic construct
  source 1..23: mol_type = other RNA
  modified_base 1: mod_base = OTHER; note = 2'-O-methyluridine-3'-phosphorothioate
  modified_base 2: mod_base = OTHER; note = 2'-fluoroadenosine-3'-phosphorothioate
  modified_base 3: mod_base = OTHER; note = 2'-O-methylcytidine-3'-phosphate
  modified_base 4: mod_base = OTHER; note = 2'-O-methyladenosine-3'-phosphate
  modified_base 5: mod_base = OTHER; note = 2'-O-methyladenosine-3'-phosphate
  modified_base 6: mod_base = OTHER; note = 2'-O-methyladenosine-3'-phosphate
  modified_base 7: mod_base = OTHER; note = 2'-fluoroadenosine-3'-phosphate
  modified_base 8: mod_base = OTHER; note = 2'-O-methylcytidine-3'-phosphate
  modified_base 9: mod_base = OTHER; note = 2'-O-methylcytidine-3'-phosphate
  modified_base 10: mod_base = OTHER; note = 2'-O-methylcytidine-3'-phosphate
  modified_base 11: mod_base = OTHER; note = 2'-O-methyladenosine-3'-phosphate
  modified_base 12: mod_base = OTHER; note = 2'-fluoroguanosine-3'-phosphate
  modified_base 13: mod_base = OTHER; note = 2'-O-methyladenosine-3'-phosphate
  modified_base 14: mod_base = OTHER; note = 2'-fluoroadenosine-3'-phosphate
  modified_base 15: mod_base = OTHER; note = 2'-O-methyluridine-3'-phosphate
  modified_base 16: mod_base = OTHER; note = 2'-fluoroadenosine-3'-phosphate
  modified_base 17: mod_base = OTHER; note = 2'-O-methyladenosine-3'-phosphate
  modified_base 18: mod_base = OTHER; note = 2'-O-methyladenosine-3'-phosphate
  modified_base 19: mod_base = OTHER; note = 2'-O-methyluridine-3'-phosphate
  modified_base 20: mod_base = OTHER; note = 2'-O-methyladenosine-3'-phosphate
  modified_base 21: mod_base = OTHER; note = 2'-O-methyluridine-3'-phosphorothioate
  modified_base 22: mod_base = OTHER; note = 2'-O-methylcytidine-3'-phosphorothioate
  modified_base 23: mod_base = OTHER; note = 2'-O-methyluridine
tacaaaacccagaataaatatct

SEQ ID NO: 2048 - RNA, 21 nt, synthetic construct
  source 1..21: mol_type = other RNA
  modified_base 1: mod_base = OTHER; note = 2'-O-methyluridine-3'-phosphorothioate
  modified_base 2: mod_base = OTHER; note = 2'-O-methyladenosine-3'-phosphorothioate
  modified_base 3: mod_base = OTHER; note = 2'-O-methyluridine-3'-phosphate
  modified_base 4: mod_base = OTHER; note = 2'-O-methyluridine-3'-phosphate
  modified_base 5: mod_base = OTHER; note = 2'-O-methyluridine-3'-phosphate
  modified_base 6: mod_base = OTHER; note = 2'-O-methyladenosine-3'-phosphate
  modified_base 7: mod_base = OTHER; note = 2'-fluorouridine-3'-phosphate
  modified_base 8: mod_base = OTHER; note = 2'-O-methyluridine-3'-phosphate
  modified_base 9: mod_base = OTHER; note = 2'-fluorocytidine-3'-phosphate
  modified_base 10: mod_base = OTHER; note = 2'-fluorouridine-3'-phosphate
  modified_base 11: mod_base = OTHER; note = 2'-fluoroguanosine-3'-phosphate
  modified_base 12: mod_base = OTHER; note = 2'-O-methylguanosine-3'-phosphate
  modified_base 13: mod_base = OTHER; note = 2'-O-methylguanosine-3'-phosphate
  modified_base 14: mod_base = OTHER; note = 2'-O-methyluridine-3'-phosphate
  modified_base 15: mod_base = OTHER; note = 2'-O-methyluridine-3'-phosphate
  modified_base 16: mod_base = OTHER; note = 2'-O-methyluridine-3'-phosphate
  modified_base 17: mod_base = OTHER; note = 2'-O-methyluridine-3'-phosphate
  modified_base 18: mod_base = OTHER; note = 2'-O-methylguanosine-3'-phosphate
  modified_base 19: mod_base = OTHER; note = 2'-O-methyluridine-3'-phosphate
  modified_base 20: mod_base = OTHER; note = 2'-O-methyladenosine-3'-phosphate
  modified_base 21: mod_base = OTHER; note = 2'-O-methylguanosine
tatttattctgggttttgtag

SEQ ID NO: 2049 - RNA, 23 nt, synthetic construct
  source 1..23: mol_type = other RNA
  modified_base 1: mod_base = OTHER; note = 2'-O-methylcytidine-3'-phosphorothioate
  modified_base 2: mod_base = OTHER; note = 2'-fluorouridine-3'-phosphorothioate
  modified_base 3: mod_base = OTHER; note = 2'-O-methyladenosine-3'-phosphate
  modified_base 4: mod_base = OTHER; note = 2'-O-methylcytidine-3'-phosphate
  modified_base 5: mod_base = OTHER; note = 2'-O-methyladenosine-3'-phosphate
  modified_base 6: mod_base = OTHER; note = 2'-O-methyladenosine-3'-phosphate
  modified_base 7: mod_base = OTHER; note = 2'-fluoroadenosine-3'-phosphate
  modified_base 8: mod_base = OTHER; note = 2'-O-methyladenosine-3'-phosphate
  modified_base 9: mod_base = OTHER; note = 2'-O-methylcytidine-3'-phosphate
  modified_base 10: mod_base = OTHER; note = 2'-O-methylcytidine-3'-phosphate
  modified_base 11: mod_base = OTHER; note = 2'-O-methylcytidine-3'-phosphate
  modified_base 12: mod_base = OTHER; note = 2'-fluoroadenosine-3'-phosphate
  modified_base 13: mod_base = OTHER; note = 2'-O-methylguanosine-3'-phosphate
  modified_base 14: mod_base = OTHER; note = 2'-fluoroadenosine-3'-phosphate
  modified_base 15: mod_base = OTHER; note = 2'-O-methyladenosine-3'-phosphate
  modified_base 16: mod_base = OTHER; note = 2'-fluorouridine-3'-phosphate
  modified_base 17: mod_base = OTHER; note = 2'-O-methyladenosine-3'-phosphate
  modified_base 18: mod_base = OTHER; note = 2'-O-methyladenosine-3'-phosphate
  modified_base 19: mod_base = OTHER; note = 2'-O-methyladenosine-3'-phosphate
  modified_base 20: mod_base = OTHER; note = 2'-O-methyluridine-3'-phosphate
  modified_base 21: mod_base = OTHER; note = 2'-O-methyladenosine-3'-phosphorothioate
  modified_base 22: mod_base = OTHER; note = 2'-O-methyluridine-3'-phosphorothioate
  modified_base 23: mod_base = OTHER; note = 2'-O-methylcytidine
ctacaaaacccagaataaatatc

SEQ ID NO: 2050 - RNA, 21 nt, synthetic construct
  source 1..21: mol_type = other RNA
  modified_base 1: mod_base = OTHER; note = 2'-O-methyluridine-3'-phosphorothioate
  modified_base 2: mod_base = OTHER; note = 2'-O-methyluridine-3'-phosphorothioate
  modified_base 3: mod_base = OTHER; note = 2'-O-methylcytidine-3'-phosphate
  modified_base 4: mod_base = OTHER; note = 2'-O-methyluridine-3'-phosphate
  modified_base 5: mod_base = OTHER; note = 2'-O-methylguanosine-3'-phosphate
  modified_base 6: mod_base = OTHER; note = 2'-O-methylguanosine-3'-phosphate
  modified_base 7: mod_base = OTHER; note = 2'-fluoroguanosine-3'-phosphate
  modified_base 8: mod_base = OTHER; note = 2'-O-methyluridine-3'-phosphate
  modified_base 9: mod_base = OTHER; note = 2'-fluorouridine-3'-phosphate
  modified_base 10: mod_base = OTHER; note = 2'-fluorouridine-3'-phosphate
  modified_base 11: mod_base = OTHER; note = 2'-fluorouridine-3'-phosphate
  modified_base 12: mod_base = OTHER; note = 2'-O-methylguanosine-3'-phosphate
  modified_base 13: mod_base = OTHER; note = 2'-O-methyluridine-3'-phosphate
  modified_base 14: mod_base = OTHER; note = 2'-O-methyladenosine-3'-phosphate
  modified_base 15: mod_base = OTHER; note = 2'-O-methylguanosine-3'-phosphate
  modified_base 16: mod_base = OTHER; note = 2'-O-methylcytidine-3'-phosphate
  modified_base 17: mod_base = OTHER; note = 2'-O-methyladenosine-3'-phosphate
  modified_base 18: mod_base = OTHER; note = 2'-O-methyluridine-3'-phosphate
  modified_base 19: mod_base = OTHER; note = 2'-O-methyluridine-3'-phosphate
  modified_base 20: mod_base = OTHER; note = 2'-O-methyluridine-3'-phosphate
  modified_base 21: mod_base = OTHER; note = 2'-O-methyluridine
ttctgggttttgtagcatttt

SEQ ID NO: 2051 - RNA, 23 nt, synthetic construct
  source 1..23: mol_type = other RNA
  modified_base 1: mod_base = OTHER; note = 2'-O-methyladenosine-3'-phosphorothioate
  modified_base 2: mod_base = OTHER; note = 2'-fluoroadenosine-3'-phosphorothioate
  modified_base 3: mod_base = OTHER; note = 2'-O-methyladenosine-3'-phosphate
  modified_base 4: mod_base = OTHER; note = 2'-O-methyladenosine-3'-phosphate
  modified_base 5: mod_base = OTHER; note = 2'-O-methyluridine-3'-phosphate
  modified_base 6: mod_base = OTHER; note = 2'-O-methylguanosine-3'-phosphate
  modified_base 7: mod_base = OTHER; note = 2'-fluorocytidine-3'-phosphate
  modified_base 8: mod_base = OTHER; note = 2'-O-methyluridine-3'-phosphate
  modified_base 9: mod_base = OTHER; note = 2'-O-methyladenosine-3'-phosphate
  modified_base 10: mod_base = OTHER; note = 2'-O-methylcytidine-3'-phosphate
  modified_base 11: mod_base = OTHER; note = 2'-O-methyladenosine-3'-phosphate
  modified_base 12: mod_base = OTHER; note = 2'-fluoroadenosine-3'-phosphate
  modified_base 13: mod_base = OTHER; note = 2'-O-methyladenosine-3'-phosphate
  modified_base 14: mod_base = OTHER; note = 2'-fluoroadenosine-3'-phosphate
  modified_base 15: mod_base = OTHER; note = 2'-O-methylcytidine-3'-phosphate
  modified_base 16: mod_base = OTHER; note = 2'-fluorocytidine-3'-phosphate
  modified_base 17: mod_base = OTHER; note = 2'-O-methylcytidine-3'-phosphate
  modified_base 18: mod_base = OTHER; note = 2'-O-methyladenosine-3'-phosphate
  modified_base 19: mod_base = OTHER; note = 2'-O-methylguanosine-3'-phosphate
  modified_base 20: mod_base = OTHER; note = 2'-O-methyladenosine-3'-phosphate
  modified_base 21: mod_base = OTHER; note = 2'-O-methyladenosine-3'-phosphorothioate
  modified_base 22: mod_base = OTHER; note = 2'-O-methyluridine-3'-phosphorothioate
  modified_base 23: mod_base = OTHER; note = 2'-O-methyladenosine
aaaatgctacaaaacccagaata

SEQ ID NO: 2052 - RNA, 21 nt, synthetic construct
  source 1..21: mol_type = other RNA
  modified_base 1: mod_base = OTHER; note = 2'-O-methylguanosine-3'-phosphorothioate
  modified_base 2: mod_base = OTHER; note = 2'-O-methylguanosine-3'-phosphorothioate
  modified_base 3: mod_base = OTHER; note = 2'-O-methyluridine-3'-phosphate
  modified_base 4: mod_base = OTHER; note = 2'-O-methyluridine-3'-phosphate
  modified_base 5: mod_base = OTHER; note = 2'-O-methyluridine-3'-phosphate
  modified_base 6: mod_base = OTHER; note = 2'-O-methyluridine-3'-phosphate
  modified_base 7: mod_base = OTHER; note = 2'-fluoroguanosine-3'-phosphate
  modified_base 8: mod_base = OTHER; note = 2'-O-methyluridine-3'-phosphate
  modified_base 9: mod_base = OTHER; note = 2'-fluoroadenosine-3'-phosphate
  modified_base 10: mod_base = OTHER; note = 2'-fluoroguanosine-3'-phosphate
  modified_base 11: mod_base = OTHER; note = 2'-fluorocytidine-3'-phosphate
  modified_base 12: mod_base = OTHER; note = 2'-O-methyladenosine-3'-phosphate
  modified_base 13: mod_base = OTHER; note = 2'-O-methyluridine-3'-phosphate
  modified_base 14: mod_base = OTHER; note = 2'-O-methyluridine-3'-phosphate
  modified_base 15: mod_base = OTHER; note = 2'-O-methyluridine-3'-phosphate
  modified_base 16: mod_base = OTHER; note = 2'-O-methyluridine-3'-phosphate
  modified_base 17: mod_base = OTHER; note = 2'-O-methyluridine-3'-phosphate
  modified_base 18: mod_base = OTHER; note = 2'-O-methyladenosine-3'-phosphate
  modified_base 19: mod_base = OTHER; note = 2'-O-methyluridine-3'-phosphate
  modified_base 20: mod_base = OTHER; note = 2'-O-methyluridine-3'-phosphate
  modified_base 21: mod_base = OTHER; note = 2'-O-methyladenosine
ggttttgtagcatttttatta

SEQ ID NO: 2053 - RNA, 23 nt, synthetic construct
  source 1..23: mol_type = other RNA
  modified_base 1: mod_base = OTHER; note = 2'-O-methyluridine-3'-phosphorothioate
  modified_base 2: mod_base = OTHER; note = 2'-fluoroadenosine-3'-phosphorothioate
  modified_base 3: mod_base = OTHER; note = 2'-O-methyladenosine-3'-phosphate
  modified_base 4: mod_base = OTHER; note = 2'-O-methyluridine-3'-phosphate
  modified_base 5: mod_base = OTHER; note = 2'-O-methyladenosine-3'-phosphate
  modified_base 6: mod_base = OTHER; note = 2'-O-methyladenosine-3'-phosphate
  modified_base 7: mod_base = OTHER; note = 2'-fluoroadenosine-3'-phosphate
  modified_base 8: mod_base = OTHER; note = 2'-O-methyladenosine-3'-phosphate
  modified_base 9: mod_base = OTHER; note = 2'-O-methyladenosine-3'-phosphate
  modified_base 10: mod_base = OTHER; note = 2'-O-methyluridine-3'-phosphate
  modified_base 11: mod_base = OTHER; note = 2'-O-methylguanosine-3'-phosphate
  modified_base 12: mod_base = OTHER; note = 2'-fluorocytidine-3'-phosphate
  modified_base 13: mod_base = OTHER; note = 2'-O-methyluridine-3'-phosphate
  modified_base 14: mod_base = OTHER; note = 2'-fluoroadenosine-3'-phosphate
  modified_base 15: mod_base = OTHER; note = 2'-O-methylcytidine-3'-phosphate
  modified_base 16: mod_base = OTHER; note = 2'-fluoroadenosine-3'-phosphate
  modified_base 17: mod_base = OTHER; note = 2'-O-methyladenosine-3'-phosphate
  modified_base 18: mod_base = OTHER; note = 2'-O-methyladenosine-3'-phosphate
  modified_base 19: mod_base = OTHER; note = 2'-O-methyladenosine-3'-phosphate
  modified_base 20: mod_base = OTHER; note = 2'-O-methylcytidine-3'-phosphate
  modified_base 21: mod_base = OTHER; note = 2'-O-methylcytidine-3'-phosphorothioate
  modified_base 22: mod_base = OTHER; note = 2'-O-methylcytidine-3'-phosphorothioate
  modified_base 23: mod_base = OTHER; note = 2'-O-methyladenosine
taataaaaatgctacaaaaccca

SEQ ID NO: 2054 - RNA, 21 nt, synthetic construct
  source 1..21: mol_type = other RNA
  modified_base 1: mod_base = OTHER; note = 2'-O-methylguanosine-3'-phosphorothioate
  modified_base 2: mod_base = OTHER; note = 2'-O-methyluridine-3'-phosphorothioate
  modified_base 3: mod_base = OTHER; note = 2'-O-methyluridine-3'-phosphate
  modified_base 4: mod_base = OTHER; note = 2'-O-methyluridine-3'-phosphate
  modified_base 5: mod_base = OTHER; note = 2'-O-methyluridine-3'-phosphate
  modified_base 6: mod_base = OTHER; note = 2'-O-methylguanosine-3'-phosphate
  modified_base 7: mod_base = OTHER; note = 2'-fluorouridine-3'-phosphate
  modified_base 8: mod_base = OTHER; note = 2'-O-methyladenosine-3'-phosphate
  modified_base 9: mod_base = OTHER; note = 2'-fluoroguanosine-3'-phosphate
  modified_base 10: mod_base = OTHER; note = 2'-fluorocytidine-3'-phosphate
  modified_base 11: mod_base = OTHER; note = 2'-fluoroadenosine-3'-phosphate
  modified_base 12: mod_base = OTHER; note = 2'-O-methyluridine-3'-phosphate
  modified_base 13: mod_base = OTHER; note = 2'-O-methyluridine-3'-phosphate
  modified_base 14: mod_base = OTHER; note = 2'-O-methyluridine-3'-phosphate
  modified_base 15: mod_base = OTHER; note = 2'-O-methyluridine-3'-phosphate
  modified_base 16: mod_base = OTHER; note = 2'-O-methyluridine-3'-phosphate
  modified_base 17: mod_base = OTHER; note = 2'-O-methyladenosine-3'-phosphate
  modified_base 18: mod_base = OTHER; note = 2'-O-methyluridine-3'-phosphate
  modified_base 19: mod_base = OTHER; note = 2'-O-methyluridine-3'-phosphate
  modified_base 20: mod_base = OTHER; note = 2'-O-methyladenosine-3'-phosphate
  modified_base 21: mod_base = OTHER; note = 2'-O-methyladenosine
gttttgtagcatttttattaa

SEQ ID NO: 2055 - RNA, 23 nt, synthetic construct
  source 1..23: mol_type = other RNA
  modified_base 1: mod_base = OTHER; note = 2'-O-methyluridine-3'-phosphorothioate
  modified_base 2: mod_base = OTHER; note = 2'-fluorouridine-3'-phosphorothioate
  modified_base 3: mod_base = OTHER; note = 2'-O-methyladenosine-3'-phosphate
  modified_base 4: mod_base = OTHER; note = 2'-O-methyladenosine-3'-phosphate
  modified_base 5: mod_base = OTHER; note = 2'-O-methyluridine-3'-phosphate
  modified_base 6: mod_base = OTHER; note = 2'-O-methyladenosine-3'-phosphate
  modified_base 7: mod_base = OTHER; note = 2'-fluoroadenosine-3'-phosphate
  modified_base 8: mod_base = OTHER; note = 2'-O-methyladenosine-3'-phosphate
  modified_base 9: mod_base = OTHER; note = 2'-O-methyladenosine-3'-phosphate
  modified_base 10: mod_base = OTHER; note = 2'-O-methyladenosine-3'-phosphate
  modified_base 11: mod_base = OTHER; note = 2'-O-methyluridine-3'-phosphate
  modified_base 12: mod_base = OTHER; note = 2'-fluoroguanosine-3'-phosphate
  modified_base 13: mod_base = OTHER; note = 2'-O-methylcytidine-3'-phosphate
  modified_base 14: mod_base = OTHER; note = 2'-fluorouridine-3'-phosphate
  modified_base 15: mod_base = OTHER; note = 2'-O-methyladenosine-3'-phosphate
  modified_base 16: mod_base = OTHER; note = 2'-fluorocytidine-3'-phosphate
  modified_base 17: mod_base = OTHER; note = 2'-O-methyladenosine-3'-phosphate
  modified_base 18: mod_base = OTHER; note = 2'-O-methyladenosine-3'-phosphate
  modified_base 19: mod_base = OTHER; note = 2'-O-methyladenosine-3'-phosphate
  modified_base 20: mod_base = OTHER; note = 2'-O-methyladenosine-3'-phosphate
  modified_base 21: mod_base = OTHER; note = 2'-O-methylcytidine-3'-phosphorothioate
  modified_base 22: mod_base = OTHER; note = 2'-O-methylcytidine-3'-phosphorothioate
  modified_base 23: mod_base = OTHER; note = 2'-O-methylcytidine
ttaataaaaatgctacaaaaccc

SEQ ID NO: 2056 - RNA, 21 nt, synthetic construct
  source 1..21: mol_type = other RNA
  modified_base 1: mod_base = OTHER; note = 2'-O-methyluridine-3'-phosphorothioate
  modified_base 2: mod_base = OTHER; note = 2'-O-methyluridine-3'-phosphorothioate
  modified_base 3: mod_base = OTHER; note = 2'-O-methyluridine-3'-phosphate
  modified_base 4: mod_base = OTHER; note = 2'-O-methyluridine-3'-phosphate
  modified_base 5: mod_base = OTHER; note = 2'-O-methylguanosine-3'-phosphate
  modified_base 6: mod_base = OTHER; note = 2'-O-methyluridine-3'-phosphate
  modified_base 7: mod_base = OTHER; note = 2'-fluoroadenosine-3'-phosphate
  modified_base 8: mod_base = OTHER; note = 2'-O-methylguanosine-3'-phosphate
  modified_base 9: mod_base = OTHER; note = 2'-fluorocytidine-3'-phosphate
  modified_base 10: mod_base = OTHER; note = 2'-fluoroadenosine-3'-phosphate
  modified_base 11: mod_base = OTHER; note = 2'-fluorouridine-3'-phosphate
  modified_base 12: mod_base = OTHER; note = 2'-O-methyluridine-3'-phosphate
  modified_base 13: mod_base = OTHER; note = 2'-O-methyluridine-3'-phosphate
  modified_base 14: mod_base = OTHER; note = 2'-O-methyluridine-3'-phosphate
  modified_base 15: mod_base = OTHER; note = 2'-O-methyluridine-3'-phosphate
  modified_base 16: mod_base = OTHER; note = 2'-O-methyladenosine-3'-phosphate
  modified_base 17: mod_base = OTHER; note = 2'-O-methyluridine-3'-phosphate
  modified_base 18: mod_base = OTHER; note = 2'-O-methyluridine-3'-phosphate
  modified_base 19: mod_base = OTHER; note = 2'-O-methyladenosine-3'-phosphate
  modified_base 20: mod_base = OTHER; note = 2'-O-methyladenosine-3'-phosphate
  modified_base 21: mod_base = OTHER; note = 2'-O-methyluridine
ttttgtagcatttttattaat

SEQ ID NO: 2057 - RNA, 23 nt, synthetic construct
  source 1..23: mol_type = other RNA
  modified_base 1: mod_base = OTHER; note = 2'-O-methyladenosine-3'-phosphorothioate
  modified_base 2: mod_base = OTHER; note = 2'-fluorouridine-3'-phosphorothioate
  modified_base 3: mod_base = OTHER; note = 2'-O-methyluridine-3'-phosphate
  modified_base 4: mod_base = OTHER; note = 2'-O-methyladenosine-3'-phosphate
  modified_base 5: mod_base = OTHER; note = 2'-O-methyladenosine-3'-phosphate
  modified_base 6: mod_base = OTHER; note = 2'-O-methyluridine-3'-phosphate
  modified_base 7: mod_base = OTHER; note = 2'-fluoroadenosine-3'-phosphate
  modified_base 8: mod_base = OTHER; note = 2'-O-methyladenosine-3'-phosphate
  modified_base 9: mod_base = OTHER; note = 2'-O-methyladenosine-3'-phosphate
  modified_base 10: mod_base = OTHER; note = 2'-O-methyladenosine-3'-phosphate
  modified_base 11: mod_base = OTHER; note = 2'-O-methyladenosine-3'-phosphate
  modified_base 12: mod_base = OTHER; note = 2'-fluorouridine-3'-phosphate
  modified_base 13: mod_base = OTHER; note = 2'-O-methylguanosine-3'-phosphate
  modified_base 14: mod_base = OTHER; note = 2'-fluorocytidine-3'-phosphate
  modified_base 15: mod_base = OTHER; note = 2'-O-methyluridine-3'-phosphate
  modified_base 16: mod_base = OTHER; note = 2'-fluoroadenosine-3'-phosphate
  modified_base 17: mod_base = OTHER; note = 2'-O-methylcytidine-3'-phosphate
  modified_base 18: mod_base = OTHER; note = 2'-O-methyladenosine-3'-phosphate
  modified_base 19: mod_base = OTHER; note = 2'-O-methyladenosine-3'-phosphate
  modified_base 20: mod_base = OTHER; note = 2'-O-methyladenosine-3'-phosphate
  modified_base 21: mod_base = OTHER; note = 2'-O-methyladenosine-3'-phosphorothioate
  modified_base 22: mod_base = OTHER; note = 2'-O-methylcytidine-3'-phosphorothioate
  modified_base 23: mod_base = OTHER; note = 2'-O-methylcytidine
attaataaaaatgctacaaaacc

SEQ ID NO: 2058 - RNA, 21 nt, synthetic construct
  source 1..21: mol_type = other RNA
  modified_base 1: mod_base = OTHER; note = 2'-O-methyladenosine-3'-phosphorothioate
  modified_base 2: mod_base = OTHER; note = 2'-O-methyluridine-3'-phosphorothioate
  modified_base 3: mod_base = OTHER; note = 2'-O-methyluridine-3'-phosphate
  modified_base 4: mod_base = OTHER; note = 2'-O-methyluridine-3'-phosphate
  modified_base 5: mod_base = OTHER; note = 2'-O-methyluridine-3'-phosphate
  modified_base 6: mod_base = OTHER; note = 2'-O-methyluridine-3'-phosphate
  modified_base 7: mod_base = OTHER; note = 2'-fluoroadenosine-3'-phosphate
  modified_base 8: mod_base = OTHER; note = 2'-O-methyluridine-3'-phosphate
  modified_base 9: mod_base = OTHER; note = 2'-fluorouridine-3'-phosphate
  modified_base 10: mod_base = OTHER; note = 2'-fluoroadenosine-3'-phosphate
  modified_base 11: mod_base = OTHER; note = 2'-fluoroadenosine-3'-phosphate
  modified_base 12: mod_base = OTHER; note = 2'-O-methyluridine-3'-phosphate
  modified_base 13: mod_base = OTHER; note = 2'-O-methyladenosine-3'-phosphate
  modified_base 14: mod_base = OTHER; note = 2'-O-methyluridine-3'-phosphate
  modified_base 15: mod_base = OTHER; note = 2'-O-methylguanosine-3'-phosphate
  modified_base 16: mod_base = OTHER; note = 2'-O-methylguanosine-3'-phosphate
  modified_base 17: mod_base = OTHER; note = 2'-O-methyluridine-3'-phosphate
  modified_base 18: mod_base = OTHER; note = 2'-O-methylguanosine-3'-phosphate
  modified_base 19: mod_base = OTHER; note = 2'-O-methyladenosine-3'-phosphate
  modified_base 20: mod_base = OTHER; note = 2'-O-methylcytidine-3'-phosphate
  modified_base 21: mod_base = OTHER; note = 2'-O-methyluridine
atttttattaatatggtgact

SEQ ID NO: 2059 - RNA, 23 nt, synthetic construct
  source 1..23: mol_type = other RNA
  modified_base 1: mod_base = OTHER; note = 2'-O-methyladenosine-3'-phosphorothioate
  modified_base 2: mod_base = OTHER; note = 2'-fluoroguanosine-3'-phosphorothioate
  modified_base 3: mod_base = OTHER; note = 2'-O-methyluridine-3'-phosphate
  modified_base 4: mod_base = OTHER; note = 2'-O-methylcytidine-3'-phosphate
  modified_base 5: mod_base = OTHER; note = 2'-O-methyladenosine-3'-phosphate
  modified_base 6: mod_base = OTHER; note = 2'-O-methylcytidine-3'-phosphate
  modified_base 7: mod_base = OTHER; note = 2'-fluorocytidine-3'-phosphate
  modified_base 8: mod_base = OTHER; note = 2'-O-methyladenosine-3'-phosphate
  modified_base 9: mod_base = OTHER; note = 2'-O-methyluridine-3'-phosphate
  modified_base 10: mod_base = OTHER; note = 2'-O-methyladenosine-3'-phosphate
  modified_base 11: mod_base = OTHER; note = 2'-O-methyluridine-3'-phosphate
  modified_base 12: mod_base = OTHER; note = 2'-fluorouridine-3'-phosphate
  modified_base 13: mod_base = OTHER; note = 2'-O-methyladenosine-3'-phosphate
  modified_base 14: mod_base = OTHER; note = 2'-fluoroadenosine-3'-phosphate
  modified_base 15: mod_base = OTHER; note = 2'-O-methyluridine-3'-phosphate
  modified_base 16: mod_base = OTHER; note = 2'-fluoroadenosine-3'-phosphate
  modified_base 17: mod_base = OTHER; note = 2'-O-methyladenosine-3'-phosphate
  modified_base 18: mod_base = OTHER; note = 2'-O-methyladenosine-3'-phosphate
  modified_base 19: mod_base = OTHER; note = 2'-O-methyladenosine-3'-phosphate
  modified_base 20: mod_base = OTHER; note = 2'-O-methyladenosine-3'-phosphate
  modified_base 21: mod_base = OTHER; note = 2'-O-methyluridine-3'-phosphorothioate
  modified_base 22: mod_base = OTHER; note = 2'-O-methylguanosine-3'-phosphorothioate
  modified_base 23: mod_base = OTHER; note = 2'-O-methylcytidine
agtcaccatattaataaaaatgc

SEQ ID NO: 2060 - RNA, 21 nt, synthetic construct
  source 1..21: mol_type = other RNA
  modified_base 1: mod_base = OTHER; note = 2'-O-methyluridine-3'-phosphorothioate
  modified_base 2: mod_base = OTHER; note = 2'-O-methyluridine-3'-phosphorothioate
  modified_base 3: mod_base = OTHER; note = 2'-O-methyluridine-3'-phosphate
  modified_base 4: mod_base = OTHER; note = 2'-O-methyluridine-3'-phosphate
  modified_base 5: mod_base = OTHER; note = 2'-O-methyluridine-3'-phosphate
  modified_base 6: mod_base = OTHER; note = 2'-O-methyladenosine-3'-phosphate
  modified_base 7: mod_base = OTHER; note = 2'-fluorouridine-3'-phosphate
  modified_base 8: mod_base = OTHER; note = 2'-O-methyluridine-3'-phosphate
  modified_base 9: mod_base = OTHER; note = 2'-fluoroadenosine-3'-phosphate
  modified_base 10: mod_base = OTHER; note = 2'-fluoroadenosine-3'-phosphate
  modified_base 11: mod_base = OTHER; note = 2'-fluorouridine-3'-phosphate
  modified_base 12: mod_base = OTHER; note = 2'-O-methyladenosine-3'-phosphate
  modified_base 13: mod_base = OTHER; note = 2'-O-methyluridine-3'-phosphate
  modified_base 14: mod_base = OTHER; note = 2'-O-methylguanosine-3'-phosphate
  modified_base 15: mod_base = OTHER; note = 2'-O-methylguanosine-3'-phosphate
  modified_base 16: mod_base = OTHER; note = 2'-O-methyluridine-3'-phosphate
  modified_base 17: mod_base = OTHER; note = 2'-O-methylguanosine-3'-phosphate
  modified_base 18: mod_base = OTHER; note = 2'-O-methyladenosine-3'-phosphate
  modified_base 19: mod_base = OTHER; note = 2'-O-methylcytidine-3'-phosphate
  modified_base 20: mod_base = OTHER; note = 2'-O-methyluridine-3'-phosphate
  modified_base 21: mod_base = OTHER; note = 2'-O-methyluridine
tttttattaatatggtgactt

SEQ ID NO: 2061 - RNA, 23 nt, synthetic construct
  source 1..23: mol_type = other RNA
  modified_base 1: mod_base = OTHER; note = 2'-O-methyladenosine-3'-phosphorothioate
  modified_base 2: mod_base = OTHER; note = 2'-fluoroadenosine-3'-phosphorothioate
  modified_base 3: mod_base = OTHER; note = 2'-O-methylguanosine-3'-phosphate
  modified_base 4: mod_base = OTHER; note = 2'-O-methyluridine-3'-phosphate
  modified_base 5: mod_base = OTHER; note = 2'-O-methylcytidine-3'-phosphate
  modified_base 6: mod_base = OTHER; note = 2'-O-methyladenosine-3'-phosphate
  modified_base 7: mod_base = OTHER; note = 2'-fluorocytidine-3'-phosphate
  modified_base 8: mod_base = OTHER; note = 2'-O-methylcytidine-3'-phosphate
  modified_base 9: mod_base = OTHER; note = 2'-O-methyladenosine-3'-phosphate
  modified_base 10: mod_base = OTHER; note = 2'-O-methyluridine-3'-phosphate
  modified_base 11: mod_base = OTHER; note = 2'-O-methyladenosine-3'-phosphate
  modified_base 12: mod_base = OTHER; note = 2'-fluorouridine-3'-phosphate
  modified_base 13: mod_base = OTHER; note = 2'-O-methyluridine-3'-phosphate
  modified_base 14: mod_base = OTHER; note = 2'-fluoroadenosine-3'-phosphate
  modified_base 15: mod_base = OTHER; note = 2'-O-methyladenosine-3'-phosphate
  modified_base 16: mod_base = OTHER; note = 2'-fluorouridine-3'-phosphate
  modified_base 17: mod_base = OTHER; note = 2'-O-methyladenosine-3'-phosphate
  modified_base 18: mod_base = OTHER; note = 2'-O-methyladenosine-3'-phosphate
  modified_base 19: mod_base = OTHER; note = 2'-O-methyladenosine-3'-phosphate
  modified_base 20: mod_base = OTHER; note = 2'-O-methyladenosine-3'-phosphate
  modified_base 21: mod_base = OTHER; note = 2'-O-methyladenosine-3'-phosphorothioate
  modified_base 22: mod_base = OTHER; note = 2'-O-methyluridine-3'-phosphorothioate
  modified_base 23: mod_base = OTHER; note = 2'-O-methylguanosine
aagtcaccatattaataaaaatg

SEQ ID NO: 2062 - RNA, 21 nt, synthetic construct
  source 1..21: mol_type = other RNA
  modified_base 1: mod_base = OTHER; note = 2'-O-methyluridine-3'-phosphorothioate
  modified_base 2: mod_base = OTHER; note = 2'-O-methyluridine-3'-phosphorothioate
  modified_base 3: mod_base = OTHER; note = 2'-O-methyluridine-3'-phosphate
  modified_base 4: mod_base = OTHER; note = 2'-O-methyluridine-3'-phosphate
  modified_base 5: mod_base = OTHER; note = 2'-O-methylguanosine-3'-phosphate
  modified_base 6: mod_base = OTHER; note = 2'-O-methylcytidine-3'-phosphate
  modified_base 7: mod_base = OTHER; note = 2'-fluorouridine-3'-phosphate
  modified_base 8: mod_base = OTHER; note = 2'-O-methyluridine-3'-phosphate
  modified_base 9: mod_base = OTHER; note = 2'-fluorouridine-3'-phosphate
  modified_base 10: mod_base = OTHER; note = 2'-fluorouridine-3'-phosphate
  modified_base 11: mod_base = OTHER; note = 2'-fluoroguanosine-3'-phosphate
  modified_base 12: mod_base = OTHER; note = 2'-O-methyluridine-3'-phosphate
  modified_base 13: mod_base = OTHER; note = 2'-O-methyladenosine-3'-phosphate
  modified_base 14: mod_base = OTHER; note = 2'-O-methyladenosine-3'-phosphate
  modified_base 15: mod_base = OTHER; note = 2'-O-methylcytidine-3'-phosphate
  modified_base 16: mod_base = OTHER; note = 2'-O-methyluridine-3'-phosphate
  modified_base 17: mod_base = OTHER; note = 2'-O-methyluridine-3'-phosphate
  modified_base 18: mod_base = OTHER; note = 2'-O-methylguanosine-3'-phosphate
  modified_base 19: mod_base = OTHER; note = 2'-O-methyladenosine-3'-phosphate
  modified_base 20: mod_base = OTHER; note = 2'-O-methyladenosine-3'-phosphate
  modified_base 21: mod_base = OTHER; note = 2'-O-methylguanosine
ttttgcttttgtaacttgaag

SEQ ID NO: 2063 - RNA, 23 nt, synthetic construct
  source 1..23: mol_type = other RNA
  modified_base 1: mod_base = OTHER; note = 2'-O-methylcytidine-3'-phosphorothioate
  modified_base 2: mod_base = OTHER; note = 2'-fluorouridine-3'-phosphorothioate
  modified_base 3: mod_base = OTHER; note = 2'-O-methyluridine-3'-phosphate
  modified_base 4: mod_base = OTHER; note = 2'-O-methylcytidine-3'-phosphate
  modified_base 5: mod_base = OTHER; note = 2'-O-methyladenosine-3'-phosphate
  modified_base 6: mod_base = OTHER; note = 2'-O-methyladenosine-3'-phosphate
  modified_base 7: mod_base = OTHER; note = 2'-fluoroguanosine-3'-phosphate
  modified_base 8: mod_base = OTHER; note = 2'-O-methyluridine-3'-phosphate
  modified_base 9: mod_base = OTHER; note = 2'-O-methyluridine-3'-phosphate
  modified_base 10: mod_base = OTHER; note = 2'-O-methyladenosine-3'-phosphate
  modified_base 11: mod_base = OTHER; note = 2'-O-methylcytidine-3'-phosphate
  modified_base 12: mod_base = OTHER; note = 2'-fluoroadenosine-3'-phosphate
  modified_base 13: mod_base = OTHER; note = 2'-O-methyladenosine-3'-phosphate
  modified_base 14: mod_base = OTHER; note = 2'-fluoroadenosine-3'-phosphate
  modified_base 15: mod_base = OTHER; note = 2'-O-methyladenosine-3'-phosphate
  modified_base 16: mod_base = OTHER; note = 2'-fluoroguanosine-3'-phosphate
  modified_base 17: mod_base = OTHER; note = 2'-O-methylcytidine-3'-phosphate
  modified_base 18: mod_base = OTHER; note = 2'-O-methyladenosine-3'-phosphate
  modified_base 19: mod_base = OTHER; note = 2'-O-methyladenosine-3'-phosphate
  modified_base 20: mod_base = OTHER; note = 2'-O-methyladenosine-3'-phosphate
  modified_base 21: mod_base = OTHER; note = 2'-O-methyladenosine-3'-phosphorothioate
  modified_base 22: mod_base = OTHER; note = 2'-O-methylcytidine-3'-phosphorothioate
  modified_base 23: mod_base = OTHER; note = 2'-O-methyladenosine
cttcaagttacaaaagcaaaaca

SEQ ID NO: 2064 - RNA, 21 nt, synthetic construct
  source 1..21: mol_type = other RNA
  modified_base 1: mod_base = OTHER; note = 2'-O-methyluridine-3'-phosphorothioate
  modified_base 2: mod_base = OTHER; note = 2'-O-methyluridine-3'-phosphorothioate
  modified_base 3: mod_base = OTHER; note = 2'-O-methylguanosine-3'-phosphate
  modified_base 4: mod_base = OTHER; note = 2'-O-methyluridine-3'-phosphate
  modified_base 5: mod_base = OTHER; note = 2'-O-methyladenosine-3'-phosphate
  modified_base 6: mod_base = OTHER; note = 2'-O-methylguanosine-3'-phosphate
  modified_base 7: mod_base = OTHER; note = 2'-fluorocytidine-3'-phosphate
  modified_base 8: mod_base = OTHER; note = 2'-O-methyladenosine-3'-phosphate
  modified_base 9: mod_base = OTHER; note = 2'-fluorouridine-3'-phosphate
  modified_base 10: mod_base = OTHER; note = 2'-fluorouridine-3'-phosphate
  modified_base 11: mod_base = OTHER; note = 2'-fluorouridine-3'-phosphate
  modified_base 12: mod_base = OTHER; note = 2'-O-methyluridine-3'-phosphate
  modified_base 13: mod_base = OTHER; note = 2'-O-methyluridine-3'-phosphate
  modified_base 14: mod_base = OTHER; note = 2'-O-methyladenosine-3'-phosphate
  modified_base 15: mod_base = OTHER; note = 2'-O-methyluridine-3'-phosphate
  modified_base 16: mod_base = OTHER; note = 2'-O-methyluridine-3'-phosphate
  modified_base 17: mod_base = OTHER; note = 2'-O-methyladenosine-3'-phosphate
  modified_base 18: mod_base = OTHER; note = 2'-O-methyladenosine-3'-phosphate
  modified_base 19: mod_base = OTHER; note = 2'-O-methyluridine-3'-phosphate
  modified_base 20: mod_base = OTHER; note = 2'-O-methyladenosine-3'-phosphate
  modified_base 21: mod_base = OTHER; note = 2'-O-methyluridine
ttgtagcatttttattaatat

SEQ ID NO: 2065 - RNA, 23 nt, synthetic construct
  source 1..23: mol_type = other RNA
  modified_base 1: mod_base = OTHER; note = 2'-O-methyladenosine-3'-phosphorothioate
  modified_base 2: mod_base = OTHER; note = 2'-fluorouridine-3'-phosphorothioate
  modified_base 3: mod_base = OTHER; note = 2'-O-methyladenosine-3'-phosphate
  modified_base 4: mod_base = OTHER; note = 2'-O-methyluridine-3'-phosphate
  modified_base 5: mod_base = OTHER; note = 2'-O-methyluridine-3'-phosphate
  modified_base 6: mod_base = OTHER; note = 2'-O-methyladenosine-3'-phosphate
  modified_base 7: mod_base = OTHER; note = 2'-fluoroadenosine-3'-phosphate
  modified_base 8: mod_base = OTHER; note = 2'-O-methyluridine-3'-phosphate
  modified_base 9: mod_base = OTHER; note = 2'-O-methyladenosine-3'-phosphate
  modified_base 10: mod_base = OTHER; note = 2'-O-methyladenosine-3'-phosphate
  modified_base 11: mod_base = OTHER; note = 2'-O-methyladenosine-3'-phosphate
  modified_base 12: mod_base = OTHER; note = 2'-fluoroadenosine-3'-phosphate
  modified_base 13: mod_base = OTHER; note = 2'-O-methyladenosine-3'-phosphate
  modified_base 14: mod_base = OTHER; note = 2'-fluorouridine-3'-phosphate
  modified_base 15: mod_base = OTHER; note = 2'-O-methylguanosine-3'-phosphate
  modified_base 16: mod_base = OTHER; note = 2'-fluorocytidine-3'-phosphate
  modified_base 17: mod_base = OTHER; note = 2'-O-methyluridine-3'-phosphate
  modified_base 18: mod_base = OTHER; note = 2'-O-methyladenosine-3'-phosphate
  modified_base 19: mod_base = OTHER; note = 2'-O-methylcytidine-3'-phosphate
  modified_base 20: mod_base = OTHER; note = 2'-O-methyladenosine-3'-phosphate
  modified_base 21: mod_base = OTHER; note = 2'-O-methyladenosine-3'-phosphorothioate
  modified_base 22: mod_base = OTHER; note = 2'-O-methyladenosine-3'-phosphorothioate
  modified_base 23: mod_base = OTHER; note = 2'-O-methyladenosine
atattaataaaaatgctacaaaa

SEQ ID NO: 2066 - RNA, 21 nt, synthetic construct
  source 1..21: mol_type = other RNA
  modified_base 1: mod_base = OTHER; note = 2'-fluorouridine-3'-phosphorothioate
  modified_base 2: mod_base = OTHER; note = 2'-O-methylguanosine-3'-phosphorothioate
  modified_base 3: mod_base = OTHER; note = 2'-fluorouridine-3'-phosphate
  modified_base 4: mod_base = OTHER; note = 2'-O-methylcytidine-3'-phosphate
  modified_base 5: mod_base = OTHER; note = 2'-fluorocytidine-3'-phosphate
  modified_base 6: mod_base = OTHER; note = 2'-O-methyluridine-3'-phosphate
  modified_base 7: mod_base = OTHER; note = 2'-fluorocytidine-3'-phosphate
  modified_base 8: mod_base = OTHER; note = 2'-O-methyluridine-3'-phosphate
  modified_base 9: mod_base = OTHER; note = 2'-fluorocytidine-3'-phosphate
  modified_base 10: mod_base = OTHER; note = 2'-fluorouridine-3'-phosphate
  modified_base 11: mod_base = OTHER; note = 2'-fluoroguanosine-3'-phosphate
  modified_base 12: mod_base = OTHER; note = 2'-O-methyluridine-3'-phosphate
  modified_base 13: mod_base = OTHER; note = 2'-fluorouridine-3'-phosphate
  modified_base 14: mod_base = OTHER; note = 2'-O-methylguanosine-3'-phosphate
  modified_base 15: mod_base = OTHER; note = 2'-fluorocytidine-3'-phosphate
  modified_base 16: mod_base = OTHER; note = 2'-O-methylcytidine-3'-phosphate
  modified_base 17: mod_base = OTHER; note = 2'-fluorouridine-3'-phosphate
  modified_base 18: mod_base = OTHER; note = 2'-O-methyluridine-3'-phosphate
  modified_base 19: mod_base = OTHER; note = 2'-fluorouridine-3'-phosphate
  modified_base 20: mod_base = OTHER; note = 2'-O-methyluridine-3'-phosphate
  modified_base 21: mod_base = OTHER; note = 2'-fluorouridine
tgtcctctctgttgccttttt

SEQ ID NO: 2067 - RNA, 23 nt, synthetic construct
  source 1..23: mol_type = other RNA
  modified_base 1: mod_base = OTHER; note = 2'-O-methyladenosine-3'-phosphorothioate
  modified_base 2: mod_base = OTHER; note = 2'-fluoroadenosine-3'-phosphorothioate
  modified_base 3: mod_base = OTHER; note = 2'-O-methyladenosine-3'-phosphate
  modified_base 4: mod_base = OTHER; note = 2'-fluoroadenosine-3'-phosphate
  modified_base 5: mod_base = OTHER; note = 2'-O-methyladenosine-3'-phosphate
  modified_base 6: mod_base = OTHER; note = 2'-fluoroguanosine-3'-phosphate
  modified_base 7: mod_base = OTHER; note = 2'-O-methylguanosine-3'-phosphate
  modified_base 8: mod_base = OTHER; note = 2'-fluorocytidine-3'-phosphate
  modified_base 9: mod_base = OTHER; note = 2'-O-methyladenosine-3'-phosphate
  modified_base 10: mod_base = OTHER; note = 2'-fluoroadenosine-3'-phosphate
  modified_base 11: mod_base = OTHER; note = 2'-O-methylcytidine-3'-phosphate
  modified_base 12: mod_base = OTHER; note = 2'-O-methyladenosine-3'-phosphate
  modified_base 13: mod_base = OTHER; note = 2'-O-methylguanosine-3'-phosphate
  modified_base 14: mod_base = OTHER; note = 2'-fluoroadenosine-3'-phosphate
  modified_base 15: mod_base = OTHER; note = 2'-O-methylguanosine-3'-phosphate
  modified_base 16: mod_base = OTHER; note = 2'-fluoroadenosine-3'-phosphate
  modified_base 17: mod_base = OTHER; note = 2'-O-methylguanosine-3'-phosphate
  modified_base 18: mod_base = OTHER; note = 2'-fluoroguanosine-3'-phosphate
  modified_base 19: mod_base = OTHER; note = 2'-O-methyladenosine-3'-phosphate
  modified_base 20: mod_base = OTHER; note = 2'-fluorocytidine-3'-phosphate
  modified_base 21: mod_base = OTHER; note = 2'-O-methyladenosine-3'-phosphorothioate
  modified_base 22: mod_base = OTHER; note = 2'-O-methylguanosine-3'-phosphorothioate
  modified_base 23: mod_base = OTHER; note = 2'-O-methyladenosine
aaaaaggcaacagagaggacaga

SEQ ID NO: 2068 - RNA, 21 nt, synthetic construct
  source 1..21: mol_type = other RNA
  modified_base 1: mod_base = OTHER; note = 2'-fluoroguanosine-3'-phosphorothioate
  modified_base 2: mod_base = OTHER; note = 2'-O-methyluridine-3'-phosphorothioate
  modified_base 3: mod_base = OTHER; note = 2'-fluorocytidine-3'-phosphate
  modified_base 4: mod_base = OTHER; note = 2'-O-methylcytidine-3'-phosphate
  modified_base 5: mod_base = OTHER; note = 2'-fluorouridine-3'-phosphate
  modified_base 6: mod_base = OTHER; note = 2'-O-methylcytidine-3'-phosphate
  modified_base 7: mod_base = OTHER; note = 2'-fluorouridine-3'-phosphate
  modified_base 8: mod_base = OTHER; note = 2'-O-methylcytidine-3'-phosphate
  modified_base 9: mod_base = OTHER; note = 2'-fluorouridine-3'-phosphate
  modified_base 10: mod_base = OTHER; note = 2'-fluoroguanosine-3'-phosphate
  modified_base 11: mod_base = OTHER; note = 2'-fluorouridine-3'-phosphate
  modified_base 12: mod_base = OTHER; note = 2'-O-methyluridine-3'-phosphate
  modified_base 13: mod_base = OTHER; note = 2'-fluoroguanosine-3'-phosphate
  modified_base 14: mod_base = OTHER; note = 2'-O-methylcytidine-3'-phosphate
  modified_base 15: mod_base = OTHER; note = 2'-fluorocytidine-3'-phosphate
  modified_base 16: mod_base = OTHER; note = 2'-O-methyluridine-3'-phosphate
  modified_base 17: mod_base = OTHER; note = 2'-fluorouridine-3'-phosphate
  modified_base 18: mod_base = OTHER; note = 2'-O-methyluridine-3'-phosphate
  modified_base 19: mod_base = OTHER; note = 2'-fluorouridine-3'-phosphate
  modified_base 20: mod_base = OTHER; note = 2'-O-methyluridine-3'-phosphate
  modified_base 21: mod_base = OTHER; note = 2'-fluoroadenosine
gtcctctctgttgccttttta

SEQ ID NO: 2069 - RNA, 23 nt, synthetic construct
  source 1..23: mol_type = other RNA
  modified_base 1: mod_base = OTHER; note = 2'-O-methyluridine-3'-phosphorothioate
  modified_base 2: mod_base = OTHER; note = 2'-fluoroadenosine-3'-phosphorothioate
  modified_base 3: mod_base = OTHER; note = 2'-O-methyladenosine-3'-phosphate
  modified_base 4: mod_base = OTHER; note = 2'-fluoroadenosine-3'-phosphate
  modified_base 5: mod_base = OTHER; note = 2'-O-methyladenosine-3'-phosphate
  modified_base 6: mod_base = OTHER; note = 2'-fluoroadenosine-3'-phosphate
  modified_base 7: mod_base = OTHER; note = 2'-O-methylguanosine-3'-phosphate
  modified_base 8: mod_base = OTHER; note = 2'-fluoroguanosine-3'-phosphate
  modified_base 9: mod_base = OTHER; note = 2'-O-methylcytidine-3'-phosphate
  modified_base 10: mod_base = OTHER; note = 2'-fluoroadenosine-3'-phosphate
  modified_base 11: mod_base = OTHER; note = 2'-O-methyladenosine-3'-phosphate
  modified_base 12: mod_base = OTHER; note = 2'-O-methylcytidine-3'-phosphate
  modified_base 13: mod_base = OTHER; note = 2'-O-methyladenosine-3'-phosphate
  modified_base 14: mod_base = OTHER; note = 2'-fluoroguanosine-3'-phosphate
  modified_base 15: mod_base = OTHER; note = 2'-O-methyladenosine-3'-phosphate
  modified_base 16: mod_base = OTHER; note = 2'-fluoroguanosine-3'-phosphate
  modified_base 17: mod_base = OTHER; note = 2'-O-methyladenosine-3'-phosphate
  modified_base 18: mod_base = OTHER; note = 2'-fluoroguanosine-3'-phosphate
  modified_base 19: mod_base = OTHER; note = 2'-O-methylguanosine-3'-phosphate
  modified_base 20: mod_base = OTHER; note = 2'-fluoroadenosine-3'-phosphate
  modified_base 21: mod_base = OTHER; note = 2'-O-methylcytidine-3'-phosphorothioate
  modified_base 22: mod_base = OTHER; note = 2'-O-methyladenosine-3'-phosphorothioate
  modified_base 23: mod_base = OTHER; note = 2'-O-methylguanosine
taaaaaggcaacagagaggacag

SEQ ID NO: 2070 - RNA, 21 nt, synthetic construct
  source 1..21: mol_type = other RNA
  modified_base 1: mod_base = OTHER; note = 2'-fluoroadenosine-3'-phosphorothioate
  modified_base 2: mod_base = OTHER; note = 2'-O-methylguanosine-3'-phosphorothioate
  modified_base 3: mod_base = OTHER; note = 2'-fluoroadenosine-3'-phosphate
  modified_base 4: mod_base = OTHER; note = 2'-O-methylcytidine-3'-phosphate
  modified_base 5: mod_base = OTHER; note = 2'-fluorocytidine-3'-phosphate
  modified_base 6: mod_base = OTHER; note = 2'-O-methyluridine-3'-phosphate
  modified_base 7: mod_base = OTHER; note = 2'-fluoroguanosine-3'-phosphate
  modified_base 8: mod_base = OTHER; note = 2'-O-methyluridine-3'-phosphate
  modified_base 9: mod_base = OTHER; note = 2'-fluorouridine-3'-phosphate
  modified_base 10: mod_base = OTHER; note = 2'-fluorouridine-3'-phosphate
  modified_base 11: mod_base = OTHER; note = 2'-fluorouridine-3'-phosphate
  modified_base 12: mod_base = OTHER; note = 2'-O-methylguanosine-3'-phosphate
  modified_base 13: mod_base = OTHER; note = 2'-fluorocytidine-3'-phosphate
  modified_base 14: mod_base = OTHER; note = 2'-O-methyluridine-3'-phosphate
  modified_base 15: mod_base = OTHER; note = 2'-fluorouridine-3'-phosphate
  modified_base 16: mod_base = OTHER; note = 2'-O-methyluridine-3'-phosphate
  modified_base 17: mod_base = OTHER; note = 2'-fluorouridine-3'-phosphate
  modified_base 18: mod_base = OTHER; note = 2'-O-methylguanosine-3'-phosphate
  modified_base 19: mod_base = OTHER; note = 2'-fluorouridine-3'-phosphate
  modified_base 20: mod_base = OTHER; note = 2'-O-methyladenosine-3'-phosphate
  modified_base 21: mod_base = OTHER; note = 2'-fluoroadenosine
agacctgttttgcttttgtaa

SEQ ID NO: 2071 - RNA, 22 nt, synthetic construct
  source 1..22: mol_type = other RNA
  modified_base 1: mod_base = OTHER; note = 2'-O-methyluridine-3'-phosphorothioate
  modified_base 2: mod_base = OTHER; note = 2'-fluorouridine-3'-phosphorothioate
  modified_base 3: mod_base = OTHER; note = 2'-O-methyladenosine-3'-phosphate
  modified_base 4: mod_base = OTHER; note = 2'-fluorocytidine-3'-phosphate
  modified_base 5: mod_base = OTHER; note = 2'-O-methyladenosine-3'-phosphate
  modified_base 6: mod_base = OTHER; note = 2'-fluoroadenosine-3'-phosphate
  modified_base 7: mod_base = OTHER; note = 2'-O-methyladenosine-3'-phosphate
  modified_base 8: mod_base = OTHER; note = 2'-fluoroadenosine-3'-phosphate
  modified_base 9: mod_base = OTHER; note = 2'-O-methylguanosine-3'-phosphate
  modified_base 10: mod_base = OTHER; note = 2'-fluorocytidine-3'-phosphate
  modified_base 11: mod_base = OTHER; note = 2'-O-methyladenosine-3'-phosphate
  modified_base 12: mod_base = OTHER; note = 2'-O-methyladenosine-3'-phosphate
  modified_base 13: mod_base = OTHER; note = 2'-fluoroadenosine-3'-phosphate
  modified_base 14: mod_base = OTHER; note = 2'-O-methylcytidine-3'-phosphate
  modified_base 15: mod_base = OTHER; note = 2'-fluoroadenosine-3'-phosphate
  modified_base 16: mod_base = OTHER; note = 2'-O-methylguanosine-3'-phosphate
  modified_base 17: mod_base = OTHER; note = 2'-fluoroguanosine-3'-phosphate
  modified_base 18: mod_base = OTHER; note = 2'-O-methyluridine-3'-phosphate
  modified_base 19: mod_base = OTHER; note = 2'-fluorocytidine-3'-phosphate
  modified_base 20: mod_base = OTHER; note = 2'-O-methyluridine-3'-phosphorothioate
  modified_base 21: mod_base = OTHER; note = 2'-O-methyladenosine-3'-phosphorothioate
  modified_base 22: mod_base = OTHER; note = 2'-O-methylguanosine
ttacaaaagcaaacaggtctag

SEQ ID NO: 2072 - RNA, 21 nt, synthetic construct
  source 1..21: mol_type = other RNA
  modified_base 1: mod_base = OTHER; note = 2'-fluoroguanosine-3'-phosphorothioate
  modified_base 2: mod_base = OTHER; note = 2'-O-methyladenosine-3'-phosphorothioate
  modified_base 3: mod_base = OTHER; note = 2'-fluorocytidine-3'-phosphate
  modified_base 4: mod_base = OTHER; note = 2'-O-methylcytidine-3'-phosphate
  modified_base 5: mod_base = OTHER; note = 2'-fluorouridine-3'-phosphate
  modified_base 6: mod_base = OTHER; note = 2'-O-methylguanosine-3'-phosphate
  modified_base 7: mod_base = OTHER; note = 2'-fluorouridine-3'-phosphate
  modified_base 8: mod_base = OTHER; note = 2'-O-methyluridine-3'-phosphate
  modified_base 9: mod_base = OTHER; note = 2'-fluorouridine-3'-phosphate
  modified_base 10: mod_base = OTHER; note = 2'-fluorouridine-3'-phosphate
  modified_base 11: mod_base = OTHER; note = 2'-fluoroguanosine-3'-phosphate
  modified_base 12: mod_base = OTHER; note = 2'-O-methylcytidine-3'-phosphate
  modified_base 13: mod_base = OTHER; note = 2'-fluorouridine-3'-phosphate
  modified_base 14: mod_base = OTHER; note = 2'-O-methyluridine-3'-phosphate
  modified_base 15: mod_base = OTHER; note = 2'-fluorouridine-3'-phosphate
  modified_base 16: mod_base = OTHER; note = 2'-O-methyluridine-3'-phosphate
  modified_base 17: mod_base = OTHER; note = 2'-fluoroguanosine-3'-phosphate
  modified_base 18: mod_base = OTHER; note = 2'-O-methyluridine-3'-phosphate
  modified_base 19: mod_base = OTHER; note = 2'-fluoroadenosine-3'-phosphate
  modified_base 20: mod_base = OTHER; note = 2'-O-methyladenosine-3'-phosphate
  modified_base 21: mod_base = OTHER; note = 2'-fluorocytidine
gacctgttttgcttttgtaac

SEQ ID NO: 2073 - RNA, 22 nt, synthetic construct
  source 1..22: mol_type = other RNA
  modified_base 1: mod_base = OTHER; note = 2'-O-methylguanosine-3'-phosphorothioate
  modified_base 2: mod_base = OTHER; note = 2'-fluorouridine-3'-phosphorothioate
  modified_base 3: mod_base = OTHER; note = 2'-O-methyluridine-3'-phosphate
  modified_base 4: mod_base = OTHER; note = 2'-fluoroadenosine-3'-phosphate
  modified_base 5: mod_base = OTHER; note = 2'-O-methylcytidine-3'-phosphate
  modified_base 6: mod_base = OTHER; note = 2'-fluoroadenosine-3'-phosphate
  modified_base 7: mod_base = OTHER; note = 2'-O-methyladenosine-3'-phosphate
  modified_base 8: mod_base = OTHER; note = 2'-fluoroadenosine-3'-phosphate
  modified_base 9: mod_base = OTHER; note = 2'-O-methyladenosine-3'-phosphate
  modified_base 10: mod_base = OTHER; note = 2'-fluoroguanosine-3'-phosphate
  modified_base 11: mod_base = OTHER; note = 2'-O-methylcytidine-3'-phosphate
  modified_base 12: mod_base = OTHER; note = 2'-O-methyladenosine-3'-phosphate
  modified_base 13: mod_base = OTHER; note = 2'-fluoroadenosine-3'-phosphate
  modified_base 14: mod_base = OTHER; note = 2'-O-methyladenosine-3'-phosphate
  modified_base 15: mod_base = OTHER; note = 2'-fluorocytidine-3'-phosphate
  modified_base 16: mod_base = OTHER; note = 2'-O-methyladenosine-3'-phosphate
  modified_base 17: mod_base = OTHER; note = 2'-fluoroguanosine-3'-phosphate
  modified_base 18: mod_base = OTHER; note = 2'-O-methylguanosine-3'-phosphate
  modified_base 19: mod_base = OTHER; note = 2'-fluorouridine-3'-phosphate
  modified_base 20: mod_base = OTHER; note = 2'-O-methylcytidine-3'-phosphorothioate
  modified_base 21: mod_base = OTHER; note = 2'-O-methyluridine-3'-phosphorothioate
  modified_base 22: mod_base = OTHER; note = 2'-O-methyladenosine
gttacaaaagcaaacaggtcta

SEQ ID NO: 2074 - RNA, 21 nt, synthetic construct
  source 1..21: mol_type = other RNA
  modified_base 1: mod_base = OTHER; note = 2'-fluoroadenosine-3'-phosphorothioate
  modified_base 2: mod_base = OTHER; note = 2'-O-methylcytidine-3'-phosphorothioate
  modified_base 3: mod_base = OTHER; note = 2'-fluorocytidine-3'-phosphate
  modified_base 4: mod_base = OTHER; note = 2'-O-methyluridine-3'-phosphate
  modified_base 5: mod_base = OTHER; note = 2'-fluoroguanosine-3'-phosphate
  modified_base 6: mod_base = OTHER; note = 2'-O-methyluridine-3'-phosphate
  modified_base 7: mod_base = OTHER; note = 2'-fluorouridine-3'-phosphate
  modified_base 8: mod_base = OTHER; note = 2'-O-methyluridine-3'-phosphate
  modified_base 9: mod_base = OTHER; note = 2'-fluorouridine-3'-phosphate
  modified_base 10: mod_base = OTHER; note = 2'-fluoroguanosine-3'-phosphate
  modified_base 11: mod_base = OTHER; note = 2'-fluorocytidine-3'-phosphate
  modified_base 12: mod_base = OTHER; note = 2'-O-methyluridine-3'-phosphate
  modified_base 13: mod_base = OTHER; note = 2'-fluorouridine-3'-phosphate
  modified_base 14: mod_base = OTHER; note = 2'-O-methyluridine-3'-phosphate
  modified_base 15: mod_base = OTHER; note = 2'-fluorouridine-3'-phosphate
  modified_base 16: mod_base = OTHER; note = 2'-O-methylguanosine-3'-phosphate
  modified_base 17: mod_base = OTHER; note = 2'-fluorouridine-3'-phosphate
  modified_base 18: mod_base = OTHER; note = 2'-O-methyladenosine-3'-phosphate
  modified_base 19: mod_base = OTHER; note = 2'-fluoroadenosine-3'-phosphate
  modified_base 20: mod_base = OTHER; note = 2'-O-methylcytidine-3'-phosphate
  modified_base 21: mod_base = OTHER; note = 2'-fluorouridine
acctgttttgcttttgtaact

SEQ ID NO: 2075 - RNA, 23 nt, synthetic construct
  source 1..23: mol_type = other RNA
  modified_base 1: mod_base = OTHER; note = 2'-O-methyladenosine-3'-phosphorothioate
  modified_base 2: mod_base = OTHER; note = 2'-fluoroguanosine-3'-phosphorothioate
  modified_base 3: mod_base = OTHER; note = 2'-O-methyluridine-3'-phosphate
  modified_base 4: mod_base = OTHER; note = 2'-fluorouridine-3'-phosphate
  modified_base 5: mod_base = OTHER; note = 2'-O-methyladenosine-3'-phosphate
  modified_base 6: mod_base = OTHER; note = 2'-fluorocytidine-3'-phosphate
  modified_base 7: mod_base = OTHER; note = 2'-O-methyladenosine-3'-phosphate
  modified_base 8: mod_base = OTHER; note = 2'-fluoroadenosine-3'-phosphate
  modified_base 9: mod_base = OTHER; note = 2'-O-methyladenosine-3'-phosphate
  modified_base 10: mod_base = OTHER; note = 2'-fluoroadenosine-3'-phosphate
  modified_base 11: mod_base = OTHER; note = 2'-O-methylguanosine-3'-phosphate
  modified_base 12: mod_base = OTHER; note = 2'-O-methylcytidine-3'-phosphate
  modified_base 13: mod_base = OTHER; note = 2'-O-methyladenosine-3'-phosphate
  modified_base 14: mod_base = OTHER; note = 2'-fluoroadenosine-3'-phosphate
  modified_base 15: mod_base = OTHER; note = 2'-O-methyladenosine-3'-phosphate
  modified_base 16: mod_base = OTHER; note = 2'-fluoroadenosine-3'-phosphate
  modified_base 17: mod_base = OTHER; note = 2'-O-methylcytidine-3'-phosphate
  modified_base 18: mod_base = OTHER; note = 2'-fluoroadenosine-3'-phosphate
  modified_base 19: mod_base = OTHER; note = 2'-O-methylguanosine-3'-phosphate
  modified_base 20: mod_base = OTHER; note = 2'-fluoroguanosine-3'-phosphate
  modified_base 21: mod_base = OTHER; note = 2'-O-methyluridine-3'-phosphorothioate
  modified_base 22: mod_base = OTHER; note = 2'-O-methylcytidine-3'-phosphorothioate
  modified_base 23: mod_base = OTHER; note = 2'-O-methyluridine
agttacaaaagcaaaacaggtct

SEQ ID NO: 2076 - RNA, 21 nt, synthetic construct
  source 1..21: mol_type = other RNA
  modified_base 1: mod_base = OTHER; note = 2'-fluorocytidine-3'-phosphorothioate
  modified_base 2: mod_base = OTHER; note = 2'-O-methyluridine-3'-phosphorothioate
  modified_base 3: mod_base = OTHER; note = 2'-fluoroguanosine-3'-phosphate
  modified_base 4: mod_base = OTHER; note = 2'-O-methyluridine-3'-phosphate
  modified_base 5: mod_base = OTHER; note = 2'-fluorouridine-3'-phosphate
  modified_base 6: mod_base = OTHER; note = 2'-O-methyluridine-3'-phosphate
  modified_base 7: mod_base = OTHER; note = 2'-fluorouridine-3'-phosphate
  modified_base 8: mod_base = OTHER; note = 2'-O-methylguanosine-3'-phosphate
  modified_base 9: mod_base = OTHER; note = 2'-fluorocytidine-3'-phosphate
  modified_base 10: mod_base = OTHER; note = 2'-fluorouridine-3'-phosphate
  modified_base 11: mod_base = OTHER; note = 2'-fluorouridine-3'-phosphate
  modified_base 12: mod_base = OTHER; note = 2'-O-methyluridine-3'-phosphate
  modified_base 13: mod_base = OTHER; note = 2'-fluorouridine-3'-phosphate
  modified_base 14: mod_base = OTHER; note = 2'-O-methylguanosine-3'-phosphate
  modified_base 15: mod_base = OTHER; note = 2'-fluorouridine-3'-phosphate
  modified_base 16: mod_base = OTHER; note = 2'-O-methyladenosine-3'-phosphate
  modified_base 17: mod_base = OTHER; note = 2'-fluoroadenosine-3'-phosphate
  modified_base 18: mod_base = OTHER; note = 2'-O-methylcytidine-3'-phosphate
  modified_base 19: mod_base = OTHER; note = 2'-fluorouridine-3'-phosphate
  modified_base 20: mod_base = OTHER; note = 2'-O-methyluridine-3'-phosphate
  modified_base 21: mod_base = OTHER; note = 2'-fluoroguanosine
ctgttttgcttttgtaacttg

SEQ ID NO: 2077 - RNA, 23 nt, synthetic construct
  source 1..23: mol_type = other RNA
  modified_base 1: mod_base = OTHER; note = 2'-O-methylcytidine-3'-phosphorothioate
  modified_base 2: mod_base = OTHER; note = 2'-fluoroadenosine-3'-phosphorothioate
  modified_base 3: mod_base = OTHER; note = 2'-O-methyladenosine-3'-phosphate
  modified_base 4: mod_base = OTHER; note = 2'-fluoroguanosine-3'-phosphate
  modified_base 5: mod_base = OTHER; note = 2'-O-methyluridine-3'-phosphate
  modified_base 6: mod_base = OTHER; note = 2'-fluorouridine-3'-phosphate
  modified_base 7: mod_base = OTHER; note = 2'-O-methyladenosine-3'-phosphate
  modified_base 8: mod_base = OTHER; note = 2'-fluorocytidine-3'-phosphate
  modified_base 9: mod_base = OTHER; note = 2'-O-methyladenosine-3'-phosphate
  modified_base 10: mod_base = OTHER; note = 2'-fluoroadenosine-3'-phosphate
  modified_base 11: mod_base = OTHER; note = 2'-O-methyladenosine-3'-phosphate
  modified_base 12: mod_base = OTHER; note = 2'-O-methyladenosine-3'-phosphate
  modified_base 13: mod_base = OTHER; note = 2'-O-methylguanosine-3'-phosphate
  modified_base 14: mod_base = OTHER; note = 2'-fluorocytidine-3'-phosphate
  modified_base 15: mod_base = OTHER; note = 2'-O-methyladenosine-3'-phosphate
  modified_base 16: mod_base = OTHER; note = 2'-fluoroadenosine-3'-phosphate
  modified_base 17: mod_base = OTHER; note = 2'-O-methyladenosine-3'-phosphate
  modified_base 18: mod_base = OTHER; note = 2'-fluoroadenosine-3'-phosphate
  modified_base 19: mod_base = OTHER; note = 2'-O-methylcytidine-3'-phosphate
  modified_base 20: mod_base = OTHER; note = 2'-fluoroadenosine-3'-phosphate
  modified_base 21: mod_base = OTHER; note = 2'-O-methylguanosine-3'-phosphorothioate
  modified_base 22: mod_base = OTHER; note = 2'-O-methylguanosine-3'-phosphorothioate
  modified_base 23: mod_base = OTHER; note = 2'-O-methyluridine
caagttacaaaagcaaaacaggt

SEQ ID NO: 2078 - RNA, 21 nt, synthetic construct
  source 1..21: mol_type = other RNA
  modified_base 1: mod_base = OTHER; note = 2'-fluorouridine-3'-phosphorothioate
  modified_base 2: mod_base = OTHER; note = 2'-O-methyluridine-3'-phosphorothioate
  modified_base 3: mod_base = OTHER; note = 2'-fluorouridine-3'-phosphate
  modified_base 4: mod_base = OTHER; note = 2'-O-methylguanosine-3'-phosphate
  modified_base 5: mod_base = OTHER; note = 2'-fluorouridine-3'-phosphate
  modified_base 6: mod_base = OTHER; note = 2'-O-methyladenosine-3'-phosphate
  modified_base 7: mod_base = OTHER; note = 2'-fluoroadenosine-3'-phosphate
  modified_base 8: mod_base = OTHER; note = 2'-O-methylcytidine-3'-phosphate
  modified_base 9: mod_base = OTHER; note = 2'-fluorouridine-3'-phosphate
  modified_base 10: mod_base = OTHER; note = 2'-fluorouridine-3'-phosphate
  modified_base 11: mod_base = OTHER; note = 2'-fluoroguanosine-3'-phosphate
  modified_base 12: mod_base = OTHER; note = 2'-O-methyladenosine-3'-phosphate
  modified_base 13: mod_base = OTHER; note = 2'-fluoroadenosine-3'-phosphate
  modified_base 14: mod_base = OTHER; note = 2'-O-methylguanosine-3'-phosphate
  modified_base 15: mod_base = OTHER; note = 2'-fluoroadenosine-3'-phosphate
  modified_base 16: mod_base = OTHER; note = 2'-O-methyluridine-3'-phosphate
  modified_base 17: mod_base = OTHER; note = 2'-fluoroadenosine-3'-phosphate
  modified_base 18: mod_base = OTHER; note = 2'-O-methyluridine-3'-phosphate
  modified_base 19: mod_base = OTHER; note = 2'-fluorouridine-3'-phosphate
  modified_base 20: mod_base = OTHER; note = 2'-O-methyluridine-3'-phosphate
  modified_base 21: mod_base = OTHER; note = 2'-fluoroadenosine
tttgtaacttgaagatattta

SEQ ID NO: 2079 - RNA, 23 nt, synthetic construct
  source 1..23: mol_type = other RNA
  modified_base 1: mod_base = OTHER; note = 2'-O-methyluridine-3'-phosphorothioate
  modified_base 2: mod_base = OTHER; note = 2'-fluoroadenosine-3'-phosphorothioate
  modified_base 3: mod_base = OTHER; note = 2'-O-methyladenosine-3'-phosphate
  modified_base 4: mod_base = OTHER; note = 2'-fluoroadenosine-3'-phosphate
  modified_base 5: mod_base = OTHER; note = 2'-O-methyluridine-3'-phosphate
  modified_base 6: mod_base = OTHER; note = 2'-fluoroadenosine-3'-phosphate
  modified_base 7: mod_base = OTHER; note = 2'-O-methyluridine-3'-phosphate
  modified_base 8: mod_base = OTHER; note = 2'-fluorocytidine-3'-phosphate
  modified_base 9: mod_base = OTHER; note = 2'-O-methyluridine-3'-phosphate
  modified_base 10: mod_base = OTHER; note = 2'-fluorouridine-3'-phosphate
  modified_base 11: mod_base = OTHER; note = 2'-O-methylcytidine-3'-phosphate
  modified_base 12: mod_base = OTHER; note = 2'-O-methyladenosine-3'-phosphate
  modified_base 13: mod_base = OTHER; note = 2'-O-methyladenosine-3'-phosphate
  modified_base 14: mod_base = OTHER; note = 2'-fluoroguanosine-3'-phosphate
  modified_base 15: mod_base = OTHER; note = 2'-O-methyluridine-3'-phosphate
  modified_base 16: mod_base = OTHER; note = 2'-fluorouridine-3'-phosphate
  modified_base 17: mod_base = OTHER; note = 2'-O-methyladenosine-3'-phosphate
  modified_base 18: mod_base = OTHER; note = 2'-fluorocytidine-3'-phosphate
  modified_base 19: mod_base = OTHER; note = 2'-O-methyladenosine-3'-phosphate
  modified_base 20: mod_base = OTHER; note = 2'-fluoroadenosine-3'-phosphate
  modified_base 21: mod_base = OTHER; note = 2'-O-methyladenosine-3'-phosphorothioate
  modified_base 22: mod_base = OTHER; note = 2'-O-methyladenosine-3'-phosphorothioate
  modified_base 23: mod_base = OTHER; note = 2'-O-methylguanosine
taaatatcttcaagttacaaaag

SEQ ID NO: 2080 - RNA, 21 nt, synthetic construct
  source 1..21: mol_type = other RNA
  modified_base 1: mod_base = OTHER; note = 2'-fluorouridine-3'-phosphorothioate
  modified_base 2: mod_base = OTHER; note = 2'-O-methyluridine-3'-phosphorothioate
  modified_base 3: mod_base = OTHER; note = 2'-fluoroguanosine-3'-phosphate
  modified_base 4: mod_base = OTHER; note = 2'-O-methyluridine-3'-phosphate
  modified_base 5: mod_base = OTHER; note = 2'-fluoroadenosine-3'-phosphate
  modified_base 6: mod_base = OTHER; note = 2'-O-methyladenosine-3'-phosphate
  modified_base 7: mod_base = OTHER; note = 2'-fluorocytidine-3'-phosphate
  modified_base 8: mod_base = OTHER; note = 2'-O-methyluridine-3'-phosphate
  modified_base 9: mod_base = OTHER; note = 2'-fluorouridine-3'-phosphate
  modified_base 10: mod_base = OTHER; note = 2'-fluoroguanosine-3'-phosphate
  modified_base 11: mod_base = OTHER; note = 2'-fluoroadenosine-3'-phosphate
  modified_base 12: mod_base = OTHER; note = 2'-O-methyladenosine-3'-phosphate
  modified_base 13: mod_base = OTHER; note = 2'-fluoroguanosine-3'-phosphate
  modified_base 14: mod_base = OTHER; note = 2'-O-methyladenosine-3'-phosphate
  modified_base 15: mod_base = OTHER; note = 2'-fluorouridine-3'-phosphate
  modified_base 16: mod_base = OTHER; note = 2'-O-methyladenosine-3'-phosphate
  modified_base 17: mod_base = OTHER; note = 2'-fluorouridine-3'-phosphate
  modified_base 18: mod_base = OTHER; note = 2'-O-methyluridine-3'-phosphate
  modified_base 19: mod_base = OTHER; note = 2'-fluorouridine-3'-phosphate
  modified_base 20: mod_base = OTHER; note = 2'-O-methyladenosine-3'-phosphate
  modified_base 21: mod_base = OTHER; note = 2'-fluorouridine
ttgtaacttgaagatatttat

SEQ ID NO: 2081 - RNA, 23 nt, synthetic construct
  source 1..23: mol_type = other RNA
  modified_base 1: mod_base = OTHER; note = 2'-O-methyladenosine-3'-phosphorothioate
  modified_base 2: mod_base = OTHER; note = 2'-fluorouridine-3'-phosphorothioate
  modified_base 3: mod_base = OTHER; note = 2'-O-methyladenosine-3'-phosphate
  modified_base 4: mod_base = OTHER; note = 2'-fluoroadenosine-3'-phosphate
  modified_base 5: mod_base = OTHER; note = 2'-O-methyladenosine-3'-phosphate
  modified_base 6: mod_base = OTHER; note = 2'-fluorouridine-3'-phosphate
  modified_base 7: mod_base = OTHER; note = 2'-O-methyladenosine-3'-phosphate
  modified_base 8: mod_base = OTHER; note = 2'-fluorouridine-3'-phosphate
  modified_base 9: mod_base = OTHER; note = 2'-O-methylcytidine-3'-phosphate
  modified_base 10: mod_base = OTHER; note = 2'-fluorouridine-3'-phosphate
  modified_base 11: mod_base = OTHER; note = 2'-O-methyluridine-3'-phosphate
  modified_base 12: mod_base = OTHER; note = 2'-O-methylcytidine-3'-phosphate
  modified_base 13: mod_base = OTHER; note = 2'-O-methyladenosine-3'-phosphate
  modified_base 14: mod_base = OTHER; note = 2'-fluoroadenosine-3'-phosphate
  modified_base 15: mod_base = OTHER; note = 2'-O-methylguanosine-3'-phosphate
  modified_base 16: mod_base = OTHER; note = 2'-fluorouridine-3'-phosphate
  modified_base 17: mod_base = OTHER; note = 2'-O-methyluridine-3'-phosphate
  modified_base 18: mod_base = OTHER; note = 2'-fluoroadenosine-3'-phosphate
  modified_base 19: mod_base = OTHER; note = 2'-O-methylcytidine-3'-phosphate
  modified_base 20: mod_base = OTHER; note = 2'-fluoroadenosine-3'-phosphate
  modified_base 21: mod_base = OTHER; note = 2'-O-methyladenosine-3'-phosphorothioate
  modified_base 22: mod_base = OTHER; note = 2'-O-methyladenosine-3'-phosphorothioate
  modified_base 23: mod_base = OTHER; note = 2'-O-methyladenosine
ataaatatcttcaagttacaaaa

SEQ ID NO: 2082 - RNA, 21 nt, synthetic construct
  source 1..21: mol_type = other RNA
  modified_base 1: mod_base = OTHER; note = 2'-fluorouridine-3'-phosphorothioate
  modified_base 2: mod_base = OTHER; note = 2'-O-methylguanosine-3'-phosphorothioate
  modified_base 3: mod_base = OTHER; note = 2'-fluorouridine-3'-phosphate
  modified_base 4: mod_base = OTHER; note = 2'-O-methyladenosine-3'-phosphate
  modified_base 5: mod_base = OTHER; note = 2'-fluoroadenosine-3'-phosphate
  modified_base 6: mod_base = OTHER; note = 2'-O-methylcytidine-3'-phosphate
  modified_base 7: mod_base = OTHER; note = 2'-fluorouridine-3'-phosphate
  modified_base 8: mod_base = OTHER; note = 2'-O-methyluridine-3'-phosphate
  modified_base 9: mod_base = OTHER; note = 2'-fluoroguanosine-3'-phosphate
  modified_base 10: mod_base = OTHER; note = 2'-fluoroadenosine-3'-phosphate
  modified_base 11: mod_base = OTHER; note = 2'-fluoroadenosine-3'-phosphate
  modified_base 12: mod_base = OTHER; note = 2'-O-methylguanosine-3'-phosphate
  modified_base 13: mod_base = OTHER; note = 2'-fluoroadenosine-3'-phosphate
  modified_base 14: mod_base = OTHER; note = 2'-O-methyluridine-3'-phosphate
  modified_base 15: mod_base = OTHER; note = 2'-fluoroadenosine-3'-phosphate
  modified_base 16: mod_base = OTHER; note = 2'-O-methyluridine-3'-phosphate
  modified_base 17: mod_base = OTHER; note = 2'-fluorouridine-3'-phosphate
  modified_base 18: mod_base = OTHER; note = 2'-O-methyluridine-3'-phosphate
  modified_base 19: mod_base = OTHER; note = 2'-fluoroadenosine-3'-phosphate
  modified_base 20: mod_base = OTHER; note = 2'-O-methyluridine-3'-phosphate
  modified_base 21: mod_base = OTHER; note = 2'-fluorouridine
tgtaacttgaagatatttatt

SEQ ID NO: 2083 - RNA, 23 nt, synthetic construct
  source 1..23: mol_type = other RNA
  modified_base 1: mod_base = OTHER; note = 2'-O-methyladenosine-3'-phosphorothioate
  modified_base 2: mod_base = OTHER; note = 2'-fluoroadenosine-3'-phosphorothioate
  modified_base 3: mod_base = OTHER; note = 2'-O-methyluridine-3'-phosphate
  modified_base 4: mod_base = OTHER; note = 2'-fluoroadenosine-3'-phosphate
  modified_base 5: mod_base = OTHER; note = 2'-O-methyladenosine-3'-phosphate
  modified_base 6: mod_base = OTHER; note = 2'-fluoroadenosine-3'-phosphate
  modified_base 7: mod_base = OTHER; note = 2'-O-methyluridine-3'-phosphate
  modified_base 8: mod_base = OTHER; note = 2'-fluoroadenosine-3'-phosphate
  modified_base 9: mod_base = OTHER; note = 2'-O-methyluridine-3'-phosphate
  modified_base 10: mod_base = OTHER; note = 2'-fluorocytidine-3'-phosphate
  modified_base 11: mod_base = OTHER; note = 2'-O-methyluridine-3'-phosphate
  modified_base 12: mod_base = OTHER; note = 2'-O-methyluridine-3'-phosphate
  modified_base 13: mod_base = OTHER; note = 2'-O-methylcytidine-3'-phosphate
  modified_base 14: mod_base = OTHER; note = 2'-fluoroadenosine-3'-phosphate
  modified_base 15: mod_base = OTHER; note = 2'-O-methyladenosine-3'-phosphate
  modified_base 16: mod_base = OTHER; note = 2'-fluoroguanosine-3'-phosphate
  modified_base 17: mod_base = OTHER; note = 2'-O-methyluridine-3'-phosphate
  modified_base 18: mod_base = OTHER; note = 2'-fluorouridine-3'-phosphate
  modified_base 19: mod_base = OTHER; note = 2'-O-methyladenosine-3'-phosphate
  modified_base 20: mod_base = OTHER; note = 2'-fluorocytidine-3'-phosphate
  modified_base 21: mod_base = OTHER; note = 2'-O-methyladenosine-3'-phosphorothioate
  modified_base 22: mod_base = OTHER; note = 2'-O-methyladenosine-3'-phosphorothioate
  modified_base 23: mod_base = OTHER; note = 2'-O-methyladenosine
aataaatatcttcaagttacaaa

SEQ ID NO: 2084 - RNA, 21 nt, synthetic construct
  source 1..21: mol_type = other RNA
  modified_base 1: mod_base = OTHER; note = 2'-fluoroguanosine-3'-phosphorothioate
  modified_base 2: mod_base = OTHER; note = 2'-O-methyluridine-3'-phosphorothioate
  modified_base 3: mod_base = OTHER; note = 2'-fluoroadenosine-3'-phosphate
  modified_base 4: mod_base = OTHER; note = 2'-O-methyladenosine-3'-phosphate
  modified_base 5: mod_base = OTHER; note = 2'-fluorocytidine-3'-phosphate
  modified_base 6: mod_base = OTHER; note = 2'-O-methyluridine-3'-phosphate
  modified_base 7: mod_base = OTHER; note = 2'-fluorouridine-3'-phosphate
  modified_base 8: mod_base = OTHER; note = 2'-O-methylguanosine-3'-phosphate
  modified_base 9: mod_base = OTHER; note = 2'-fluoroadenosine-3'-phosphate
  modified_base 10: mod_base = OTHER; note = 2'-fluoroadenosine-3'-phosphate
  modified_base 11: mod_base = OTHER; note = 2'-fluoroguanosine-3'-phosphate
  modified_base 12: mod_base = OTHER; note = 2'-O-methyladenosine-3'-phosphate
  modified_base 13: mod_base = OTHER; note = 2'-fluorouridine-3'-phosphate
  modified_base 14: mod_base = OTHER; note = 2'-O-methyladenosine-3'-phosphate
  modified_base 15: mod_base = OTHER; note = 2'-fluorouridine-3'-phosphate
  modified_base 16: mod_base = OTHER; note = 2'-O-methyluridine-3'-phosphate
  modified_base 17: mod_base = OTHER; note = 2'-fluorouridine-3'-phosphate
  modified_base 18: mod_base = OTHER; note = 2'-O-methyladenosine-3'-phosphate
  modified_base 19: mod_base = OTHER; note = 2'-fluorouridine-3'-phosphate
  modified_base 20: mod_base = OTHER; note = 2'-O-methyluridine-3'-phosphate
  modified_base 21: mod_base = OTHER; note = 2'-fluorocytidine
gtaacttgaagatatttattc

SEQ ID NO: 2085 - RNA, 23 nt, synthetic construct
  source 1..23: mol_type = other RNA
  modified_base 1: mod_base = OTHER; note = 2'-O-methylguanosine-3'-phosphorothioate
  modified_base 2: mod_base = OTHER; note = 2'-fluoroadenosine-3'-phosphorothioate
  modified_base 3: mod_base = OTHER; note = 2'-O-methyladenosine-3'-phosphate
  modified_base 4: mod_base = OTHER; note = 2'-fluorouridine-3'-phosphate
  modified_base 5: mod_base = OTHER; note = 2'-O-methyladenosine-3'-phosphate
  modified_base 6: mod_base = OTHER; note = 2'-fluoroadenosine-3'-phosphate
  modified_base 7: mod_base = OTHER; note = 2'-O-methyladenosine-3'-phosphate
  modified_base 8: mod_base = OTHER; note = 2'-fluorouridine-3'-phosphate
  modified_base 9: mod_base = OTHER; note = 2'-O-methyladenosine-3'-phosphate
  modified_base 10: mod_base = OTHER; note = 2'-fluorouridine-3'-phosphate
  modified_base 11: mod_base = OTHER; note = 2'-O-methylcytidine-3'-phosphate
  modified_base 12: mod_base = OTHER; note = 2'-O-methyluridine-3'-phosphate
  modified_base 13: mod_base = OTHER; note = 2'-O-methyluridine-3'-phosphate
  modified_base 14: mod_base = OTHER; note = 2'-fluorocytidine-3'-phosphate
  modified_base 15: mod_base = OTHER; note = 2'-O-methyladenosine-3'-phosphate
  modified_base 16: mod_base = OTHER; note = 2'-fluoroadenosine-3'-phosphate
  modified_base 17: mod_base = OTHER; note = 2'-O-methylguanosine-3'-phosphate
  modified_base 18: mod_base = OTHER; note = 2'-fluorouridine-3'-phosphate
  modified_base 19: mod_base = OTHER; note = 2'-O-methyluridine-3'-phosphate
  modified_base 20: mod_base = OTHER; note = 2'-fluoroadenosine-3'-phosphate
  modified_base 21: mod_base = OTHER; note = 2'-O-methylcytidine-3'-phosphorothioate
  modified_base 22: mod_base = OTHER; note = 2'-O-methyladenosine-3'-phosphorothioate
  modified_base 23: mod_base = OTHER; note = 2'-O-methyladenosine
gaataaatatcttcaagttacaa

SEQ ID NO: 2086 - RNA, 21 nt, synthetic construct
  source 1..21: mol_type = other RNA
  modified_base 1: mod_base = OTHER; note = 2'-fluoroadenosine-3'-phosphorothioate
  modified_base 2: mod_base = OTHER; note = 2'-O-methyluridine-3'-phosphorothioate
  modified_base 3: mod_base = OTHER; note = 2'-fluoroadenosine-3'-phosphate
  modified_base 4: mod_base = OTHER; note = 2'-O-methyluridine-3'-phosphate
  modified_base 5: mod_base = OTHER; note = 2'-fluorouridine-3'-phosphate
  modified_base 6: mod_base = OTHER; note = 2'-O-methyluridine-3'-phosphate
  modified_base 7: mod_base = OTHER; note = 2'-fluoroadenosine-3'-phosphate
  modified_base 8: mod_base = OTHER; note = 2'-O-methyluridine-3'-phosphate
  modified_base 9: mod_base = OTHER; note = 2'-fluorouridine-3'-phosphate
  modified_base 10: mod_base = OTHER; note = 2'-fluorocytidine-3'-phosphate
  modified_base 11: mod_base = OTHER; note = 2'-fluorouridine-3'-phosphate
  modified_base 12: mod_base = OTHER; note = 2'-O-methylguanosine-3'-phosphate
  modified_base 13: mod_base = OTHER; note = 2'-fluoroguanosine-3'-phosphate
  modified_base 14: mod_base = OTHER; note = 2'-O-methylguanosine-3'-phosphate
  modified_base 15: mod_base = OTHER; note = 2'-fluorouridine-3'-phosphate
  modified_base 16: mod_base = OTHER; note = 2'-O-methyluridine-3'-phosphate
  modified_base 17: mod_base = OTHER; note = 2'-fluorouridine-3'-phosphate
  modified_base 18: mod_base = OTHER; note = 2'-O-methyluridine-3'-phosphate
  modified_base 19: mod_base = OTHER; note = 2'-fluoroguanosine-3'-phosphate
  modified_base 20: mod_base = OTHER; note = 2'-O-methyluridine-3'-phosphate
  modified_base 21: mod_base = OTHER; note = 2'-fluoroadenosine
atatttattctgggttttgta

SEQ ID NO: 2087 - RNA, 23 nt, synthetic construct
  source 1..23: mol_type = other RNA
  modified_base 1: mod_base = OTHER; note = 2'-O-methyluridine-3'-phosphorothioate
  modified_base 2: mod_base = OTHER; note = 2'-fluoroadenosine-3'-phosphorothioate
  modified_base 3: mod_base = OTHER; note = 2'-O-methylcytidine-3'-phosphate
  modified_base 4: mod_base = OTHER; note = 2'-fluoroadenosine-3'-phosphate
  modified_base 5: mod_base = OTHER; note = 2'-O-methyladenosine-3'-phosphate
  modified_base 6: mod_base = OTHER; note = 2'-fluoroadenosine-3'-phosphate
  modified_base 7: mod_base = OTHER; note = 2'-O-methyladenosine-3'-phosphate
  modified_base 8: mod_base = OTHER; note = 2'-fluorocytidine-3'-phosphate
  modified_base 9: mod_base = OTHER; note = 2'-O-methylcytidine-3'-phosphate
  modified_base 10: mod_base = OTHER; note = 2'-fluorocytidine-3'-phosphate
  modified_base 11: mod_base = OTHER; note = 2'-O-methyladenosine-3'-phosphate
  modified_base 12: mod_base = OTHER; note = 2'-O-methylguanosine-3'-phosphate
  modified_base 13: mod_base = OTHER; note = 2'-O-methyladenosine-3'-phosphate
  modified_base 14: mod_base = OTHER; note = 2'-fluoroadenosine-3'-phosphate
  modified_base 15: mod_base = OTHER; note = 2'-O-methyluridine-3'-phosphate
  modified_base 16: mod_base = OTHER; note = 2'-fluoroadenosine-3'-phosphate
  modified_base 17: mod_base = OTHER; note = 2'-O-methyladenosine-3'-phosphate
  modified_base 18: mod_base = OTHER; note = 2'-fluoroadenosine-3'-phosphate
  modified_base 19: mod_base = OTHER; note = 2'-O-methyluridine-3'-phosphate
  modified_base 20: mod_base = OTHER; note = 2'-fluoroadenosine-3'-phosphate
  modified_base 21: mod_base = OTHER; note = 2'-O-methyluridine-3'-phosphorothioate
  modified_base 22: mod_base = OTHER; note = 2'-O-methylcytidine-3'-phosphorothioate
  modified_base 23: mod_base = OTHER; note = 2'-O-methyluridine
tacaaaacccagaataaatatct

SEQ ID NO: 2088 - RNA, 21 nt, synthetic construct
  source 1..21: mol_type = other RNA
  modified_base 1: mod_base = OTHER; note = 2'-fluorouridine-3'-phosphorothioate
  modified_base 2: mod_base = OTHER; note = 2'-O-methyluridine-3'-phosphorothioate
  modified_base 3: mod_base = OTHER; note = 2'-fluorouridine-3'-phosphate
  modified_base 4: mod_base = OTHER; note = 2'-O-methyladenosine-3'-phosphate
  modified_base 5: mod_base = OTHER; note = 2'-fluorouridine-3'-phosphate
  modified_base 6: mod_base = OTHER; note = 2'-O-methyluridine-3'-phosphate
  modified_base 7: mod_base = OTHER; note = 2'-fluorocytidine-3'-phosphate
  modified_base 8: mod_base = OTHER; note = 2'-O-methyluridine-3'-phosphate
  modified_base 9: mod_base = OTHER; note = 2'-fluoroguanosine-3'-phosphate
  modified_base 10: mod_base = OTHER; note = 2'-fluoroguanosine-3'-phosphate
  modified_base 11: mod_base = OTHER; note = 2'-fluoroguanosine-3'-phosphate
  modified_base 12: mod_base = OTHER; note = 2'-O-methyluridine-3'-phosphate
  modified_base 13: mod_base = OTHER; note = 2'-fluorouridine-3'-phosphate
  modified_base 14: mod_base = OTHER; note = 2'-O-methyluridine-3'-phosphate
  modified_base 15: mod_base = OTHER; note = 2'-fluorouridine-3'-phosphate
  modified_base 16: mod_base = OTHER; note = 2'-O-methylguanosine-3'-phosphate
  modified_base 17: mod_base = OTHER; note = 2'-fluorouridine-3'-phosphate
  modified_base 18: mod_base = OTHER; note = 2'-O-methyladenosine-3'-phosphate
  modified_base 19: mod_base = OTHER; note = 2'-fluoroguanosine-3'-phosphate
  modified_base 20: mod_base = OTHER; note = 2'-O-methylcytidine-3'-phosphate
  modified_base 21: mod_base = OTHER; note = 2'-fluoroadenosine
tttattctgggttttgtagca

SEQ ID NO: 2089 - RNA, 23 nt, synthetic construct
  source 1..23: mol_type = other RNA
  modified_base 1: mod_base = OTHER; note = 2'-O-methyluridine-3'-phosphorothioate
  modified_base 2: mod_base = OTHER; note = 2'-fluoroguanosine-3'-phosphorothioate
  modified_base 3: mod_base = OTHER; note = 2'-O-methylcytidine-3'-phosphate
  modified_base 4: mod_base = OTHER; note = 2'-fluorouridine-3'-phosphate
  modified_base 5: mod_base = OTHER; note = 2'-O-methyladenosine-3'-phosphate
  modified_base 6: mod_base = OTHER; note = 2'-fluorocytidine-3'-phosphate
  modified_base 7: mod_base = OTHER; note = 2'-O-methyladenosine-3'-phosphate
  modified_base 8: mod_base = OTHER; note = 2'-fluoroadenosine-3'-phosphate
  modified_base 9: mod_base = OTHER; note = 2'-O-methyladenosine-3'-phosphate
  modified_base 10: mod_base = OTHER; note = 2'-fluoroadenosine-3'-phosphate
  modified_base 11: mod_base = OTHER; note = 2'-O-methylcytidine-3'-phosphate
  modified_base 12: mod_base = OTHER; note = 2'-O-methylcytidine-3'-phosphate
  modified_base 13: mod_base = OTHER; note = 2'-O-methylcytidine-3'-phosphate
  modified_base 14: mod_base = OTHER; note = 2'-fluoroadenosine-3'-phosphate
  modified_base 15: mod_base = OTHER; note = 2'-O-methylguanosine-3'-phosphate
  modified_base 16: mod_base = OTHER; note = 2'-fluoroadenosine-3'-phosphate
  modified_base 17: mod_base = OTHER; note = 2'-O-methyladenosine-3'-phosphate
  modified_base 18: mod_base = OTHER; note = 2'-fluorouridine-3'-phosphate
  modified_base 19: mod_base = OTHER; note = 2'-O-methyladenosine-3'-phosphate
  modified_base 20: mod_base = OTHER; note = 2'-fluoroadenosine-3'-phosphate
  modified_base 21: mod_base = OTHER; note = 2'-O-methyladenosine-3'-phosphorothioate
  modified_base 22: mod_base = OTHER; note = 2'-O-methyluridine-3'-phosphorothioate
  modified_base 23: mod_base = OTHER; note = 2'-O-methyladenosine
tgctacaaaacccagaataaata

SEQ ID NO: 2090 - RNA, 21 nt, synthetic construct
  source 1..21: mol_type = other RNA
  modified_base 1: mod_base = OTHER; note = 2'-fluoroadenosine-3'-phosphorothioate
  modified_base 2: mod_base = OTHER; note = 2'-O-methyluridine-3'-phosphorothioate
  modified_base 3: mod_base = OTHER; note = 2'-fluorouridine-3'-phosphate
  modified_base 4: mod_base = OTHER; note = 2'-O-methylcytidine-3'-phosphate
  modified_base 5: mod_base = OTHER; note = 2'-fluorouridine-3'-phosphate
  modified_base 6: mod_base = OTHER; note = 2'-O-methylguanosine-3'-phosphate
  modified_base 7: mod_base = OTHER; note = 2'-fluoroguanosine-3'-phosphate
  modified_base 8: mod_base = OTHER; note = 2'-O-methylguanosine-3'-phosphate
  modified_base 9: mod_base = OTHER; note = 2'-fluorouridine-3'-phosphate
  modified_base 10: mod_base = OTHER; note = 2'-fluorouridine-3'-phosphate
  modified_base 11: mod_base = OTHER; note = 2'-fluorouridine-3'-phosphate
  modified_base 12: mod_base = OTHER; note = 2'-O-methyluridine-3'-phosphate
  modified_base 13: mod_base = OTHER; note = 2'-fluoroguanosine-3'-phosphate
  modified_base 14: mod_base = OTHER; note = 2'-O-methyluridine-3'-phosphate
  modified_base 15: mod_base = OTHER; note = 2'-fluoroadenosine-3'-phosphate
  modified_base 16: mod_base = OTHER; note = 2'-O-methylguanosine-3'-phosphate
  modified_base 17: mod_base = OTHER; note = 2'-fluorocytidine-3'-phosphate
  modified_base 18: mod_base = OTHER; note = 2'-O-methyladenosine-3'-phosphate
  modified_base 19: mod_base = OTHER; note = 2'-fluorouridine-3'-phosphate
  modified_base 20: mod_base = OTHER; note = 2'-O-methyluridine-3'-phosphate
  modified_base 21: mod_base = OTHER; note = 2'-fluorouridine
attctgggttttgtagcattt

SEQ ID NO: 2091 - RNA, 23 nt, synthetic construct
  source 1..23: mol_type = other RNA
  modified_base 1: mod_base = OTHER; note = 2'-O-methyladenosine-3'-phosphorothioate
  modified_base 2: mod_base = OTHER; note = 2'-fluoroadenosine-3'-phosphorothioate
  modified_base 3: mod_base = OTHER; note = 2'-O-methyladenosine-3'-phosphate
  modified_base 4: mod_base = OTHER; note = 2'-fluorouridine-3'-phosphate
  modified_base 5: mod_base = OTHER; note = 2'-O-methylguanosine-3'-phosphate
  modified_base 6: mod_base = OTHER; note = 2'-fluorocytidine-3'-phosphate
  modified_base 7: mod_base = OTHER; note = 2'-O-methyluridine-3'-phosphate
  modified_base 8: mod_base = OTHER; note = 2'-fluoroadenosine-3'-phosphate
  modified_base 9: mod_base = OTHER; note = 2'-O-methylcytidine-3'-phosphate
  modified_base 10: mod_base = OTHER; note = 2'-fluoroadenosine-3'-phosphate
  modified_base 11: mod_base = OTHER; note = 2'-O-methyladenosine-3'-phosphate
  modified_base 12: mod_base = OTHER; note = 2'-O-methyladenosine-3'-phosphate
  modified_base 13: mod_base = OTHER; note = 2'-O-methyladenosine-3'-phosphate
  modified_base 14: mod_base = OTHER; note = 2'-fluorocytidine-3'-phosphate
  modified_base 15: mod_base = OTHER; note = 2'-O-methylcytidine-3'-phosphate
  modified_base 16: mod_base = OTHER; note = 2'-fluorocytidine-3'-phosphate
  modified_base 17: mod_base = OTHER; note = 2'-O-methyladenosine-3'-phosphate
  modified_base 18: mod_base = OTHER; note = 2'-fluoroguanosine-3'-phosphate
  modified_base 19: mod_base = OTHER; note = 2'-O-methyladenosine-3'-phosphate
  modified_base 20: mod_base = OTHER; note = 2'-fluoroadenosine-3'-phosphate
  modified_base 21: mod_base = OTHER; note = 2'-O-methyluridine-3'-phosphorothioate
  modified_base 22: mod_base = OTHER; note = 2'-O-methyladenosine-3'-phosphorothioate
  modified_base 23: mod_base = OTHER; note = 2'-O-methyladenosine
aaatgctacaaaacccagaataa

SEQ ID NO: 2092 - RNA, 21 nt, synthetic construct
  source 1..21: mol_type = other RNA
  modified_base 1: mod_base = OTHER; note = 2'-fluorocytidine-3'-phosphorothioate
  modified_base 2: mod_base = OTHER; note = 2'-O-methyluridine-3'-phosphorothioate
  modified_base 3: mod_base = OTHER; note = 2'-fluoroguanosine-3'-phosphate
  modified_base 4: mod_base = OTHER; note = 2'-O-methylguanosine-3'-phosphate
  modified_base 5: mod_base = OTHER; note = 2'-fluoroguanosine-3'-phosphate
  modified_base 6: mod_base = OTHER; note = 2'-O-methyluridine-3'-phosphate
  modified_base 7: mod_base = OTHER; note = 2'-fluorouridine-3'-phosphate
  modified_base 8: mod_base = OTHER; note = 2'-O-methyluridine-3'-phosphate
  modified_base 9: mod_base = OTHER; note = 2'-fluorouridine-3'-phosphate
  modified_base 10: mod_base = OTHER; note = 2'-fluoroguanosine-3'-phosphate
  modified_base 11: mod_base = OTHER; note = 2'-fluorouridine-3'-phosphate
  modified_base 12: mod_base = OTHER; note = 2'-O-methyladenosine-3'-phosphate
  modified_base 13: mod_base = OTHER; note = 2'-fluoroguanosine-3'-phosphate
  modified_base 14: mod_base = OTHER; note = 2'-O-methylcytidine-3'-phosphate
  modified_base 15: mod_base = OTHER; note = 2'-fluoroadenosine-3'-phosphate
  modified_base 16: mod_base = OTHER; note = 2'-O-methyluridine-3'-phosphate
  modified_base 17: mod_base = OTHER; note = 2'-fluorouridine-3'-phosphate
  modified_base 18: mod_base = OTHER; note = 2'-O-methyluridine-3'-phosphate
  modified_base 19: mod_base = OTHER; note = 2'-fluorouridine-3'-phosphate
  modified_base 20: mod_base = OTHER; note = 2'-O-methyluridine-3'-phosphate
  modified_base 21: mod_base = OTHER; note = 2'-fluoroadenosine
ctgggttttgtagcattttta

SEQ ID NO: 2093 - RNA, 23 nt, synthetic construct
  source 1..23: mol_type = other RNA
  modified_base 1: mod_base = OTHER; note = 2'-O-methyluridine-3'-phosphorothioate
  modified_base 2: mod_base = OTHER; note = 2'-fluoroadenosine-3'-phosphorothioate
  modified_base 3: mod_base = OTHER; note = 2'-O-methyladenosine-3'-phosphate
  modified_base 4: mod_base = OTHER; note = 2'-fluoroadenosine-3'-phosphate
  modified_base 5: mod_base = OTHER; note = 2'-O-methyladenosine-3'-phosphate
  modified_base 6: mod_base = OTHER; note = 2'-fluoroadenosine-3'-phosphate
  modified_base 7: mod_base = OTHER; note = 2'-O-methyluridine-3'-phosphate
  modified_base 8: mod_base = OTHER; note = 2'-fluoroguanosine-3'-phosphate
  modified_base 9: mod_base = OTHER; note = 2'-O-methylcytidine-3'-phosphate
  modified_base 10: mod_base = OTHER; note = 2'-fluorouridine-3'-phosphate
  modified_base 11: mod_base = OTHER; note = 2'-O-methyladenosine-3'-phosphate
  modified_base 12: mod_base = OTHER; note = 2'-O-methylcytidine-3'-phosphate
  modified_base 13: mod_base = OTHER; note = 2'-O-methyladenosine-3'-phosphate
  modified_base 14: mod_base = OTHER; note = 2'-fluoroadenosine-3'-phosphate
  modified_base 15: mod_base = OTHER; note = 2'-O-methyladenosine-3'-phosphate
  modified_base 16: mod_base = OTHER; note = 2'-fluoroadenosine-3'-phosphate
  modified_base 17: mod_base = OTHER; note = 2'-O-methylcytidine-3'-phosphate
  modified_base 18: mod_base = OTHER; note = 2'-fluorocytidine-3'-phosphate
  modified_base 19: mod_base = OTHER; note = 2'-O-methylcytidine-3'-phosphate
  modified_base 20: mod_base = OTHER; note = 2'-fluoroadenosine-3'-phosphate
  modified_base 21: mod_base = OTHER; note = 2'-O-methylguanosine-3'-phosphorothioate
  modified_base 22: mod_base = OTHER; note = 2'-O-methyladenosine-3'-phosphorothioate
  modified_base 23: mod_base = OTHER; note = 2'-O-methyladenosine
taaaaatgctacaaaacccagaa

SEQ ID NO: 2094 - RNA, 21 nt, synthetic construct
  source 1..21: mol_type = other RNA
  modified_base 1: mod_base = OTHER; note = 2'-fluorouridine-3'-phosphorothioate
  modified_base 2: mod_base = OTHER; note = 2'-O-methylguanosine-3'-phosphorothioate
  modified_base 3: mod_base = OTHER; note = 2'-fluoroguanosine-3'-phosphate
  modified_base 4: mod_base = OTHER; note = 2'-O-methylguanosine-3'-phosphate
  modified_base 5: mod_base = OTHER; note = 2'-fluorouridine-3'-phosphate
  modified_base 6: mod_base = OTHER; note = 2'-O-methyluridine-3'-phosphate
  modified_base 7: mod_base = OTHER; note = 2'-fluorouridine-3'-phosphate
  modified_base 8: mod_base = OTHER; note = 2'-O-methyluridine-3'-phosphate
  modified_base 9: mod_base = OTHER; note = 2'-fluoroguanosine-3'-phosphate
  modified_base 10: mod_base = OTHER; note = 2'-fluorouridine-3'-phosphate
  modified_base 11: mod_base = OTHER; note = 2'-fluoroadenosine-3'-phosphate
  modified_base 12: mod_base = OTHER; note = 2'-O-methylguanosine-3'-phosphate
  modified_base 13: mod_base = OTHER; note = 2'-fluorocytidine-3'-phosphate
  modified_base 14: mod_base = OTHER; note = 2'-O-methyladenosine-3'-phosphate
  modified_base 15: mod_base = OTHER; note = 2'-fluorouridine-3'-phosphate
  modified_base 16: mod_base = OTHER; note = 2'-O-methyluridine-3'-phosphate
  modified_base 17: mod_base = OTHER; note = 2'-fluorouridine-3'-phosphate
  modified_base 18: mod_base = OTHER; note = 2'-O-methyluridine-3'-phosphate
  modified_base 19: mod_base = OTHER; note = 2'-fluorouridine-3'-phosphate
  modified_base 20: mod_base = OTHER; note = 2'-O-methyladenosine-3'-phosphate
  modified_base 21: mod_base = OTHER; note = 2'-fluorouridine
tgggttttgtagcatttttat

SEQ ID NO: 2095 - RNA, 23 nt, synthetic construct
  source 1..23: mol_type = other RNA
  modified_base 1: mod_base = OTHER; note = 2'-O-methyladenosine-3'-phosphorothioate
  modified_base 2: mod_base = OTHER; note = 2'-fluorouridine-3'-phosphorothioate
  modified_base 3: mod_base = OTHER; note = 2'-O-methyladenosine-3'-phosphate
  modified_base 4: mod_base = OTHER; note = 2'-fluoroadenosine-3'-phosphate
  modified_base 5: mod_base = OTHER; note = 2'-O-methyladenosine-3'-phosphate
  modified_base 6: mod_base = OTHER; note = 2'-fluoroadenosine-3'-phosphate
  modified_base 7: mod_base = OTHER; note = 2'-O-methyladenosine-3'-phosphate
  modified_base 8: mod_base = OTHER; note = 2'-fluorouridine-3'-phosphate
  modified_base 9: mod_base = OTHER; note = 2'-O-methylguanosine-3'-phosphate
  modified_base 10: mod_base = OTHER; note = 2'-fluorocytidine-3'-phosphate
  modified_base 11: mod_base = OTHER; note = 2'-O-methyluridine-3'-phosphate
  modified_base 12: mod_base = OTHER; note = 2'-O-methyladenosine-3'-phosphate
  modified_base 13: mod_base = OTHER; note = 2'-O-methylcytidine-3'-phosphate
  modified_base 14: mod_base = OTHER; note = 2'-fluoroadenosine-3'-phosphate
  modified_base 15: mod_base = OTHER; note = 2'-O-methyladenosine-3'-phosphate
  modified_base 16: mod_base = OTHER; note = 2'-fluoroadenosine-3'-phosphate
  modified_base 17: mod_base = OTHER; note = 2'-O-methyladenosine-3'-phosphate
  modified_base 18: mod_base = OTHER; note = 2'-fluorocytidine-3'-phosphate
  modified_base 19: mod_base = OTHER; note = 2'-O-methylcytidine-3'-phosphate
  modified_base 20: mod_base = OTHER; note = 2'-fluorocytidine-3'-phosphate
  modified_base 21: mod_base = OTHER; note = 2'-O-methyladenosine-3'-phosphorothioate
  modified_base 22: mod_base = OTHER; note = 2'-O-methylguanosine-3'-phosphorothioate
  modified_base 23: mod_base = OTHER; note = 2'-O-methyladenosine
ataaaaatgctacaaaacccaga

SEQ ID NO: 2096 - RNA, 21 nt, synthetic construct
  source 1..21: mol_type = other RNA
  modified_base 1: mod_base = OTHER; note = 2'-fluoroguanosine-3'-phosphorothioate
  modified_base 2: mod_base = OTHER; note = 2'-O-methylguanosine-3'-phosphorothioate
  modified_base 3: mod_base = OTHER; note = 2'-fluoroguanosine-3'-phosphate
  modified_base 4: mod_base = OTHER; note = 2'-O-methylcytidine-3'-phosphate
  modified_base 5: mod_base = OTHER; note = 2'-fluorouridine-3'-phosphate
  modified_base 6: mod_base = OTHER; note = 2'-O-methylguanosine-3'-phosphate
  modified_base 7: mod_base = OTHER; note = 2'-fluoroadenosine-3'-phosphate
  modified_base 8: mod_base = OTHER; note = 2'-O-methylguanosine-3'-phosphate
  modified_base 9: mod_base = OTHER; note = 2'-fluorocytidine-3'-phosphate
  modified_base 10: mod_base = OTHER; note = 2'-fluorouridine-3'-phosphate
  modified_base 11: mod_base = OTHER; note = 2'-fluorouridine-3'-phosphate
  modified_base 12: mod_base = OTHER; note = 2'-O-methyluridine-3'-phosphate
  modified_base 13: mod_base = OTHER; note = 2'-fluoroadenosine-3'-phosphate
  modified_base 14: mod_base = OTHER; note = 2'-O-methyladenosine-3'-phosphate
  modified_base 15: mod_base = OTHER; note = 2'-fluoroadenosine-3'-phosphate
  modified_base 16: mod_base = OTHER; note = 2'-O-methyladenosine-3'-phosphate
  modified_base 17: mod_base = OTHER; note = 2'-fluorouridine-3'-phosphate
  modified_base 18: mod_base = OTHER; note = 2'-O-methylguanosine-3'-phosphate
  modified_base 19: mod_base = OTHER; note = 2'-fluoroguanosine-3'-phosphate
  modified_base 20: mod_base = OTHER; note = 2'-O-methyluridine-3'-phosphate
  modified_base 21: mod_base = OTHER; note = 2'-fluorouridine
gggctgagctttaaaatggtt

SEQ ID NO: 2097 - RNA, 23 nt, synthetic construct
  source 1..23: mol_type = other RNA
  modified_base 1: mod_base = OTHER; note = 2'-O-methyladenosine-3'-phosphorothioate
  modified_base 2: mod_base = OTHER; note = 2'-fluoroadenosine-3'-phosphorothioate
  modified_base 3: mod_base = OTHER; note = 2'-O-methylcytidine-3'-phosphate
  modified_base 4: mod_base = OTHER; note = 2'-fluorocytidine-3'-phosphate
  modified_base 5: mod_base = OTHER; note = 2'-O-methyladenosine-3'-phosphate
  modified_base 6: mod_base = OTHER; note = 2'-fluorouridine-3'-phosphate
  modified_base 7: mod_base = OTHER; note = 2'-O-methyluridine-3'-phosphate
  modified_base 8: mod_base = OTHER; note = 2'-fluorouridine-3'-phosphate
  modified_base 9: mod_base = OTHER; note = 2'-O-methyluridine-3'-phosphate
  modified_base 10: mod_base = OTHER; note = 2'-fluoroadenosine-3'-phosphate
  modified_base 11: mod_base = OTHER; note = 2'-O-methyladenosine-3'-phosphate
  modified_base 12: mod_base = OTHER; note = 2'-O-methyladenosine-3'-phosphate
  modified_base 13: mod_base = OTHER; note = 2'-O-methylguanosine-3'-phosphate
  modified_base 14: mod_base = OTHER; note = 2'-fluorocytidine-3'-phosphate
  modified_base 15: mod_base = OTHER; note = 2'-O-methyluridine-3'-phosphate
  modified_base 16: mod_base = OTHER; note = 2'-fluorocytidine-3'-phosphate
  modified_base 17: mod_base = OTHER; note = 2'-O-methyladenosine-3'-phosphate
  modified_base 18: mod_base = OTHER; note = 2'-fluoroguanosine-3'-phosphate
  modified_base 19: mod_base = OTHER; note = 2'-O-methylcytidine-3'-phosphate
  modified_base 20: mod_base = OTHER; note = 2'-fluorocytidine-3'-phosphate
  modified_base 21: mod_base = OTHER; note = 2'-O-methylcytidine-3'-phosphorothioate
  modified_base 22: mod_base = OTHER; note = 2'-O-methylcytidine-3'-phosphorothioate
  modified_base 23: mod_base = OTHER; note = 2'-O-methyladenosine
aaccattttaaagctcagcccca

SEQ ID NO: 2098 - RNA, 21 nt, synthetic construct
  source 1..21: mol_type = other RNA
  modified_base 1: mod_base = OTHER; note = 2'-fluoroadenosine-3'-phosphorothioate
  modified_base 2: mod_base = OTHER; note = 2'-O-methylguanosine-3'-phosphorothioate
  modified_base 3: mod_base = OTHER; note = 2'-fluoroadenosine-3'-phosphate
  modified_base 4: mod_base = OTHER; note = 2'-O-methylcytidine-3'-phosphate
  modified_base 5: mod_base = OTHER; note = 2'-fluorocytidine-3'-phosphate
  modified_base 6: mod_base = OTHER; note = 2'-O-methyluridine-3'-phosphate
  modified_base 7: mod_base = OTHER; note = 2'-fluoroguanosine-3'-phosphate
  modified_base 8: mod_base = OTHER; note = 2'-O-methyluridine-3'-phosphate
  modified_base 9: mod_base = OTHER; note = 2'-fluorouridine-3'-phosphate
  modified_base 10: mod_base = OTHER; note = 2'-fluorouridine-3'-phosphate
  modified_base 11: mod_base = OTHER; note = 2'-fluorouridine-3'-phosphate
  modified_base 12: mod_base = OTHER; note = 2'-O-methylguanosine-3'-phosphate
  modified_base 13: mod_base = OTHER; note = 2'-fluorocytidine-3'-phosphate
  modified_base 14: mod_base = OTHER; note = 2'-O-methyluridine-3'-phosphate
  modified_base 15: mod_base = OTHER; note = 2'-fluorouridine-3'-phosphate
  modified_base 16: mod_base = OTHER; note = 2'-O-methyluridine-3'-phosphate
  modified_base 17: mod_base = OTHER; note = 2'-fluorouridine-3'-phosphate
  modified_base 18: mod_base = OTHER; note = 2'-O-methylguanosine-3'-phosphate
  modified_base 19: mod_base = OTHER; note = 2'-fluorouridine-3'-phosphate
  modified_base 20: mod_base = OTHER; note = 2'-O-methyladenosine-3'-phosphate
  modified_base 21: mod_base = OTHER; note = 2'-fluoroadenosine
agacctgttttgcttttgtaa

SEQ ID NO: 2099 - RNA, 22 nt, synthetic construct
  source 1..22: mol_type = other RNA
  modified_base 1: mod_base = OTHER; note = 2'-O-methyluridine-3'-phosphorothioate
  modified_base 2: mod_base = OTHER; note = 2'-fluorouridine-3'-phosphorothioate
  modified_base 3: mod_base = OTHER; note = 2'-O-methyladenosine-3'-phosphate
  modified_base 4: mod_base = OTHER; note = 2'-fluorocytidine-3'-phosphate
  modified_base 5: mod_base = OTHER; note = 2'-O-methyladenosine-3'-phosphate
  modified_base 6: mod_base = OTHER; note = 2'-fluoroadenosine-3'-phosphate
  modified_base 7: mod_base = OTHER; note = 2'-O-methyladenosine-3'-phosphate
  modified_base 8: mod_base = OTHER; note = 2'-fluoroadenosine-3'-phosphate
  modified_base 9: mod_base = OTHER; note = 2'-O-methylguanosine-3'-phosphate
  modified_base 10: mod_base = OTHER; note = 2'-fluorocytidine-3'-phosphate
  modified_base 11: mod_base = OTHER; note = 2'-O-methyladenosine-3'-phosphate
  modified_base 12: mod_base = OTHER; note = 2'-O-methyladenosine-3'-phosphate
  modified_base 13: mod_base = OTHER; note = 2'-fluoroadenosine-3'-phosphate
  modified_base 14: mod_base = OTHER; note = 2'-O-methylcytidine-3'-phosphate
  modified_base 15: mod_base = OTHER; note = 2'-fluoroadenosine-3'-phosphate
  modified_base 16: mod_base = OTHER; note = 2'-O-methylguanosine-3'-phosphate
  modified_base 17: mod_base = OTHER; note = 2'-fluoroguanosine-3'-phosphate
  modified_base 18: mod_base = OTHER; note = 2'-O-methyluridine-3'-phosphate
  modified_base 19: mod_base = OTHER; note = 2'-fluorocytidine-3'-phosphate
  modified_base 20: mod_base = OTHER; note = 2'-O-methyluridine-3'-phosphorothioate
  modified_base 21: mod_base = OTHER; note = 2'-O-methyladenosine-3'-phosphorothioate
  modified_base 22: mod_base = OTHER; note = 2'-O-methylguanosine
ttacaaaagcaaacaggtctag

SEQ ID NO: 2100 - RNA, 21 nt, synthetic construct
  source 1..21: mol_type = other RNA
  modified_base 1: mod_base = OTHER; note = 2'-fluoroadenosine-3'-phosphorothioate
  modified_base 2: mod_base = OTHER; note = 2'-O-methylguanosine-3'-phosphorothioate
  modified_base 3: mod_base = OTHER; note = 2'-fluoroadenosine-3'-phosphate
  modified_base 4: mod_base = OTHER; note = 2'-O-methylcytidine-3'-phosphate
  modified_base 5: mod_base = OTHER; note = 2'-fluorocytidine-3'-phosphate
  modified_base 6: mod_base = OTHER; note = 2'-O-methyluridine-3'-phosphate
  modified_base 7: mod_base = OTHER; note = 2'-fluoroguanosine-3'-phosphate
  modified_base 8: mod_base = OTHER; note = 2'-O-methyluridine-3'-phosphate
  modified_base 9: mod_base = OTHER; note = 2'-fluorouridine-3'-phosphate
  modified_base 10: mod_base = OTHER; note = 2'-fluorouridine-3'-phosphate
  modified_base 11: mod_base = OTHER; note = 2'-fluorouridine-3'-phosphate
  modified_base 12: mod_base = OTHER; note = 2'-O-methylguanosine-3'-phosphate
  modified_base 13: mod_base = OTHER; note = 2'-fluorocytidine-3'-phosphate
  modified_base 14: mod_base = OTHER; note = 2'-O-methyluridine-3'-phosphate
  modified_base 15: mod_base = OTHER; note = 2'-fluorouridine-3'-phosphate
  modified_base 16: mod_base = OTHER; note = 2'-O-methyluridine-3'-phosphate
  modified_base 17: mod_base = OTHER; note = 2'-fluorouridine-3'-phosphate
  modified_base 18: mod_base = OTHER; note = 2'-O-methylguanosine-3'-phosphate
  modified_base 19: mod_base = OTHER; note = 2'-fluorouridine-3'-phosphate
  modified_base 20: mod_base = OTHER; note = 2'-O-methyladenosine-3'-phosphate
  modified_base 21: mod_base = OTHER; note = 2'-fluoroadenosine
agacctgttttgcttttgtaa

SEQ ID NO: 2101 - RNA, 22 nt, synthetic construct
  source 1..22: mol_type = other RNA
  modified_base 1: mod_base = OTHER; note = 2'-O-methyluridine-3'-phosphorothioate
  modified_base 2: mod_base = OTHER; note = 2'-fluorouridine-3'-phosphorothioate
  modified_base 3: mod_base = OTHER; note = 2'-O-methyladenosine-3'-phosphate
  modified_base 4: mod_base = OTHER; note = 2'-fluorocytidine-3'-phosphate
  modified_base 5: mod_base = OTHER; note = 2'-O-methyladenosine-3'-phosphate
  modified_base 6: mod_base = OTHER; note = 2'-fluoroadenosine-3'-phosphate
  modified_base 7: mod_base = OTHER; note = 2'-O-methyladenosine-3'-phosphate
  modified_base 8: mod_base = OTHER; note = 2'-fluoroadenosine-3'-phosphate
  modified_base 9: mod_base = OTHER; note = 2'-O-methylguanosine-3'-phosphate
  modified_base 10: mod_base = OTHER; note = 2'-fluorocytidine-3'-phosphate
  modified_base 11: mod_base = OTHER; note = 2'-O-methyladenosine-3'-phosphate
  modified_base 12: mod_base = OTHER; note = 2'-O-methyladenosine-3'-phosphate
  modified_base 13: mod_base = OTHER; note = 2'-fluoroadenosine-3'-phosphate
  modified_base 14: mod_base = OTHER; note = 2'-O-methylcytidine-3'-phosphate
  modified_base 15: mod_base = OTHER; note = 2'-fluoroadenosine-3'-phosphate
  modified_base 16: mod_base = OTHER; note = 2'-O-methylguanosine-3'-phosphate
  modified_base 17: mod_base = OTHER; note = 2'-fluoroguanosine-3'-phosphate
  modified_base 18: mod_base = OTHER; note = 2'-O-methyluridine-3'-phosphate
  modified_base 19: mod_base = OTHER; note = 2'-fluorocytidine-3'-phosphate
  modified_base 20: mod_base = OTHER; note = 2'-O-methyluridine-3'-phosphorothioate
  modified_base 21: mod_base = OTHER; note = 2'-O-methyladenosine-3'-phosphorothioate
  modified_base 22: mod_base = OTHER; note = 2'-O-methylguanosine
ttacaaaagcaaacaggtctag

SEQ ID NO: 2102 - RNA, 21 nt, synthetic construct
  source 1..21: mol_type = other RNA
  modified_base 1: mod_base = OTHER; note = 2'-fluoroadenosine-3'-phosphorothioate
  modified_base 2: mod_base = OTHER; note = 2'-O-methylguanosine-3'-phosphorothioate
  modified_base 3: mod_base = OTHER; note = 2'-fluoroadenosine-3'-phosphate
  modified_base 4: mod_base = OTHER; note = 2'-O-methylcytidine-3'-phosphate
  modified_base 5: mod_base = OTHER; note = 2'-fluorocytidine-3'-phosphate
  modified_base 6: mod_base = OTHER; note = 2'-O-methyluridine-3'-phosphate
  modified_base 7: mod_base = OTHER; note = 2'-fluoroguanosine-3'-phosphate
  modified_base 8: mod_base = OTHER; note = 2'-O-methyluridine-3'-phosphate
  modified_base 9: mod_base = OTHER; note = 2'-fluorouridine-3'-phosphate
  modified_base 10: mod_base = OTHER; note = 2'-fluorouridine-3'-phosphate
  modified_base 11: mod_base = OTHER; note = 2'-fluorouridine-3'-phosphate
  modified_base 12: mod_base = OTHER; note = 2'-O-methylguanosine-3'-phosphate
  modified_base 13: mod_base = OTHER; note = 2'-fluorocytidine-3'-phosphate
  modified_base 14: mod_base = OTHER; note = 2'-O-methyluridine-3'-phosphate
  modified_base 15: mod_base = OTHER; note = 2'-fluorouridine-3'-phosphate
  modified_base 16: mod_base = OTHER; note = 2'-O-methyluridine-3'-phosphate
  modified_base 17: mod_base = OTHER; note = 2'-fluorouridine-3'-phosphate
  modified_base 18: mod_base = OTHER; note = 2'-O-methylguanosine-3'-phosphate
  modified_base 19: mod_base = OTHER; note = 2'-fluorouridine-3'-phosphate
  modified_base 20: mod_base = OTHER; note = 2'-O-methyladenosine-3'-phosphate
  modified_base 21: mod_base = OTHER; note = 2'-fluoroadenosine
agacctgttttgcttttgtaa

SEQ ID NO: 2103 - RNA, 22 nt, synthetic construct
  source 1..22: mol_type = other RNA
  modified_base 1: mod_base = OTHER; note = 2'-O-methyluridine-3'-phosphorothioate
  modified_base 2: mod_base = OTHER; note = 2'-fluorouridine-3'-phosphorothioate
  modified_base 3: mod_base = OTHER; note = 2'-O-methyladenosine-3'-phosphate
  modified_base 4: mod_base = OTHER; note = 2'-fluorocytidine-3'-phosphate
  modified_base 5: mod_base = OTHER; note = 2'-O-methyladenosine-3'-phosphate
  modified_base 6: mod_base = OTHER; note = 2'-fluoroadenosine-3'-phosphate
  modified_base 7: mod_base = OTHER; note = 2'-O-methyladenosine-3'-phosphate
  modified_base 8: mod_base = OTHER; note = 2'-fluoroadenosine-3'-phosphate
  modified_base 9: mod_base = OTHER; note = 2'-O-methylguanosine-3'-phosphate
  modified_base 10: mod_base = OTHER; note = 2'-fluorocytidine-3'-phosphate
  modified_base 11: mod_base = OTHER; note = 2'-O-methyladenosine-3'-phosphate
  modified_base 12: mod_base = OTHER; note = 2'-O-methyladenosine-3'-phosphate
  modified_base 13: mod_base = OTHER; note = 2'-fluoroadenosine-3'-phosphate
  modified_base 14: mod_base = OTHER; note = 2'-O-methylcytidine-3'-phosphate
  modified_base 15: mod_base = OTHER; note = 2'-fluoroadenosine-3'-phosphate
  modified_base 16: mod_base = OTHER; note = 2'-O-methylguanosine-3'-phosphate
  modified_base 17: mod_base = OTHER; note = 2'-fluoroguanosine-3'-phosphate
  modified_base 18: mod_base = OTHER; note = 2'-O-methyluridine-3'-phosphate
  modified_base 19: mod_base = OTHER; note = 2'-fluorocytidine-3'-phosphate
  modified_base 20: mod_base = OTHER; note = 2'-O-methyluridine-3'-phosphorothioate
  modified_base 21: mod_base = OTHER; note = 2'-O-methyladenosine-3'-phosphorothioate
  modified_base 22: mod_base = OTHER; note = 2'-O-methylguanosine
ttacaaaagcaaacaggtctag

SEQ ID NO: 2104 - RNA, 21 nt, synthetic construct
  source 1..21: mol_type = other RNA
  modified_base 1: mod_base = OTHER; note = 2'-fluoroadenosine-3'-phosphorothioate
  modified_base 2: mod_base = OTHER; note = 2'-O-methylguanosine-3'-phosphorothioate
  modified_base 3: mod_base = OTHER; note = 2'-fluoroadenosine-3'-phosphate
  modified_base 4: mod_base = OTHER; note = 2'-O-methylcytidine-3'-phosphate
  modified_base 5: mod_base = OTHER; note = 2'-fluorocytidine-3'-phosphate
  modified_base 6: mod_base = OTHER; note = 2'-O-methyluridine-3'-phosphate
  modified_base 7: mod_base = OTHER; note = 2'-fluoroguanosine-3'-phosphate
  modified_base 8: mod_base = OTHER; note = 2'-O-methyluridine-3'-phosphate
  modified_base 9: mod_base = OTHER; note = 2'-fluorouridine-3'-phosphate
  modified_base 10: mod_base = OTHER; note = 2'-fluorouridine-3'-phosphate
  modified_base 11: mod_base = OTHER; note = 2'-fluorouridine-3'-phosphate
  modified_base 12: mod_base = OTHER; note = 2'-O-methylguanosine-3'-phosphate
  modified_base 13: mod_base = OTHER; note = 2'-fluorocytidine-3'-phosphate
  modified_base 14: mod_base = OTHER; note = 2'-O-methyluridine-3'-phosphate
  modified_base 15: mod_base = OTHER; note = 2'-fluorouridine-3'-phosphate
  modified_base 16: mod_base = OTHER; note = 2'-O-methyluridine-3'-phosphate
  modified_base 17: mod_base = OTHER; note = 2'-fluorouridine-3'-phosphate
  modified_base 18: mod_base = OTHER; note = 2'-O-methylguanosine-3'-phosphate
  modified_base 19: mod_base = OTHER; note = 2'-fluorouridine-3'-phosphate
  modified_base 20: mod_base = OTHER; note = 2'-O-methyladenosine-3'-phosphate
  modified_base 21: mod_base = OTHER; note = 2'-fluoroadenosine
agacctgttttgcttttgtaa

SEQ ID NO: 2105 - RNA, 22 nt, synthetic construct
  source 1..22: mol_type = other RNA
  modified_base 1: mod_base = OTHER; note = 2'-O-methyluridine-3'-phosphorothioate
  modified_base 2: mod_base = OTHER; note = 2'-fluorouridine-3'-phosphorothioate
  modified_base 3: mod_base = OTHER; note = 2'-O-methyladenosine-3'-phosphate
  modified_base 4: mod_base = OTHER; note = 2'-fluorocytidine-3'-phosphate
  modified_base 5: mod_base = OTHER; note = 2'-O-methyladenosine-3'-phosphate
  modified_base 6: mod_base = OTHER; note = 2'-fluoroadenosine-3'-phosphate
  modified_base 7: mod_base = OTHER; note = 2'-O-methyladenosine-3'-phosphate
  modified_base 8: mod_base = OTHER; note = 2'-fluoroadenosine-3'-phosphate
  modified_base 9: mod_base = OTHER; note = 2'-O-methylguanosine-3'-phosphate
  modified_base 10: mod_base = OTHER; note = 2'-fluorocytidine-3'-phosphate
  modified_base 11: mod_base = OTHER; note = 2'-O-methyladenosine-3'-phosphate
  modified_base 12: mod_base = OTHER; note = 2'-O-methyladenosine-3'-phosphate
  modified_base 13: mod_base = OTHER; note = 2'-fluoroadenosine-3'-phosphate
  modified_base 14: mod_base = OTHER; note = 2'-O-methylcytidine-3'-phosphate
  modified_base 15: mod_base = OTHER; note = 2'-fluoroadenosine-3'-phosphate
  modified_base 16: mod_base = OTHER; note = 2'-O-methylguanosine-3'-phosphate
  modified_base 17: mod_base = OTHER; note = 2'-fluoroguanosine-3'-phosphate
  modified_base 18: mod_base = OTHER; note = 2'-O-methyluridine-3'-phosphate
  modified_base 19: mod_base = OTHER; note = 2'-fluorocytidine-3'-phosphate
  modified_base 20: mod_base = OTHER; note = 2'-O-methyluridine-3'-phosphorothioate
  modified_base 21: mod_base = OTHER; note = 2'-O-methyladenosine-3'-phosphorothioate
  modified_base 22: mod_base = OTHER; note = 2'-O-methylguanosine
ttacaaaagcaaacaggtctag

SEQ ID NO: 2106 - RNA, 21 nt, synthetic construct
  source 1..21: mol_type = other RNA
  modified_base 1: mod_base = OTHER; note = 2'-fluoroadenosine-3'-phosphorothioate
  modified_base 2: mod_base = OTHER; note = 2'-O-methylguanosine-3'-phosphorothioate
  modified_base 3: mod_base = OTHER; note = 2'-fluoroadenosine-3'-phosphate
  modified_base 4: mod_base = OTHER; note = 2'-O-methylcytidine-3'-phosphate
  modified_base 5: mod_base = OTHER; note = 2'-fluorocytidine-3'-phosphate
  modified_base 6: mod_base = OTHER; note = 2'-O-methyluridine-3'-phosphate
  modified_base 7: mod_base = OTHER; note = 2'-fluoroguanosine-3'-phosphate
  modified_base 8: mod_base = OTHER; note = 2'-O-methyluridine-3'-phosphate
  modified_base 9: mod_base = OTHER; note = 2'-fluorouridine-3'-phosphate
  modified_base 10: mod_base = OTHER; note = 2'-fluorouridine-3'-phosphate
  modified_base 11: mod_base = OTHER; note = 2'-fluorouridine-3'-phosphate
  modified_base 12: mod_base = OTHER; note = 2'-O-methylguanosine-3'-phosphate
  modified_base 13: mod_base = OTHER; note = 2'-fluorocytidine-3'-phosphate
  modified_base 14: mod_base = OTHER; note = 2'-O-methyluridine-3'-phosphate
  modified_base 15: mod_base = OTHER; note = 2'-fluorouridine-3'-phosphate
  modified_base 16: mod_base = OTHER; note = 2'-O-methyluridine-3'-phosphate
  modified_base 17: mod_base = OTHER; note = 2'-fluorouridine-3'-phosphate
  modified_base 18: mod_base = OTHER; note = 2'-O-methylguanosine-3'-phosphate
  modified_base 19: mod_base = OTHER; note = 2'-fluorouridine-3'-phosphate
  modified_base 20: mod_base = OTHER; note = 2'-O-methyladenosine-3'-phosphate
  modified_base 21: mod_base = OTHER; note = 2'-fluoroadenosine
agacctgttttgcttttgtaa

SEQ ID NO: 2107 - RNA, 22 nt, synthetic construct
  source 1..22: mol_type = other RNA
  modified_base 1: mod_base = OTHER; note = 2'-O-methyluridine-3'-phosphorothioate
  modified_base 2: mod_base = OTHER; note = 2'-fluorouridine-3'-phosphorothioate
  modified_base 3: mod_base = OTHER; note = 2'-O-methyladenosine-3'-phosphate
  modified_base 4: mod_base = OTHER; note = 2'-fluorocytidine-3'-phosphate
  modified_base 5: mod_base = OTHER; note = 2'-O-methyladenosine-3'-phosphate
  modified_base 6: mod_base = OTHER; note = 2'-fluoroadenosine-3'-phosphate
  modified_base 7: mod_base = OTHER; note = 2'-O-methyladenosine-3'-phosphate
  modified_base 8: mod_base = OTHER; note = 2'-fluoroadenosine-3'-phosphate
  modified_base 9: mod_base = OTHER; note = 2'-O-methylguanosine-3'-phosphate
  modified_base 10: mod_base = OTHER; note = 2'-fluorocytidine-3'-phosphate
  modified_base 11: mod_base = OTHER; note = 2'-O-methyladenosine-3'-phosphate
  modified_base 12: mod_base = OTHER; note = 2'-O-methyladenosine-3'-phosphate
  modified_base 13: mod_base = OTHER; note = 2'-fluoroadenosine-3'-phosphate
  modified_base 14: mod_base = OTHER; note = 2'-O-methylcytidine-3'-phosphate
  modified_base 15: mod_base = OTHER; note = 2'-fluoroadenosine-3'-phosphate
  modified_base 16: mod_base = OTHER; note = 2'-O-methylguanosine-3'-phosphate
  modified_base 17: mod_base = OTHER; note = 2'-fluoroguanosine-3'-phosphate
  modified_base 18: mod_base = OTHER; note = 2'-O-methyluridine-3'-phosphate
  modified_base 19: mod_base = OTHER; note = 2'-fluorocytidine-3'-phosphate
  modified_base 20: mod_base = OTHER; note = 2'-O-methyluridine-3'-phosphorothioate
  modified_base 21: mod_base = OTHER; note = 2'-O-methyladenosine-3'-phosphorothioate
  modified_base 22: mod_base = OTHER; note = 2'-O-methylguanosine
ttacaaaagcaaacaggtctag

SEQ ID NO: 2108 - DNA, 36 bp, synthetic construct
  source 1..36: mol_type = other DNA
  modified_base 1: mod_base = OTHER; note = 2'-fluoroadenosine-3'-phosphorothioate
  modified_base 2: mod_base = OTHER; note = 2'-O-methylguanosine-3'-phosphorothioate
  modified_base 3: mod_base = OTHER; note = 2'-fluoroadenosine-3'-phosphate
  modified_base 4: mod_base = OTHER; note = 2'-O-methylcytidine-3'-phosphate
  modified_base 5: mod_base = OTHER; note = 2'-fluorocytidine-3'-phosphate
  modified_base 6: mod_base = OTHER; note = 2'-O-methyluridine-3'-phosphate
  modified_base 7: mod_base = OTHER; note = 2'-fluoroguanosine-3'-phosphate
  modified_base 8: mod_base = OTHER; note = 2'-O-methyluridine-3'-phosphate
  modified_base 9: mod_base = OTHER; note = 2'-fluorouridine-3'-phosphate
  modified_base 10: mod_base = OTHER; note = 2'-fluorouridine-3'-phosphate
  modified_base 11: mod_base = OTHER; note = 2'-fluorouridine-3'-phosphate
  modified_base 12: mod_base = OTHER; note = 2'-fluorouridine-3'-phosphate
  modified_base 13: mod_base = OTHER; note = 2'-O-methylguanosine-3'-phosphate
  modified_base 14: mod_base = OTHER; note = 2'-fluorocytidine-3'-phosphate
  modified_base 15: mod_base = OTHER; note = 2'-O-methyluridine-3'-phosphate
  modified_base 16: mod_base = OTHER; note = 2'-fluorouridine-3'-phosphate
  modified_base 17: mod_base = OTHER; note = 2'-O-methyluridine-3'-phosphate
  modified_base 18: mod_base = OTHER; note = 2'-fluorouridine-3'-phosphate
  modified_base 19: mod_base = OTHER; note = 2'-O-methylguanosine-3'-phosphate
  modified_base 20: mod_base = OTHER; note = 2'-fluorouridine-3'-phosphate
  modified_base 21: mod_base = OTHER; note = 2'-O-methyladenosine-3'-phosphate
  modified_base 22: mod_base = OTHER; note = 2'-fluoroadenosine-3'-phosphate
  modified_base 23: mod_base = OTHER; note = 2'-O-methylguanosine-3'-phosphate
  modified_base 24: mod_base = OTHER; note = 2'-O-methylcytidine-3'-phosphate
  modified_base 25: mod_base = OTHER; note = 2'-O-methyladenosine-3'-phosphate
  modified_base 26: mod_base = OTHER; note = 2'-O-methylguanosine-3'-phosphate
  modified_base 27: mod_base = OTHER; note = 2'-O-methylcytidine-3'-phosphate
  modified_base 28: mod_base = OTHER; note = 2'-O-methylcytidine-3'-phosphate
  modified_base 31: mod_base = OTHER; note = 2'-O-methylguanosine-3'-phosphate
  modified_base 32: mod_base = OTHER; note = 2'-O-methylguanosine-3'-phosphate
  modified_base 33: mod_base = OTHER; note = 2'-O-methylcytidine-3'-phosphate
  modified_base 34: mod_base = OTHER; note = 2'-O-methyluridine-3'-phosphorothioate
  modified_base 35: mod_base = OTHER; note = 2'-O-methylguanosine-3'-phosphorothioate
  modified_base 36: mod_base = OTHER; note = 2'-O-methylcytidine
  misc_feature 1..28: note = RNA
  misc_feature 29..30: note = DNA
  misc_feature 31..36: note = RNA
agacctgtttttgcttttgtaagcagccgaggctgc

SEQ ID NO: 2109 - RNA, 22 nt, synthetic construct
  source 1..22: mol_type = other RNA
  modified_base 1: mod_base = OTHER; note = 2'-O-methyluridine-3'-phosphorothioate
  modified_base 2: mod_base = OTHER; note = 2'-fluorouridine-3'-phosphorothioate
  modified_base 3: mod_base = OTHER; note = 2'-O-methyladenosine-3'-phosphate
  modified_base 4: mod_base = OTHER; note = 2'-fluorocytidine-3'-phosphate
  modified_base 5: mod_base = OTHER; note = 2'-O-methyladenosine-3'-phosphate
  modified_base 6: mod_base = OTHER; note = 2'-fluoroadenosine-3'-phosphate
  modified_base 7: mod_base = OTHER; note = 2'-O-methyladenosine-3'-phosphate
  modified_base 8: mod_base = OTHER; note = 2'-fluoroadenosine-3'-phosphate
  modified_base 9: mod_base = OTHER; note = 2'-O-methylguanosine-3'-phosphate
  modified_base 10: mod_base = OTHER; note = 2'-fluorocytidine-3'-phosphate
  modified_base 11: mod_base = OTHER; note = 2'-O-methyladenosine-3'-phosphate
  modified_base 12: mod_base = OTHER; note = 2'-O-methyladenosine-3'-phosphate
  modified_base 13: mod_base = OTHER; note = 2'-fluoroadenosine-3'-phosphate
  modified_base 14: mod_base = OTHER; note = 2'-O-methylcytidine-3'-phosphate
  modified_base 15: mod_base = OTHER; note = 2'-fluoroadenosine-3'-phosphate
  modified_base 16: mod_base = OTHER; note = 2'-O-methylguanosine-3'-phosphate
  modified_base 17: mod_base = OTHER; note = 2'-fluoroguanosine-3'-phosphate
  modified_base 18: mod_base = OTHER; note = 2'-O-methyluridine-3'-phosphate
  modified_base 19: mod_base = OTHER; note = 2'-fluorocytidine-3'-phosphate
  modified_base 20: mod_base = OTHER; note = 2'-O-methyluridine-3'-phosphorothioate
  modified_base 21: mod_base = OTHER; note = 2'-O-methyladenosine-3'-phosphorothioate
  modified_base 22: mod_base = OTHER; note = 2'-O-methylguanosine
ttacaaaagcaaacaggtctag

SEQ ID NO: 2110 - RNA, 21 nt, synthetic construct
  source 1..21: mol_type = other RNA
  modified_base 1: mod_base = OTHER; note = 2'-fluoroadenosine-3'-phosphorothioate
  modified_base 2: mod_base = OTHER; note = 2'-O-methylguanosine-3'-phosphorothioate
  modified_base 3: mod_base = OTHER; note = 2'-fluoroadenosine-3'-phosphate
  modified_base 4: mod_base = OTHER; note = 2'-O-methylcytidine-3'-phosphate
  modified_base 5: mod_base = OTHER; note = 2'-fluorocytidine-3'-phosphate
  modified_base 6: mod_base = OTHER; note = 2'-O-methyluridine-3'-phosphate
  modified_base 7: mod_base = OTHER; note = 2'-fluoroguanosine-3'-phosphate
  modified_base 8: mod_base = OTHER; note = 2'-O-methyluridine-3'-phosphate
  modified_base 9: mod_base = OTHER; note = 2'-fluorouridine-3'-phosphate
  modified_base 10: mod_base = OTHER; note = 2'-fluorouridine-3'-phosphate
  modified_base 11: mod_base = OTHER; note = 2'-fluorouridine-3'-phosphate
  modified_base 12: mod_base = OTHER; note = 2'-O-methylguanosine-3'-phosphate
  modified_base 13: mod_base = OTHER; note = 2'-fluorocytidine-3'-phosphate
  modified_base 14: mod_base = OTHER; note = 2'-O-methyluridine-3'-phosphate
  modified_base 15: mod_base = OTHER; note = 2'-fluorouridine-3'-phosphate
  modified_base 16: mod_base = OTHER; note = 2'-O-methyluridine-3'-phosphate
  modified_base 17: mod_base = OTHER; note = 2'-fluorouridine-3'-phosphate
  modified_base 18: mod_base = OTHER; note = 2'-O-methylguanosine-3'-phosphate
  modified_base 19: mod_base = OTHER; note = 2'-fluorouridine-3'-phosphate
  modified_base 20: mod_base = OTHER; note = 2'-O-methyladenosine-3'-phosphate
  modified_base 21: mod_base = OTHER; note = 2'-fluoroadenosine
agacctgttttgcttttgtaa

SEQ ID NO: 2111 - RNA, 22 nt, synthetic construct
  source 1..22: mol_type = other RNA
  modified_base 1: mod_base = OTHER; note = 2'-O-methyluridine-3'-phosphorothioate
  modified_base 2: mod_base = OTHER; note = 2'-fluorouridine-3'-phosphorothioate
  modified_base 3: mod_base = OTHER; note = 2'-O-methyladenosine-3'-phosphate
  modified_base 4: mod_base = OTHER; note = 2'-fluorocytidine-3'-phosphate
  modified_base 5: mod_base = OTHER; note = 2'-O-methyladenosine-3'-phosphate
  modified_base 6: mod_base = OTHER; note = 2'-fluoroadenosine-3'-phosphate
  modified_base 7: mod_base = OTHER; note = 2'-O-methyladenosine-3'-phosphate
  modified_base 8: mod_base = OTHER; note = 2'-fluoroadenosine-3'-phosphate
  modified_base 9: mod_base = OTHER; note = 2'-O-methylguanosine-3'-phosphate
  modified_base 10: mod_base = OTHER; note = 2'-fluorocytidine-3'-phosphate
  modified_base 11: mod_base = OTHER; note = 2'-O-methyladenosine-3'-phosphate
  modified_base 12: mod_base = OTHER; note = 2'-O-methyladenosine-3'-phosphate
  modified_base 13: mod_base = OTHER; note = 2'-fluoroadenosine-3'-phosphate
  modified_base 14: mod_base = OTHER; note = 2'-O-methylcytidine-3'-phosphate
  modified_base 15: mod_base = OTHER; note = 2'-fluoroadenosine-3'-phosphate
  modified_base 16: mod_base = OTHER; note = 2'-O-methylguanosine-3'-phosphate
  modified_base 17: mod_base = OTHER; note = 2'-fluoroguanosine-3'-phosphate
  modified_base 18: mod_base = OTHER; note = 2'-O-methyluridine-3'-phosphate
  modified_base 19: mod_base = OTHER; note = 2'-fluorocytidine-3'-phosphate
  modified_base 20: mod_base = OTHER; note = 2'-O-methyluridine-3'-phosphorothioate
  modified_base 21: mod_base = OTHER; note = 2'-fluoroadenosine-3'-phosphorothioate
  modified_base 22: mod_base = OTHER; note = 2'-O-methylguanosine
ttacaaaagcaaacaggtctag

SEQ ID NO: 2112 - RNA, 21 nt, synthetic construct
  source 1..21: mol_type = other RNA
  modified_base 1: mod_base = OTHER; note = 2'-fluoroadenosine-3'-phosphorothioate
  modified_base 2: mod_base = OTHER; note = 2'-O-methylguanosine-3'-phosphorothioate
  modified_base 3: mod_base = OTHER; note = 2'-fluoroadenosine-3'-phosphate
  modified_base 4: mod_base = OTHER; note = 2'-O-methylcytidine-3'-phosphate
  modified_base 5: mod_base = OTHER; note = 2'-fluorocytidine-3'-phosphate
  modified_base 6: mod_base = OTHER; note = 2'-O-methyluridine-3'-phosphate
  modified_base 7: mod_base = OTHER; note = 2'-fluoroguanosine-3'-phosphate
  modified_base 8: mod_base = OTHER; note = 2'-O-methyluridine-3'-phosphate
  modified_base 9: mod_base = OTHER; note = 2'-fluorouridine-3'-phosphate
  modified_base 10: mod_base = OTHER; note = 2'-fluorouridine-3'-phosphate
  modified_base 11: mod_base = OTHER; note = 2'-fluorouridine-3'-phosphate
  modified_base 12: mod_base = OTHER; note = 2'-O-methylguanosine-3'-phosphate
  modified_base 13: mod_base = OTHER; note = 2'-fluorocytidine-3'-phosphate
  modified_base 14: mod_base = OTHER; note = 2'-O-methyluridine-3'-phosphate
  modified_base 15: mod_base = OTHER; note = 2'-O-methyluridine-3'-phosphate
  modified_base 16: mod_base = OTHER; note = 2'-O-methyluridine-3'-phosphate
  modified_base 17: mod_base = OTHER; note = 2'-O-methyluridine-3'-phosphate
  modified_base 18: mod_base = OTHER; note = 2'-O-methylguanosine-3'-phosphate
  modified_base 19: mod_base = OTHER; note = 2'-O-methyluridine-3'-phosphate
  modified_base 20: mod_base = OTHER; note = 2'-O-methyladenosine-3'-phosphate
  modified_base 21: mod_base = OTHER; note = 2'-O-methyladenosine
agacctgttttgcttttgtaa

SEQ ID NO: 2113 - RNA, 21 nt, synthetic construct
  source 1..21: mol_type = other RNA
  modified_base 1: mod_base = OTHER; note = 2'-O-methyluridine-3'-phosphorothioate
  modified_base 2: mod_base = OTHER; note = 2'-fluorouridine-3'-phosphorothioate
  modified_base 3: mod_base = OTHER; note = 2'-O-methyladenosine-3'-phosphate
  modified_base 4: mod_base = OTHER; note = 2'-fluorocytidine-3'-phosphate
  modified_base 5: mod_base = OTHER; note = 2'-O-methyladenosine-3'-phosphate
  modified_base 6: mod_base = OTHER; note = 2'-O-methyladenosine-3'-phosphate
  modified_base 7: mod_base = OTHER; note = 2'-fluoroadenosine-3'-phosphate
  modified_base 8: mod_base = OTHER; note = 2'-O-methylguanosine-3'-phosphate
  modified_base 9: mod_base = OTHER; note = 2'-fluorocytidine-3'-phosphate
  modified_base 10: mod_base = OTHER; note = 2'-O-methyladenosine-3'-phosphate
  modified_base 11: mod_base = OTHER; note = 2'-O-methyladenosine-3'-phosphate
  modified_base 12: mod_base = OTHER; note = 2'-fluoroadenosine-3'-phosphate
  modified_base 13: mod_base = OTHER; note = 2'-O-methylcytidine-3'-phosphate
  modified_base 14: mod_base = OTHER; note = 2'-fluoroadenosine-3'-phosphate
  modified_base 15: mod_base = OTHER; note = 2'-O-methylguanosine-3'-phosphate
  modified_base 16: mod_base = OTHER; note = 2'-O-methylguanosine-3'-phosphate
  modified_base 17: mod_base = OTHER; note = 2'-O-methyluridine-3'-phosphate
  modified_base 18: mod_base = OTHER; note = 2'-fluorocytidine-3'-phosphate
  modified_base 19: mod_base = OTHER; note = 2'-O-methyluridine-3'-phosphorothioate
  modified_base 20: mod_base = OTHER; note = 2'-O-methyladenosine-3'-phosphorothioate
  modified_base 21: mod_base = OTHER; note = 2'-O-methylguanosine
ttacaaagcaaacaggtctag

SEQ ID NO: 2114 - RNA, 21 nt, synthetic construct
  source 1..21: mol_type = other RNA
  modified_base 1: mod_base = OTHER; note = 2'-O-methyladenosine-3'-phosphorothioate
  modified_base 2: mod_base = OTHER; note = 2'-O-methylguanosine-3'-phosphorothioate
  modified_base 3: mod_base = OTHER; note = 2'-O-methyladenosine-3'-phosphate
  modified_base 4: mod_base = OTHER; note = 2'-O-methylcytidine-3'-phosphate
  modified_base 5: mod_base = OTHER; note = 2'-O-methylcytidine-3'-phosphate
  modified_base 6: mod_base = OTHER; note = 2'-O-methyluridine-3'-phosphate
  modified_base 7: mod_base = OTHER; note = 2'-fluoroguanosine-3'-phosphate
  modified_base 8: mod_base = OTHER; note = 2'-O-methyluridine-3'-phosphate
  modified_base 9: mod_base = OTHER; note = 2'-fluorouridine-3'-phosphate
  modified_base 10: mod_base = OTHER; note = 2'-O-methyluridine-3'-phosphate
  modified_base 11: mod_base = OTHER; note = 2'-O-methyluridine-3'-phosphate
  modified_base 12: mod_base = OTHER; note = 2'-O-methylguanosine-3'-phosphate
  modified_base 13: mod_base = OTHER; note = 2'-O-methylcytidine-3'-phosphate
  modified_base 14: mod_base = OTHER; note = 2'-O-methyluridine-3'-phosphate
  modified_base 15: mod_base = OTHER; note = 2'-O-methyluridine-3'-phosphate
  modified_base 16: mod_base = OTHER; note = 2'-O-methyluridine-3'-phosphate
  modified_base 17: mod_base = OTHER; note = 2'-O-methyluridine-3'-phosphate
  modified_base 18: mod_base = OTHER; note = 2'-O-methylguanosine-3'-phosphate
  modified_base 19: mod_base = OTHER; note = 2'-O-methyluridine-3'-phosphate
  modified_base 20: mod_base = OTHER; note = 2'-O-methyladenosine-3'-phosphate
  modified_base 21: mod_base = OTHER; note = 2'-O-methyladenosine
agacctgttttgcttttgtaa

SEQ ID NO: 2115 - RNA, 21 nt, synthetic construct
  source 1..21: mol_type = other RNA
  modified_base 1: mod_base = OTHER; note = 2'-O-methyluridine-3'-phosphorothioate
  modified_base 2: mod_base = OTHER; note = 2'-fluorouridine-3'-phosphorothioate
  modified_base 3: mod_base = OTHER; note = 2'-O-methyladenosine-3'-phosphate
  modified_base 4: mod_base = OTHER; note = 2'-fluorocytidine-3'-phosphate
  modified_base 5: mod_base = OTHER; note = 2'-O-methyladenosine-3'-phosphate
  modified_base 6: mod_base = OTHER; note = 2'-O-methyladenosine-3'-phosphate
  modified_base 7: mod_base = OTHER; note = 2'-fluoroadenosine-3'-phosphate
  modified_base 8: mod_base = OTHER; note = 2'-O-methylguanosine-3'-phosphate
  modified_base 9: mod_base = OTHER; note = 2'-fluorocytidine-3'-phosphate
  modified_base 10: mod_base = OTHER; note = 2'-O-methyladenosine-3'-phosphate
  modified_base 11: mod_base = OTHER; note = 2'-O-methyladenosine-3'-phosphate
  modified_base 12: mod_base = OTHER; note = 2'-fluoroadenosine-3'-phosphate
  modified_base 13: mod_base = OTHER; note = 2'-O-methylcytidine-3'-phosphate
  modified_base 14: mod_base = OTHER; note = 2'-fluoroadenosine-3'-phosphate
  modified_base 15: mod_base = OTHER; note = 2'-O-methylguanosine-3'-phosphate
  modified_base 16: mod_base = OTHER; note = 2'-O-methylguanosine-3'-phosphate
  modified_base 17: mod_base = OTHER; note = 2'-O-methyluridine-3'-phosphate
  modified_base 18: mod_base = OTHER; note = 2'-fluorocytidine-3'-phosphate
  modified_base 19: mod_base = OTHER; note = 2'-O-methyluridine-3'-phosphorothioate
  modified_base 20: mod_base = OTHER; note = 2'-O-methyladenosine-3'-phosphorothioate
  modified_base 21: mod_base = OTHER; note = 2'-O-methylguanosine
ttacaaagcaaacaggtctag

SEQ ID NO: 2116 - RNA, 21 nt, synthetic construct
  source 1..21: mol_type = other RNA
  modified_base 1: mod_base = OTHER; note = 2'-O-methyladenosine-3'-phosphorothioate
  modified_base 2: mod_base = OTHER; note = 2'-O-methylguanosine-3'-phosphorothioate
  modified_base 3: mod_base = OTHER; note = 2'-O-methyladenosine-3'-phosphate
  modified_base 4: mod_base = OTHER; note = 2'-O-methylcytidine-3'-phosphate
  modified_base 5: mod_base = OTHER; note = 2'-O-methylcytidine-3'-phosphate
  modified_base 6: mod_base = OTHER; note = 2'-O-methyluridine-3'-phosphate
  modified_base 7: mod_base = OTHER; note = 2'-fluoroguanosine-3'-phosphate
  modified_base 8: mod_base = OTHER; note = 2'-O-methyluridine-3'-phosphate
  modified_base 9: mod_base = OTHER; note = 2'-fluorouridine-3'-phosphate
  modified_base 10: mod_base = OTHER; note = 2'-O-methyluridine-3'-phosphate
  modified_base 11: mod_base = OTHER; note = 2'-O-methyluridine-3'-phosphate
  modified_base 12: mod_base = OTHER; note = 2'-O-methylguanosine-3'-phosphate
  modified_base 13: mod_base = OTHER; note = 2'-O-methylcytidine-3'-phosphate
  modified_base 14: mod_base = OTHER; note = 2'-O-methyluridine-3'-phosphate
  modified_base 15: mod_base = OTHER; note = 2'-O-methyluridine-3'-phosphate
  modified_base 16: mod_base = OTHER; note = 2'-O-methyluridine-3'-phosphate
  modified_base 17: mod_base = OTHER; note = 2'-O-methyluridine-3'-phosphate
  modified_base 18: mod_base = OTHER; note = 2'-O-methylguanosine-3'-phosphate
  modified_base 19: mod_base = OTHER; note = 2'-O-methyluridine-3'-phosphate
  modified_base 20: mod_base = OTHER; note = 2'-O-methyladenosine-3'-phosphate
  modified_base 21: mod_base = OTHER; note = 2'-O-methyladenosine
agacctgttttgcttttgtaa

SEQ ID NO: 2117 - RNA, 23 nt, synthetic construct
  source 1..23: mol_type = other RNA
  modified_base 1: mod_base = OTHER; note = 2'-O-methyluridine-3'-phosphorothioate
  modified_base 2: mod_base = OTHER; note = 2'-fluorouridine-3'-phosphorothioate
  modified_base 3: mod_base = OTHER; note = 2'-O-methyladenosine-3'-phosphate
  modified_base 4: mod_base = OTHER; note = 2'-fluorocytidine-3'-phosphate
  modified_base 5: mod_base = OTHER; note = 2'-fluoroadenosine-3'-phosphate
  modified_base 6: mod_base = OTHER; note = 2'-fluoroadenosine-3'-phosphate
  modified_base 7: mod_base = OTHER; note = 2'-fluoroadenosine-3'-phosphate
  modified_base 8: mod_base = OTHER; note = 2'-fluoroadenosine-3'-phosphate
  modified_base 9: mod_base = OTHER; note = 2'-O-methylguanosine-3'-phosphate
  modified_base 10: mod_base = OTHER; note = 2'-fluorocytidine-3'-phosphate
  modified_base 11: mod_base = OTHER; note = 2'-O-methyladenosine-3'-phosphate
  modified_base 12: mod_base = OTHER; note = 2'-fluoroadenosine-3'-phosphate
  modified_base 13: mod_base = OTHER; note = 2'-O-methyladenosine-3'-phosphate
  modified_base 14: mod_base = OTHER; note = 2'-fluoroadenosine-3'-phosphate
  modified_base 15: mod_base = OTHER; note = 2'-O-methylcytidine-3'-phosphate
  modified_base 16: mod_base = OTHER; note = 2'-fluoroadenosine-3'-phosphate
  modified_base 17: mod_base = OTHER; note = 2'-O-methylguanosine-3'-phosphate
  modified_base 18: mod_base = OTHER; note = 2'-fluoroguanosine-3'-phosphate
  modified_base 19: mod_base = OTHER; note = 2'-O-methyluridine-3'-phosphate
  modified_base 20: mod_base = OTHER; note = 2'-O-methylcytidine-3'-phosphate
  modified_base 21: mod_base = OTHER; note = 2'-O-methyluridine-3'-phosphorothioate
  modified_base 22: mod_base = OTHER; note = 2'-O-methyladenosine-3'-phosphorothioate
  modified_base 23: mod_base = OTHER; note = 2'-O-methylguanosine
ttacaaaagcaaaacaggtctag

SEQ ID NO: 2118 - DNA, 21 bp, synthetic construct
  source 1..21: mol_type = other DNA
  modified_base 1: mod_base = OTHER; note = 2'-O-methyladenosine-3'-phosphorothioate
  modified_base 2: mod_base = OTHER; note = 2'-O-methylguanosine-3'-phosphorothioate
  modified_base 3: mod_base = OTHER; note = 2'-O-methyladenosine-3'-phosphate
  modified_base 4: mod_base = OTHER; note = 2'-O-methylcytidine-3'-phosphate
  modified_base 5: mod_base = OTHER; note = 2'-O-methylcytidine-3'-phosphate
  modified_base 6: mod_base = OTHER; note = 2'-O-methyluridine-3'-phosphate
  modified_base 7: mod_base = OTHER; note = 2'-fluoroguanosine-3'-phosphate
  modified_base 8: mod_base = OTHER; note = 2'-O-methyluridine-3'-phosphate
  modified_base 9: mod_base = OTHER; note = 2'-fluorouridine-3'-phosphate
  modified_base 10: mod_base = OTHER; note = 2'-O-methyluridine-3'-phosphate
  modified_base 12: mod_base = OTHER; note = 2'-O-methylguanosine-3'-phosphate
  modified_base 13: mod_base = OTHER; note = 2'-O-methylcytidine-3'-phosphate
  modified_base 14: mod_base = OTHER; note = 2'-O-methyluridine-3'-phosphate
  modified_base 15: mod_base = OTHER; note = 2'-O-methyluridine-3'-phosphate
  modified_base 16: mod_base = OTHER; note = 2'-O-methyluridine-3'-phosphate
  modified_base 17: mod_base = OTHER; note = 2'-O-methyluridine-3'-phosphate
  modified_base 18: mod_base = OTHER; note = 2'-O-methylguanosine-3'-phosphate
  modified_base 19: mod_base = OTHER; note = 2'-O-methyluridine-3'-phosphate
  modified_base 20: mod_base = OTHER; note = 2'-O-methyladenosine-3'-phosphate
  modified_base 21: mod_base = OTHER; note = 2'-O-methyladenosine
  misc_feature 1..10: note = RNA
  misc_feature 11: note = DNA
  misc_feature 12..21: note = RNA
agacctgttttgcttttgtaa

SEQ ID NO: 2119 - RNA, 23 nt, synthetic construct
  source 1..23: mol_type = other RNA
  modified_base 1: mod_base = OTHER; note = 2'-O-methyluridine-3'-phosphorothioate
  modified_base 2: mod_base = OTHER; note = 2'-fluorouridine-3'-phosphorothioate
  modified_base 3: mod_base = OTHER; note = 2'-O-methyladenosine-3'-phosphate
  modified_base 4: mod_base = OTHER; note = 2'-fluorocytidine-3'-phosphate
  modified_base 5: mod_base = OTHER; note = 2'-fluoroadenosine-3'-phosphate
  modified_base 6: mod_base = OTHER; note = 2'-fluoroadenosine-3'-phosphate
  modified_base 7: mod_base = OTHER; note = 2'-fluoroadenosine-3'-phosphate
  modified_base 8: mod_base = OTHER; note = 2'-fluoroadenosine-3'-phosphate
  modified_base 9: mod_base = OTHER; note = 2'-O-methylguanosine-3'-phosphate
  modified_base 10: mod_base = OTHER; note = 2'-fluorocytidine-3'-phosphate
  modified_base 11: mod_base = OTHER; note = 2'-O-methyladenosine-3'-phosphate
  modified_base 12: mod_base = OTHER; note = 2'-fluoroadenosine-3'-phosphate
  modified_base 13: mod_base = OTHER; note = 2'-O-methyladenosine-3'-phosphate
  modified_base 14: mod_base = OTHER; note = 2'-fluoroadenosine-3'-phosphate
  modified_base 15: mod_base = OTHER; note = 2'-O-methylcytidine-3'-phosphate
  modified_base 16: mod_base = OTHER; note = 2'-fluoroadenosine-3'-phosphate
  modified_base 17: mod_base = OTHER; note = 2'-O-methylguanosine-3'-phosphate
  modified_base 18: mod_base = OTHER; note = 2'-fluoroguanosine-3'-phosphate
  modified_base 19: mod_base = OTHER; note = 2'-O-methyluridine-3'-phosphate
  modified_base 20: mod_base = OTHER; note = 2'-O-methylcytidine-3'-phosphate
  modified_base 21: mod_base = OTHER; note = 2'-O-methyluridine-3'-phosphorothioate
  modified_base 22: mod_base = OTHER; note = 2'-O-methyladenosine-3'-phosphorothioate
  modified_base 23: mod_base = OTHER; note = 2'-O-methylguanosine
ttacaaaagcaaaacaggtctag

SEQ ID NO: 2120 - RNA, 21 nt, synthetic construct
  source 1..21: mol_type = other RNA
  modified_base 1: mod_base = OTHER; note = 2'-fluorocytidine-3'-phosphorothioate
  modified_base 2: mod_base = OTHER; note = 2'-O-methyluridine-3'-phosphorothioate
  modified_base 3: mod_base = OTHER; note = 2'-fluoroguanosine-3'-phosphate
  modified_base 4: mod_base = OTHER; note = 2'-O-methyluridine-3'-phosphate
  modified_base 5: mod_base = OTHER; note = 2'-fluorouridine-3'-phosphate
  modified_base 6: mod_base = OTHER; note = 2'-O-methyluridine-3'-phosphate
  modified_base 7: mod_base = OTHER; note = 2'-fluorouridine-3'-phosphate
  modified_base 8: mod_base = OTHER; note = 2'-O-methylguanosine-3'-phosphate
  modified_base 9: mod_base = OTHER; note = 2'-fluorocytidine-3'-phosphate
  modified_base 10: mod_base = OTHER; note = 2'-fluorouridine-3'-phosphate
  modified_base 11: mod_base = OTHER; note = 2'-fluorouridine-3'-phosphate
  modified_base 12: mod_base = OTHER; note = 2'-O-methyluridine-3'-phosphate
  modified_base 13: mod_base = OTHER; note = 2'-fluorouridine-3'-phosphate
  modified_base 14: mod_base = OTHER; note = 2'-O-methylguanosine-3'-phosphate
  modified_base 15: mod_base = OTHER; note = 2'-fluorouridine-3'-phosphate
  modified_base 16: mod_base = OTHER; note = 2'-O-methyladenosine-3'-phosphate
  modified_base 17: mod_base = OTHER; note = 2'-fluoroadenosine-3'-phosphate
  modified_base 18: mod_base = OTHER; note = 2'-O-methylcytidine-3'-phosphate
  modified_base 19: mod_base = OTHER; note = 2'-fluorouridine-3'-phosphate
  modified_base 20: mod_base = OTHER; note = 2'-O-methyluridine-3'-phosphate
  modified_base 21: mod_base = OTHER; note = 2'-fluoroguanosine
ctgttttgcttttgtaacttg

SEQ ID NO: 2121 - RNA, 23 nt, synthetic construct
  source 1..23: mol_type = other RNA
  modified_base 1: mod_base = OTHER; note = 2'-O-methylcytidine-3'-phosphorothioate
  modified_base 2: mod_base = OTHER; note = 2'-fluoroadenosine-3'-phosphorothioate
  modified_base 3: mod_base = OTHER; note = 2'-O-methyladenosine-3'-phosphate
  modified_base 4: mod_base = OTHER; note = 2'-fluoroguanosine-3'-phosphate
  modified_base 5: mod_base = OTHER; note = 2'-O-methyluridine-3'-phosphate
  modified_base 6: mod_base = OTHER; note = 2'-fluorouridine-3'-phosphate
  modified_base 7: mod_base = OTHER; note = 2'-O-methyladenosine-3'-phosphate
  modified_base 8: mod_base = OTHER; note = 2'-fluorocytidine-3'-phosphate
  modified_base 9: mod_base = OTHER; note = 2'-O-methyladenosine-3'-phosphate
  modified_base 10: mod_base = OTHER; note = 2'-fluoroadenosine-3'-phosphate
  modified_base 11: mod_base = OTHER; note = 2'-O-methyladenosine-3'-phosphate
  modified_base 12: mod_base = OTHER; note = 2'-O-methyladenosine-3'-phosphate
  modified_base 13: mod_base = OTHER; note = 2'-O-methylguanosine-3'-phosphate
  modified_base 14: mod_base = OTHER; note = 2'-fluorocytidine-3'-phosphate
  modified_base 15: mod_base = OTHER; note = 2'-O-methyladenosine-3'-phosphate
  modified_base 16: mod_base = OTHER; note = 2'-fluoroadenosine-3'-phosphate
  modified_base 17: mod_base = OTHER; note = 2'-O-methyladenosine-3'-phosphate
  modified_base 18: mod_base = OTHER; note = 2'-fluoroadenosine-3'-phosphate
  modified_base 19: mod_base = OTHER; note = 2'-O-methylcytidine-3'-phosphate
  modified_base 20: mod_base = OTHER; note = 2'-fluoroadenosine-3'-phosphate
  modified_base 21: mod_base = OTHER; note = 2'-O-methylguanosine-3'-phosphorothioate
  modified_base 22: mod_base = OTHER; note = 2'-fluoroguanosine-3'-phosphorothioate
  modified_base 23: mod_base = OTHER; note = 2'-O-methyluridine
caagttacaaaagcaaaacaggt

SEQ ID NO: 2122 - RNA, 21 nt, synthetic construct
  source 1..21: mol_type = other RNA
  modified_base 1: mod_base = OTHER; note = 2'-fluorocytidine-3'-phosphorothioate
  modified_base 2: mod_base = OTHER; note = 2'-O-methyluridine-3'-phosphorothioate
  modified_base 3: mod_base = OTHER; note = 2'-fluoroguanosine-3'-phosphate
  modified_base 4: mod_base = OTHER; note = 2'-O-methyluridine-3'-phosphate
  modified_base 5: mod_base = OTHER; note = 2'-fluorouridine-3'-phosphate
  modified_base 6: mod_base = OTHER; note = 2'-O-methyluridine-3'-phosphate
  modified_base 7: mod_base = OTHER; note = 2'-fluorouridine-3'-phosphate
  modified_base 8: mod_base = OTHER; note = 2'-O-methylguanosine-3'-phosphate
  modified_base 9: mod_base = OTHER; note = 2'-fluorocytidine-3'-phosphate
  modified_base 10: mod_base = OTHER; note = 2'-fluorouridine-3'-phosphate
  modified_base 11: mod_base = OTHER; note = 2'-fluorouridine-3'-phosphate
  modified_base 12: mod_base = OTHER; note = 2'-O-methyluridine-3'-phosphate
  modified_base 13: mod_base = OTHER; note = 2'-fluorouridine-3'-phosphate
  modified_base 14: mod_base = OTHER; note = 2'-O-methylguanosine-3'-phosphate
  modified_base 15: mod_base = OTHER; note = 2'-O-methyluridine-3'-phosphate
  modified_base 16: mod_base = OTHER; note = 2'-O-methyladenosine-3'-phosphate
  modified_base 17: mod_base = OTHER; note = 2'-O-methyladenosine-3'-phosphate
  modified_base 18: mod_base = OTHER; note = 2'-O-methylcytidine-3'-phosphate
  modified_base 19: mod_base = OTHER; note = 2'-O-methyluridine-3'-phosphate
  modified_base 20: mod_base = OTHER; note = 2'-O-methyluridine-3'-phosphate
  modified_base 21: mod_base = OTHER; note = 2'-O-methylguanosine
ctgttttgcttttgtaacttg

SEQ ID NO: 2123 - RNA, 23 nt, synthetic construct
  source 1..23: mol_type = other RNA
  modified_base 1: mod_base = OTHER; note = 2'-O-methylcytidine-3'-phosphorothioate
  modified_base 2: mod_base = OTHER; note = 2'-fluoroadenosine-3'-phosphorothioate
  modified_base 3: mod_base = OTHER; note = 2'-O-methyladenosine-3'-phosphate
  modified_base 4: mod_base = OTHER; note = 2'-fluoroguanosine-3'-phosphate
  modified_base 5: mod_base = OTHER; note = 2'-O-methyluridine-3'-phosphate
  modified_base 6: mod_base = OTHER; note = 2'-O-methyluridine-3'-phosphate
  modified_base 7: mod_base = OTHER; note = 2'-O-methyladenosine-3'-phosphate
  modified_base 8: mod_base = OTHER; note = 2'-fluorocytidine-3'-phosphate
  modified_base 9: mod_base = OTHER; note = 2'-O-methyladenosine-3'-phosphate
  modified_base 10: mod_base = OTHER; note = 2'-fluoroadenosine-3'-phosphate
  modified_base 11: mod_base = OTHER; note = 2'-O-methyladenosine-3'-phosphate
  modified_base 12: mod_base = OTHER; note = 2'-O-methyladenosine-3'-phosphate
  modified_base 13: mod_base = OTHER; note = 2'-O-methylguanosine-3'-phosphate
  modified_base 14: mod_base = OTHER; note = 2'-fluorocytidine-3'-phosphate
  modified_base 15: mod_base = OTHER; note = 2'-O-methyladenosine-3'-phosphate
  modified_base 16: mod_base = OTHER; note = 2'-fluoroadenosine-3'-phosphate
  modified_base 17: mod_base = OTHER; note = 2'-O-methyladenosine-3'-phosphate
  modified_base 18: mod_base = OTHER; note = 2'-O-methyladenosine-3'-phosphate
  modified_base 19: mod_base = OTHER; note = 2'-O-methylcytidine-3'-phosphate
  modified_base 20: mod_base = OTHER; note = 2'-fluoroadenosine-3'-phosphate
  modified_base 21: mod_base = OTHER; note = 2'-O-methylguanosine-3'-phosphorothioate
  modified_base 22: mod_base = OTHER; note = 2'-O-methylguanosine-3'-phosphorothioate
  modified_base 23: mod_base = OTHER; note = 2'-O-methyluridine
caagttacaaaagcaaaacaggt

SEQ ID NO: 2124 - RNA, 21 nt, synthetic construct
  source 1..21: mol_type = other RNA
  modified_base 1: mod_base = OTHER; note = 2'-O-methylcytidine-3'-phosphorothioate
  modified_base 2: mod_base = OTHER; note = 2'-O-methyluridine-3'-phosphorothioate
  modified_base 3: mod_base = OTHER; note = 2'-O-methylguanosine-3'-phosphate
  modified_base 4: mod_base = OTHER; note = 2'-O-methyluridine-3'-phosphate
  modified_base 5: mod_base = OTHER; note = 2'-O-methyluridine-3'-phosphate
  modified_base 6: mod_base = OTHER; note = 2'-O-methyluridine-3'-phosphate
  modified_base 7: mod_base = OTHER; note = 2'-fluorouridine-3'-phosphate
  modified_base 8: mod_base = OTHER; note = 2'-O-methylguanosine-3'-phosphate
  modified_base 9: mod_base = OTHER; note = 2'-fluorocytidine-3'-phosphate
  modified_base 10: mod_base = OTHER; note = 2'-O-methyluridine-3'-phosphate
  modified_base 11: mod_base = OTHER; note = 2'-O-methyluridine-3'-phosphate
  modified_base 12: mod_base = OTHER; note = 2'-O-methyluridine-3'-phosphate
  modified_base 13: mod_base = OTHER; note = 2'-O-methyluridine-3'-phosphate
  modified_base 14: mod_base = OTHER; note = 2'-O-methylguanosine-3'-phosphate
  modified_base 15: mod_base = OTHER; note = 2'-O-methyluridine-3'-phosphate
  modified_base 16: mod_base = OTHER; note = 2'-O-methyladenosine-3'-phosphate
  modified_base 17: mod_base = OTHER; note = 2'-O-methyladenosine-3'-phosphate
  modified_base 18: mod_base = OTHER; note = 2'-O-methylcytidine-3'-phosphate
  modified_base 19: mod_base = OTHER; note = 2'-O-methyluridine-3'-phosphate
  modified_base 20: mod_base = OTHER; note = 2'-O-methyluridine-3'-phosphate
  modified_base 21: mod_base = OTHER; note = 2'-O-methylguanosine
ctgttttgcttttgtaacttg

SEQ ID NO: 2125 - RNA, 23 nt, synthetic construct
  source 1..23: mol_type = other RNA
  modified_base 1: mod_base = OTHER; note = 2'-O-methylcytidine-3'-phosphorothioate
  modified_base 2: mod_base = OTHER; note = 2'-fluoroadenosine-3'-phosphorothioate
  modified_base 3: mod_base = OTHER; note = 2'-O-methyladenosine-3'-phosphate
  modified_base 4: mod_base = OTHER; note = 2'-fluoroguanosine-3'-phosphate
  modified_base 5: mod_base = OTHER; note = 2'-O-methyluridine-3'-phosphate
  modified_base 6: mod_base = OTHER; note = 2'-O-methyluridine-3'-phosphate
  modified_base 7: mod_base = OTHER; note = 2'-O-methyladenosine-3'-phosphate
  modified_base 8: mod_base = OTHER; note = 2'-fluorocytidine-3'-phosphate
  modified_base 9: mod_base = OTHER; note = 2'-O-methyladenosine-3'-phosphate
  modified_base 10: mod_base = OTHER; note = 2'-fluoroadenosine-3'-phosphate
  modified_base 11: mod_base = OTHER; note = 2'-O-methyladenosine-3'-phosphate
  modified_base 12: mod_base = OTHER; note = 2'-O-methyladenosine-3'-phosphate
  modified_base 13: mod_base = OTHER; note = 2'-O-methylguanosine-3'-phosphate
  modified_base 14: mod_base = OTHER; note = 2'-fluorocytidine-3'-phosphate
  modified_base 15: mod_base = OTHER; note = 2'-O-methyladenosine-3'-phosphate
  modified_base 16: mod_base = OTHER; note = 2'-fluoroadenosine-3'-phosphate
  modified_base 17: mod_base = OTHER; note = 2'-O-methyladenosine-3'-phosphate
  modified_base 18: mod_base = OTHER; note = 2'-O-methyladenosine-3'-phosphate
  modified_base 19: mod_base = OTHER; note = 2'-O-methylcytidine-3'-phosphate
  modified_base 20: mod_base = OTHER; note = 2'-fluoroadenosine-3'-phosphate
  modified_base 21: mod_base = OTHER; note = 2'-O-methylguanosine-3'-phosphorothioate
  modified_base 22: mod_base = OTHER; note = 2'-O-methylguanosine-3'-phosphorothioate
  modified_base 23: mod_base = OTHER; note = 2'-O-methyluridine
caagttacaaaagcaaaacaggt

SEQ ID NO: 2126 - RNA, 21 nt, synthetic construct
  source 1..21: mol_type = other RNA
  modified_base 1: mod_base = OTHER; note = 2'-O-methylcytidine-3'-phosphorothioate
  modified_base 2: mod_base = OTHER; note = 2'-O-methyluridine-3'-phosphorothioate
  modified_base 3: mod_base = OTHER; note = 2'-O-methylguanosine-3'-phosphate
  modified_base 4: mod_base = OTHER; note = 2'-O-methyluridine-3'-phosphate
  modified_base 5: mod_base = OTHER; note = 2'-O-methyluridine-3'-phosphate
  modified_base 6: mod_base = OTHER; note = 2'-O-methyluridine-3'-phosphate
  modified_base 7: mod_base = OTHER; note = 2'-fluorouridine-3'-phosphate
  modified_base 8: mod_base = OTHER; note = 2'-O-methylguanosine-3'-phosphate
  modified_base 9: mod_base = OTHER; note = 2'-fluorocytidine-3'-phosphate
  modified_base 10: mod_base = OTHER; note = 2'-O-methyluridine-3'-phosphate
  modified_base 11: mod_base = OTHER; note = 2'-O-methyluridine-3'-phosphate
  modified_base 12: mod_base = OTHER; note = 2'-O-methyluridine-3'-phosphate
  modified_base 13: mod_base = OTHER; note = 2'-O-methyluridine-3'-phosphate
  modified_base 14: mod_base = OTHER; note = 2'-O-methylguanosine-3'-phosphate
  modified_base 15: mod_base = OTHER; note = 2'-O-methyluridine-3'-phosphate
  modified_base 16: mod_base = OTHER; note = 2'-O-methyladenosine-3'-phosphate
  modified_base 17: mod_base = OTHER; note = 2'-O-methyladenosine-3'-phosphate
  modified_base 18: mod_base = OTHER; note = 2'-O-methylcytidine-3'-phosphate
  modified_base 19: mod_base = OTHER; note = 2'-O-methyluridine-3'-phosphate
  modified_base 20: mod_base = OTHER; note = 2'-O-methyluridine-3'-phosphate
  modified_base 21: mod_base = OTHER; note = 2'-O-methylguanosine
ctgttttgcttttgtaacttg

SEQ ID NO: 2127 - RNA, 23 nt, synthetic construct
  source 1..23: mol_type = other RNA
  modified_base 1: mod_base = OTHER; note = 2'-O-methylcytidine-3'-phosphorothioate
  modified_base 2: mod_base = OTHER; note = 2'-fluoroadenosine-3'-phosphorothioate
  modified_base 3: mod_base = OTHER; note = 2'-O-methyladenosine-3'-phosphate
  modified_base 4: mod_base = OTHER; note = 2'-fluoroguanosine-3'-phosphate
  modified_base 5: mod_base = OTHER; note = 2'-fluorouridine-3'-phosphate
  modified_base 6: mod_base = OTHER; note = 2'-fluorouridine-3'-phosphate
  modified_base 7: mod_base = OTHER; note = 2'-O-methyladenosine-3'-phosphate
  modified_base 8: mod_base = OTHER; note = 2'-fluorocytidine-3'-phosphate
  modified_base 9: mod_base = OTHER; note = 2'-O-methyladenosine-3'-phosphate
  modified_base 10: mod_base = OTHER; note = 2'-fluoroadenosine-3'-phosphate
  modified_base 11: mod_base = OTHER; note = 2'-O-methyladenosine-3'-phosphate
  modified_base 12: mod_base = OTHER; note = 2'-fluoroadenosine-3'-phosphate
  modified_base 13: mod_base = OTHER; note = 2'-O-methylguanosine-3'-phosphate
  modified_base 14: mod_base = OTHER; note = 2'-fluorocytidine-3'-phosphate
  modified_base 15: mod_base = OTHER; note = 2'-O-methyladenosine-3'-phosphate
  modified_base 16: mod_base = OTHER; note = 2'-fluoroadenosine-3'-phosphate
  modified_base 17: mod_base = OTHER; note = 2'-O-methyladenosine-3'-phosphate
  modified_base 18: mod_base = OTHER; note = 2'-fluoroadenosine-3'-phosphate
  modified_base 19: mod_base = OTHER; note = 2'-O-methylcytidine-3'-phosphate
  modified_base 20: mod_base = OTHER; note = 2'-O-methyladenosine-3'-phosphate
  modified_base 21: mod_base = OTHER; note = 2'-O-methylguanosine-3'-phosphorothioate
  modified_base 22: mod_base = OTHER; note = 2'-O-methylguanosine-3'-phosphorothioate
  modified_base 23: mod_base = OTHER; note = 2'-O-methyluridine
caagttacaaaagcaaaacaggt

SEQ ID NO: 2128 - DNA, 21 bp, synthetic construct
  source 1..21: mol_type = other DNA
  modified_base 1: mod_base = OTHER; note = 2'-O-methylcytidine-3'-phosphorothioate
  modified_base 2: mod_base = OTHER; note = 2'-O-methyluridine-3'-phosphorothioate
  modified_base 3: mod_base = OTHER; note = 2'-O-methylguanosine-3'-phosphate
  modified_base 4: mod_base = OTHER; note = 2'-O-methyluridine-3'-phosphate
  modified_base 5: mod_base = OTHER; note = 2'-O-methyluridine-3'-phosphate
  modified_base 6: mod_base = OTHER; note = 2'-O-methyluridine-3'-phosphate
  modified_base 7: mod_base = OTHER; note = 2'-fluorouridine-3'-phosphate
  modified_base 8: mod_base = OTHER; note = 2'-O-methylguanosine-3'-phosphate
  modified_base 9: mod_base = OTHER; note = 2'-fluorocytidine-3'-phosphate
  modified_base 10: mod_base = OTHER; note = 2'-O-methyluridine-3'-phosphate
  modified_base 12: mod_base = OTHER; note = 2'-O-methyluridine-3'-phosphate
  modified_base 13: mod_base = OTHER; note = 2'-O-methyluridine-3'-phosphate
  modified_base 14: mod_base = OTHER; note = 2'-O-methylguanosine-3'-phosphate
  modified_base 15: mod_base = OTHER; note = 2'-O-methyluridine-3'-phosphate
  modified_base 16: mod_base = OTHER; note = 2'-O-methyladenosine-3'-phosphate
  modified_base 17: mod_base = OTHER; note = 2'-O-methyladenosine-3'-phosphate
  modified_base 18: mod_base = OTHER; note = 2'-O-methylcytidine-3'-phosphate
  modified_base 19: mod_base = OTHER; note = 2'-O-methyluridine-3'-phosphate
  modified_base 20: mod_base = OTHER; note = 2'-O-methyluridine-3'-phosphate
  modified_base 21: mod_base = OTHER; note = 2'-O-methylguanosine
  misc_feature 1..10: note = RNA
  misc_feature 11: note = DNA
  misc_feature 12..21: note = RNA
ctgttttgcttttgtaacttg

SEQ ID NO: 2129 - RNA, 23 nt, synthetic construct
  source 1..23: mol_type = other RNA
  modified_base 1: mod_base = OTHER; note = 2'-O-methylcytidine-3'-phosphorothioate
  modified_base 2: mod_base = OTHER; note = 2'-fluoroadenosine-3'-phosphorothioate
  modified_base 3: mod_base = OTHER; note = 2'-O-methyladenosine-3'-phosphate
  modified_base 4: mod_base = OTHER; note = 2'-fluoroguanosine-3'-phosphate
  modified_base 5: mod_base = OTHER; note = 2'-fluorouridine-3'-phosphate
  modified_base 6: mod_base = OTHER; note = 2'-fluorouridine-3'-phosphate
  modified_base 7: mod_base = OTHER; note = 2'-O-methyladenosine-3'-phosphate
  modified_base 8: mod_base = OTHER; note = 2'-fluorocytidine-3'-phosphate
  modified_base 9: mod_base = OTHER; note = 2'-O-methyladenosine-3'-phosphate
  modified_base 10: mod_base = OTHER; note = 2'-fluoroadenosine-3'-phosphate
  modified_base 11: mod_base = OTHER; note = 2'-O-methyladenosine-3'-phosphate
  modified_base 12: mod_base = OTHER; note = 2'-fluoroadenosine-3'-phosphate
  modified_base 13: mod_base = OTHER; note = 2'-O-methylguanosine-3'-phosphate
  modified_base 14: mod_base = OTHER; note = 2'-fluorocytidine-3'-phosphate
  modified_base 15: mod_base = OTHER; note = 2'-O-methyladenosine-3'-phosphate
  modified_base 16: mod_base = OTHER; note = 2'-fluoroadenosine-3'-phosphate
  modified_base 17: mod_base = OTHER; note = 2'-O-methyladenosine-3'-phosphate
  modified_base 18: mod_base = OTHER; note = 2'-fluoroadenosine-3'-phosphate
  modified_base 19: mod_base = OTHER; note = 2'-O-methylcytidine-3'-phosphate
  modified_base 20: mod_base = OTHER; note = 2'-O-methyladenosine-3'-phosphate
  modified_base 21: mod_base = OTHER; note = 2'-O-methylguanosine-3'-phosphorothioate
  modified_base 22: mod_base = OTHER; note = 2'-O-methylguanosine-3'-phosphorothioate
  modified_base 23: mod_base = OTHER; note = 2'-O-methyluridine
caagttacaaaagcaaaacaggt

SEQ ID NO: 2130 - RNA, 21 nt, synthetic construct
  source 1..21: mol_type = other RNA
  modified_base 1: mod_base = OTHER; note = 2'-O-methylcytidine-3'-phosphorothioate
  modified_base 2: mod_base = OTHER; note = 2'-O-methyluridine-3'-phosphorothioate
  modified_base 3: mod_base = OTHER; note = 2'-O-methylguanosine-3'-phosphate
  modified_base 4: mod_base = OTHER; note = 2'-O-methyluridine-3'-phosphate
  modified_base 5: mod_base = OTHER; note = 2'-O-methyluridine-3'-phosphate
  modified_base 6: mod_base = OTHER; note = 2'-O-methyluridine-3'-phosphate
  modified_base 7: mod_base = OTHER; note = 2'-fluorouridine-3'-phosphate
  modified_base 8: mod_base = OTHER; note = 2'-O-methylguanosine-3'-phosphate
  modified_base 9: mod_base = OTHER; note = 2'-fluorocytidine-3'-phosphate
  modified_base 10: mod_base = OTHER; note = 2'-fluorouridine-3'-phosphate
  modified_base 11: mod_base = OTHER; note = 2'-fluorouridine-3'-phosphate
  modified_base 12: mod_base = OTHER; note = 2'-O-methyluridine-3'-phosphate
  modified_base 13: mod_base = OTHER; note = 2'-O-methyluridine-3'-phosphate
  modified_base 14: mod_base = OTHER; note = 2'-O-methylguanosine-3'-phosphate
  modified_base 15: mod_base = OTHER; note = 2'-O-methyluridine-3'-phosphate
  modified_base 16: mod_base = OTHER; note = 2'-O-methyladenosine-3'-phosphate
  modified_base 17: mod_base = OTHER; note = 2'-O-methyladenosine-3'-phosphate
  modified_base 18: mod_base = OTHER; note = 2'-O-methylcytidine-3'-phosphate
  modified_base 19: mod_base = OTHER; note = 2'-O-methyluridine-3'-phosphate
  modified_base 20: mod_base = OTHER; note = 2'-O-methyluridine-3'-phosphate
  modified_base 21: mod_base = OTHER; note = 2'-O-methylguanosine
ctgttttgcttttgtaacttg

SEQ ID NO: 2131 - RNA, 23 nt, synthetic construct
  source 1..23: mol_type = other RNA
  modified_base 1: mod_base = OTHER; note = 2'-O-methylcytidine-3'-phosphorothioate
  modified_base 2: mod_base = OTHER; note = 2'-fluoroadenosine-3'-phosphorothioate
  modified_base 3: mod_base = OTHER; note = 2'-O-methyladenosine-3'-phosphate
  modified_base 4: mod_base = OTHER; note = 2'-O-methylguanosine-3'-phosphate
  modified_base 5: mod_base = OTHER; note = 2'-O-methyluridine-3'-phosphate
  modified_base 6: mod_base = OTHER; note = 2'-fluorouridine-3'-phosphate
  modified_base 7: mod_base = OTHER; note = 2'-O-methyladenosine-3'-phosphate
  modified_base 8: mod_base = OTHER; note = 2'-fluorocytidine-3'-phosphate
  modified_base 9: mod_base = OTHER; note = 2'-fluoroadenosine-3'-phosphate
  modified_base 10: mod_base = OTHER; note = 2'-O-methyladenosine-3'-phosphate
  modified_base 11: mod_base = OTHER; note = 2'-O-methyladenosine-3'-phosphate
  modified_base 12: mod_base = OTHER; note = 2'-O-methyladenosine-3'-phosphate
  modified_base 13: mod_base = OTHER; note = 2'-O-methylguanosine-3'-phosphate
  modified_base 14: mod_base = OTHER; note = 2'-fluorocytidine-3'-phosphate
  modified_base 15: mod_base = OTHER; note = 2'-O-methyladenosine-3'-phosphate
  modified_base 16: mod_base = OTHER; note = 2'-fluoroadenosine-3'-phosphate
  modified_base 17: mod_base = OTHER; note = 2'-O-methyladenosine-3'-phosphate
  modified_base 18: mod_base = OTHER; note = 2'-O-methyladenosine-3'-phosphate
  modified_base 19: mod_base = OTHER; note = 2'-O-methylcytidine-3'-phosphate
  modified_base 20: mod_base = OTHER; note = 2'-O-methyladenosine-3'-phosphate
  modified_base 21: mod_base = OTHER; note = 2'-O-methylguanosine-3'-phosphorothioate
  modified_base 22: mod_base = OTHER; note = 2'-O-methylguanosine-3'-phosphorothioate
  modified_base 23: mod_base = OTHER; note = 2'-O-methyluridine
caagttacaaaagcaaaacaggt

SEQ ID NO: 2132 - RNA, 21 nt, synthetic construct
  source 1..21: mol_type = other RNA
  modified_base 1: mod_base = OTHER; note = 2'-O-methylcytidine-3'-phosphorothioate
  modified_base 2: mod_base = OTHER; note = 2'-O-methyluridine-3'-phosphorothioate
  modified_base 3: mod_base = OTHER; note = 2'-O-methylguanosine-3'-phosphate
  modified_base 4: mod_base = OTHER; note = 2'-O-methyluridine-3'-phosphate
  modified_base 5: mod_base = OTHER; note = 2'-O-methyluridine-3'-phosphate
  modified_base 6: mod_base = OTHER; note = 2'-O-methyluridine-3'-phosphate
  modified_base 7: mod_base = OTHER; note = 2'-fluorouridine-3'-phosphate
  modified_base 8: mod_base = OTHER; note = 2'-O-methylguanosine-3'-phosphate
  modified_base 9: mod_base = OTHER; note = 2'-fluorocytidine-3'-phosphate
  modified_base 10: mod_base = OTHER; note = 2'-fluorouridine-3'-phosphate
  modified_base 11: mod_base = OTHER; note = 2'-fluorouridine-3'-phosphate
  modified_base 12: mod_base = OTHER; note = 2'-O-methyluridine-3'-phosphate
  modified_base 13: mod_base = OTHER; note = 2'-O-methyluridine-3'-phosphate
  modified_base 14: mod_base = OTHER; note = 2'-O-methylguanosine-3'-phosphate
  modified_base 15: mod_base = OTHER; note = 2'-O-methyluridine-3'-phosphate
  modified_base 16: mod_base = OTHER; note = 2'-O-methyladenosine-3'-phosphate
  modified_base 17: mod_base = OTHER; note = 2'-O-methyladenosine-3'-phosphate
  modified_base 18: mod_base = OTHER; note = 2'-O-methylcytidine-3'-phosphate
  modified_base 19: mod_base = OTHER; note = 2'-O-methyluridine-3'-phosphate
  modified_base 20: mod_base = OTHER; note = 2'-O-methyluridine-3'-phosphate
  modified_base 21: mod_base = OTHER; note = 2'-O-methylguanosine
ctgttttgcttttgtaacttg

SEQ ID NO: 2133 - RNA, 22 nt, synthetic construct
  source 1..22: mol_type = other RNA
  modified_base 1: mod_base = OTHER; note = 2'-O-methylcytidine-3'-phosphorothioate
  modified_base 2: mod_base = OTHER; note = 2'-fluoroadenosine-3'-phosphorothioate
  modified_base 3: mod_base = OTHER; note = 2'-O-methyladenosine-3'-phosphate
  modified_base 4: mod_base = OTHER; note = 2'-O-methylguanosine-3'-phosphate
  modified_base 5: mod_base = OTHER; note = 2'-O-methyluridine-3'-phosphate
  modified_base 6: mod_base = OTHER; note = 2'-fluorouridine-3'-phosphate
  modified_base 7: mod_base = OTHER; note = 2'-O-methyladenosine-3'-phosphate
  modified_base 8: mod_base = OTHER; note = 2'-O-methylcytidine-3'-phosphate
  modified_base 9: mod_base = OTHER; note = 2'-O-methyladenosine-3'-phosphate
  modified_base 10: mod_base = OTHER; note = 2'-O-methyladenosine-3'-phosphate
  modified_base 11: mod_base = OTHER; note = 2'-O-methyladenosine-3'-phosphate
  modified_base 12: mod_base = OTHER; note = 2'-O-methylguanosine-3'-phosphate
  modified_base 13: mod_base = OTHER; note = 2'-fluorocytidine-3'-phosphate
  modified_base 14: mod_base = OTHER; note = 2'-O-methyladenosine-3'-phosphate
  modified_base 15: mod_base = OTHER; note = 2'-fluoroadenosine-3'-phosphate
  modified_base 16: mod_base = OTHER; note = 2'-O-methyladenosine-3'-phosphate
  modified_base 17: mod_base = OTHER; note = 2'-O-methyladenosine-3'-phosphate
  modified_base 18: mod_base = OTHER; note = 2'-O-methylcytidine-3'-phosphate
  modified_base 19: mod_base = OTHER; note = 2'-O-methyladenosine-3'-phosphate
  modified_base 20: mod_base = OTHER; note = 2'-O-methylguanosine-3'-phosphorothioate
  modified_base 21: mod_base = OTHER; note = 2'-O-methylguanosine-3'-phosphorothioate
  modified_base 22: mod_base = OTHER; note = 2'-O-methyluridine
caagttacaaagcaaaacaggt

SEQ ID NO: 2134 - RNA, 21 nt, synthetic construct
  source 1..21: mol_type = other RNA
  modified_base 1: mod_base = OTHER; note = 2'-O-methylcytidine-3'-phosphorothioate
  modified_base 2: mod_base = OTHER; note = 2'-O-methyluridine-3'-phosphorothioate
  modified_base 3: mod_base = OTHER; note = 2'-O-methylguanosine-3'-phosphate
  modified_base 4: mod_base = OTHER; note = 2'-O-methyluridine-3'-phosphate
  modified_base 5: mod_base = OTHER; note = 2'-O-methyluridine-3'-phosphate
  modified_base 6: mod_base = OTHER; note = 2'-O-methyluridine-3'-phosphate
  modified_base 7: mod_base = OTHER; note = 2'-fluorouridine-3'-phosphate
  modified_base 8: mod_base = OTHER; note = 2'-O-methylguanosine-3'-phosphate
  modified_base 9: mod_base = OTHER; note = 2'-fluorocytidine-3'-phosphate
  modified_base 10: mod_base = OTHER; note = 2'-fluorouridine-3'-phosphate
  modified_base 11: mod_base = OTHER; note = 2'-fluorouridine-3'-phosphate
  modified_base 12: mod_base = OTHER; note = 2'-O-methyluridine-3'-phosphate
  modified_base 13: mod_base = OTHER; note = 2'-O-methyluridine-3'-phosphate
  modified_base 14: mod_base = OTHER; note = 2'-O-methylguanosine-3'-phosphate
  modified_base 15: mod_base = OTHER; note = 2'-O-methyluridine-3'-phosphate
  modified_base 16: mod_base = OTHER; note = 2'-O-methyladenosine-3'-phosphate
  modified_base 17: mod_base = OTHER; note = 2'-O-methyladenosine-3'-phosphate
  modified_base 18: mod_base = OTHER; note = 2'-O-methylcytidine-3'-phosphate
  modified_base 19: mod_base = OTHER; note = 2'-O-methyluridine-3'-phosphate
  modified_base 20: mod_base = OTHER; note = 2'-O-methyluridine-3'-phosphate
  modified_base 21: mod_base = OTHER; note = 2'-O-methylguanosine
ctgttttgcttttgtaacttg

SEQ ID NO: 2135 - RNA, 22 nt, synthetic construct
  source 1..22: mol_type = other RNA
  modified_base 1: mod_base = OTHER; note = 2'-O-methylcytidine-3'-phosphorothioate
  modified_base 2: mod_base = OTHER; note = 2'-fluoroadenosine-3'-phosphorothioate
  modified_base 3: mod_base = OTHER; note = 2'-O-methyladenosine-3'-phosphate
  modified_base 4: mod_base = OTHER; note = 2'-O-methylguanosine-3'-phosphate
  modified_base 5: mod_base = OTHER; note = 2'-O-methyluridine-3'-phosphate
  modified_base 6: mod_base = OTHER; note = 2'-O-methyluridine-3'-phosphate
  modified_base 7: mod_base = OTHER; note = 2'-O-methyladenosine-3'-phosphate
  modified_base 8: mod_base = OTHER; note = 2'-O-methylcytidine-3'-phosphate
  modified_base 9: mod_base = OTHER; note = 2'-O-methyladenosine-3'-phosphate
  modified_base 10: mod_base = OTHER; note = 2'-O-methyladenosine-3'-phosphate
  modified_base 11: mod_base = OTHER; note = 2'-O-methyladenosine-3'-phosphate
  modified_base 12: mod_base = OTHER; note = 2'-O-methylguanosine-3'-phosphate
  modified_base 13: mod_base = OTHER; note = 2'-fluorocytidine-3'-phosphate
  modified_base 14: mod_base = OTHER; note = 2'-O-methyladenosine-3'-phosphate
  modified_base 15: mod_base = OTHER; note = 2'-fluoroadenosine-3'-phosphate
  modified_base 16: mod_base = OTHER; note = 2'-O-methyladenosine-3'-phosphate
  modified_base 17: mod_base = OTHER; note = 2'-O-methyladenosine-3'-phosphate
  modified_base 18: mod_base = OTHER; note = 2'-O-methylcytidine-3'-phosphate
  modified_base 19: mod_base = OTHER; note = 2'-O-methyladenosine-3'-phosphate
  modified_base 20: mod_base = OTHER; note = 2'-O-methylguanosine-3'-phosphorothioate
  modified_base 21: mod_base = OTHER; note = 2'-O-methylguanosine-3'-phosphorothioate
  modified_base 22: mod_base = OTHER; note = 2'-O-methyluridine
caagttacaaagcaaaacaggt

SEQ ID NO: 2136 - DNA, 21 bp, synthetic construct
  source 1..21: mol_type = other DNA
  modified_base 1: mod_base = OTHER; note = 2'-O-methylcytidine-3'-phosphorothioate
  modified_base 2: mod_base = OTHER; note = 2'-O-methyluridine-3'-phosphorothioate
  modified_base 3: mod_base = OTHER; note = 2'-O-methyladenosine-3'-phosphate
  modified_base 4: mod_base = OTHER; note = 2'-O-methylguanosine-3'-phosphate
  modified_base 5: mod_base = OTHER; note = 2'-O-methyladenosine-3'-phosphate
  modified_base 6: mod_base = OTHER; note = 2'-O-methylcytidine-3'-phosphate
  modified_base 7: mod_base = OTHER; note = 2'-fluorocytidine-3'-phosphate
  modified_base 8: mod_base = OTHER; note = 2'-O-methyluridine-3'-phosphate
  modified_base 9: mod_base = OTHER; note = 2'-fluoroguanosine-3'-phosphate
  modified_base 10: mod_base = OTHER; note = 2'-O-methyluridine-3'-phosphate
  modified_base 12: mod_base = OTHER; note = 2'-O-methyluridine-3'-phosphate
  modified_base 13: mod_base = OTHER; note = 2'-O-methyluridine-3'-phosphate
  modified_base 14: mod_base = OTHER; note = 2'-O-methylguanosine-3'-phosphate
  modified_base 15: mod_base = OTHER; note = 2'-O-methylcytidine-3'-phosphate
  modified_base 16: mod_base = OTHER; note = 2'-O-methyluridine-3'-phosphate
  modified_base 17: mod_base = OTHER; note = 2'-O-methyluridine-3'-phosphate
  modified_base 18: mod_base = OTHER; note = 2'-O-methyluridine-3'-phosphate
  modified_base 19: mod_base = OTHER; note = 2'-O-methyluridine-3'-phosphate
  modified_base 20: mod_base = OTHER; note = 2'-O-methylguanosine-3'-phosphate
  modified_base 21: mod_base = OTHER; note = 2'-O-methyluridine
  misc_feature 1..10: note = RNA
  misc_feature 11: note = DNA
  misc_feature 12..21: note = RNA
ctagacctgttttgcttttgt

SEQ ID NO: 2137 - RNA, 23 nt, synthetic construct
  source 1..23: mol_type = other RNA
  modified_base 1: mod_base = OTHER; note = 2'-O-methyladenosine-3'-phosphorothioate
  modified_base 2: mod_base = OTHER; note = 2'-fluorocytidine-3'-phosphorothioate
  modified_base 3: mod_base = OTHER; note = 2'-O-methyladenosine-3'-phosphate
  modified_base 4: mod_base = OTHER; note = 2'-fluoroadenosine-3'-phosphate
  modified_base 5: mod_base = OTHER; note = 2'-fluoroadenosine-3'-phosphate
  modified_base 6: mod_base = OTHER; note = 2'-fluoroadenosine-3'-phosphate
  modified_base 7: mod_base = OTHER; note = 2'-O-methylguanosine-3'-phosphate
  modified_base 8: mod_base = OTHER; note = 2'-fluorocytidine-3'-phosphate
  modified_base 9: mod_base = OTHER; note = 2'-O-methyladenosine-3'-phosphate
  modified_base 10: mod_base = OTHER; note = 2'-fluoroadenosine-3'-phosphate
  modified_base 11: mod_base = OTHER; note = 2'-O-methyladenosine-3'-phosphate
  modified_base 12: mod_base = OTHER; note = 2'-fluoroadenosine-3'-phosphate
  modified_base 13: mod_base = OTHER; note = 2'-O-methylcytidine-3'-phosphate
  modified_base 14: mod_base = OTHER; note = 2'-fluoroadenosine-3'-phosphate
  modified_base 15: mod_base = OTHER; note = 2'-O-methylguanosine-3'-phosphate
  modified_base 16: mod_base = OTHER; note = 2'-fluoroguanosine-3'-phosphate
  modified_base 17: mod_base = OTHER; note = 2'-O-methyluridine-3'-phosphate
  modified_base 18: mod_base = OTHER; note = 2'-fluorocytidine-3'-phosphate
  modified_base 19: mod_base = OTHER; note = 2'-O-methyluridine-3'-phosphate
  modified_base 20: mod_base = OTHER; note = 2'-O-methyladenosine-3'-phosphate
  modified_base 21: mod_base = OTHER; note = 2'-O-methylguanosine-3'-phosphorothioate
  modified_base 22: mod_base = OTHER; note = 2'-O-methyladenosine-3'-phosphorothioate
  modified_base 23: mod_base = OTHER; note = 2'-O-methyladenosine
acaaaagcaaaacaggtctagaa

SEQ ID NO: 2138 - DNA, 21 bp, synthetic construct
  source 1..21: mol_type = other DNA
  modified_base 1: mod_base = OTHER; note = 2'-O-methylcytidine-3'-phosphorothioate
  modified_base 2: mod_base = OTHER; note = 2'-O-methyluridine-3'-phosphorothioate
  modified_base 3: mod_base = OTHER; note = 2'-O-methyladenosine-3'-phosphate
  modified_base 4: mod_base = OTHER; note = 2'-O-methylguanosine-3'-phosphate
  modified_base 5: mod_base = OTHER; note = 2'-O-methyladenosine-3'-phosphate
  modified_base 6: mod_base = OTHER; note = 2'-O-methylcytidine-3'-phosphate
  modified_base 7: mod_base = OTHER; note = 2'-fluorocytidine-3'-phosphate
  modified_base 8: mod_base = OTHER; note = 2'-O-methyluridine-3'-phosphate
  modified_base 9: mod_base = OTHER; note = 2'-fluoroguanosine-3'-phosphate
  modified_base 10: mod_base = OTHER; note = 2'-O-methyluridine-3'-phosphate
  modified_base 12: mod_base = OTHER; note = 2'-O-methyluridine-3'-phosphate
  modified_base 13: mod_base = OTHER; note = 2'-O-methyluridine-3'-phosphate
  modified_base 14: mod_base = OTHER; note = 2'-O-methylguanosine-3'-phosphate
  modified_base 15: mod_base = OTHER; note = 2'-O-methylcytidine-3'-phosphate
  modified_base 16: mod_base = OTHER; note = 2'-O-methyluridine-3'-phosphate
  modified_base 17: mod_base = OTHER; note = 2'-O-methyluridine-3'-phosphate
  modified_base 18: mod_base = OTHER; note = 2'-O-methyluridine-3'-phosphate
  modified_base 19: mod_base = OTHER; note = 2'-O-methyluridine-3'-phosphate
  modified_base 20: mod_base = OTHER; note = 2'-O-methylguanosine-3'-phosphorothioate
  modified_base 21: mod_base = OTHER; note = 2'-O-methyluridine
  misc_feature 1..10: note = RNA
  misc_feature 11: note = DNA
  misc_feature 12..21: note = RNA
ctagacctgttttgcttttgt

SEQ ID NO: 2139 - RNA, 23 nt, synthetic construct
  source 1..23: mol_type = other RNA
  modified_base 1: mod_base = OTHER; note = 2'-O-methyladenosine-3'-phosphorothioate
  modified_base 2: mod_base = OTHER; note = 2'-fluorocytidine-3'-phosphorothioate
  modified_base 3: mod_base = OTHER; note = 2'-O-methyladenosine-3'-phosphate
  modified_base 4: mod_base = OTHER; note = 2'-fluoroadenosine-3'-phosphate
  modified_base 5: mod_base = OTHER; note = 2'-fluoroadenosine-3'-phosphate
  modified_base 6: mod_base = OTHER; note = 2'-fluoroadenosine-3'-phosphate
  modified_base 7: mod_base = OTHER; note = 2'-O-methylguanosine-3'-phosphate
  modified_base 8: mod_base = OTHER; note = 2'-fluorocytidine-3'-phosphate
  modified_base 9: mod_base = OTHER; note = 2'-O-methyladenosine-3'-phosphate
  modified_base 10: mod_base = OTHER; note = 2'-fluoroadenosine-3'-phosphate
  modified_base 11: mod_base = OTHER; note = 2'-O-methyladenosine-3'-phosphate
  modified_base 12: mod_base = OTHER; note = 2'-fluoroadenosine-3'-phosphate
  modified_base 13: mod_base = OTHER; note = 2'-O-methylcytidine-3'-phosphate
  modified_base 14: mod_base = OTHER; note = 2'-fluoroadenosine-3'-phosphate
  modified_base 15: mod_base = OTHER; note = 2'-O-methylguanosine-3'-phosphate
  modified_base 16: mod_base = OTHER; note = 2'-fluoroguanosine-3'-phosphate
  modified_base 17: mod_base = OTHER; note = 2'-O-methyluridine-3'-phosphate
  modified_base 18: mod_base = OTHER; note = 2'-fluorocytidine-3'-phosphate
  modified_base 19: mod_base = OTHER; note = 2'-O-methyluridine-3'-phosphate
  modified_base 20: mod_base = OTHER; note = 2'-O-methyladenosine-3'-phosphate
  modified_base 21: mod_base = OTHER; note = 2'-O-methylguanosine-3'-phosphorothioate
  modified_base 22: mod_base = OTHER; note = 2'-O-methyladenosine-3'-phosphorothioate
  modified_base 23: mod_base = OTHER; note = 2'-O-methyladenosine
acaaaagcaaaacaggtctagaa

SEQ ID NO: 2140 - RNA, 19 nt, synthetic construct
  source 1..19: mol_type = other RNA
  modified_base 1: mod_base = OTHER; note = 2'-O-methyluridine-3'-phosphorothioate
  modified_base 2: mod_base = OTHER; note = 2'-O-methylguanosine-3'-phosphorothioate
  modified_base 3: mod_base = OTHER; note = 2'-O-methyluridine-3'-phosphate
  modified_base 4: mod_base = OTHER; note = 2'-O-methyluridine-3'-phosphate
  modified_base 5: mod_base = OTHER; note = 2'-O-methyluridine-3'-phosphate
  modified_base 6: mod_base = OTHER; note = 2'-O-methyluridine-3'-phosphate
  modified_base 7: mod_base = OTHER; note = 2'-fluoroguanosine-3'-phosphate
  modified_base 8: mod_base = OTHER; note = 2'-fluorocytidine-3'-phosphate
  modified_base 9: mod_base = OTHER; note = 2'-fluorouridine-3'-phosphate
  modified_base 10: mod_base = OTHER; note = 2'-O-methyluridine-3'-phosphate
  modified_base 11: mod_base = OTHER; note = 2'-O-methyluridine-3'-phosphate
  modified_base 12: mod_base = OTHER; note = 2'-O-methyluridine-3'-phosphate
  modified_base 13: mod_base = OTHER; note = 2'-O-methylguanosine-3'-phosphate
  modified_base 14: mod_base = OTHER; note = 2'-O-methyluridine-3'-phosphate
  modified_base 15: mod_base = OTHER; note = 2'-O-methyladenosine-3'-phosphate
  modified_base 16: mod_base = OTHER; note = 2'-O-methyladenosine-3'-phosphate
  modified_base 17: mod_base = OTHER; note = 2'-O-methylcytidine-3'-phosphorothioate
  modified_base 18: mod_base = OTHER; note = 2'-O-methyluridine-3'-phosphorothioate
  modified_base 19: mod_base = OTHER; note = 2'-O-methyluridine
tgttttgcttttgtaactt

SEQ ID NO: 2141 - RNA, 21 nt, synthetic construct
  source 1..21: mol_type = other RNA
  modified_base 1: mod_base = OTHER; note = 2'-O-methyladenosine-3'-phosphorothioate
  modified_base 2: mod_base = OTHER; note = 2'-fluoroadenosine-3'-phosphorothioate
  modified_base 3: mod_base = OTHER; note = 2'-O-methylguanosine-3'-phosphate
  modified_base 4: mod_base = OTHER; note = 2'-fluorouridine-3'-phosphate
  modified_base 5: mod_base = OTHER; note = 2'-O-methyluridine-3'-phosphate
  modified_base 6: mod_base = OTHER; note = 2'-fluoroadenosine-3'-phosphate
  modified_base 7: mod_base = OTHER; note = 2'-O-methylcytidine-3'-phosphate
  modified_base 8: mod_base = OTHER; note = 2'-fluoroadenosine-3'-phosphate
  modified_base 9: mod_base = OTHER; note = 2'-O-methyladenosine-3'-phosphate
  modified_base 10: mod_base = OTHER; note = 2'-fluoroadenosine-3'-phosphate
  modified_base 11: mod_base = OTHER; note = 2'-O-methyladenosine-3'-phosphate
  modified_base 12: mod_base = OTHER; note = 2'-fluoroguanosine-3'-phosphate
  modified_base 13: mod_base = OTHER; note = 2'-O-methylcytidine-3'-phosphate
  modified_base 14: mod_base = OTHER; note = 2'-fluoroadenosine-3'-phosphate
  modified_base 15: mod_base = OTHER; note = 2'-O-methyladenosine-3'-phosphate
  modified_base 16: mod_base = OTHER; note = 2'-fluoroadenosine-3'-phosphate
  modified_base 17: mod_base = OTHER; note = 2'-O-methyladenosine-3'-phosphate
  modified_base 18: mod_base = OTHER; note = 2'-fluorocytidine-3'-phosphate
  modified_base 19: mod_base = OTHER; note = 2'-O-methyladenosine-3'-phosphorothioate
  modified_base 20: mod_base = OTHER; note = 2'-fluoroguanosine-3'-phosphorothioate
  modified_base 21: mod_base = OTHER; note = 2'-O-methylguanosine
aagttacaaaagcaaaacagg

SEQ ID NO: 2142 - RNA, 19 nt, synthetic construct
  source 1..19: mol_type = other RNA
  modified_base 1: mod_base = OTHER; note = 2'-O-methyluridine-3'-phosphorothioate
  modified_base 2: mod_base = OTHER; note = 2'-O-methylguanosine-3'-phosphorothioate
  modified_base 3: mod_base = OTHER; note = 2'-O-methyluridine-3'-phosphate
  modified_base 4: mod_base = OTHER; note = 2'-O-methyluridine-3'-phosphate
  modified_base 5: mod_base = OTHER; note = 2'-O-methyluridine-3'-phosphate
  modified_base 6: mod_base = OTHER; note = 2'-O-methyluridine-3'-phosphate
  modified_base 7: mod_base = OTHER; note = 2'-fluoroguanosine-3'-phosphate
  modified_base 8: mod_base = OTHER; note = 2'-fluorocytidine-3'-phosphate
  modified_base 9: mod_base = OTHER; note = 2'-fluorouridine-3'-phosphate
  modified_base 10: mod_base = OTHER; note = 2'-O-methyluridine-3'-phosphate
  modified_base 11: mod_base = OTHER; note = 2'-O-methyluridine-3'-phosphate
  modified_base 12: mod_base = OTHER; note = 2'-O-methyluridine-3'-phosphate
  modified_base 13: mod_base = OTHER; note = 2'-O-methylguanosine-3'-phosphate
  modified_base 14: mod_base = OTHER; note = 2'-O-methyluridine-3'-phosphate
  modified_base 15: mod_base = OTHER; note = 2'-O-methyladenosine-3'-phosphate
  modified_base 16: mod_base = OTHER; note = 2'-O-methyladenosine-3'-phosphate
  modified_base 17: mod_base = OTHER; note = 2'-O-methylcytidine-3'-phosphate
  modified_base 18: mod_base = OTHER; note = 2'-O-methyluridine-3'-phosphorothioate
  modified_base 19: mod_base = OTHER; note = 2'-O-methyluridine
tgttttgcttttgtaactt

SEQ ID NO: 2143 - RNA, 21 nt, synthetic construct
  source 1..21: mol_type = other RNA
  modified_base 1: mod_base = OTHER; note = 2'-O-methyladenosine-3'-phosphorothioate
  modified_base 2: mod_base = OTHER; note = 2'-fluoroadenosine-3'-phosphorothioate
  modified_base 3: mod_base = OTHER; note = 2'-O-methylguanosine-3'-phosphate
  modified_base 4: mod_base = OTHER; note = 2'-fluorouridine-3'-phosphate
  modified_base 5: mod_base = OTHER; note = 2'-O-methyluridine-3'-phosphate
  modified_base 6: mod_base = OTHER; note = 2'-fluoroadenosine-3'-phosphate
  modified_base 7: mod_base = OTHER; note = 2'-O-methylcytidine-3'-phosphate
  modified_base 8: mod_base = OTHER; note = 2'-fluoroadenosine-3'-phosphate
  modified_base 9: mod_base = OTHER; note = 2'-O-methyladenosine-3'-phosphate
  modified_base 10: mod_base = OTHER; note = 2'-fluoroadenosine-3'-phosphate
  modified_base 11: mod_base = OTHER; note = 2'-O-methyladenosine-3'-phosphate
  modified_base 12: mod_base = OTHER; note = 2'-fluoroguanosine-3'-phosphate
  modified_base 13: mod_base = OTHER; note = 2'-O-methylcytidine-3'-phosphate
  modified_base 14: mod_base = OTHER; note = 2'-fluoroadenosine-3'-phosphate
  modified_base 15: mod_base = OTHER; note = 2'-O-methyladenosine-3'-phosphate
  modified_base 16: mod_base = OTHER; note = 2'-fluoroadenosine-3'-phosphate
  modified_base 17: mod_base = OTHER; note = 2'-O-methyladenosine-3'-phosphate
  modified_base 18: mod_base = OTHER; note = 2'-fluorocytidine-3'-phosphate
  modified_base 19: mod_base = OTHER; note = 2'-O-methyladenosine-3'-phosphorothioate
  modified_base 20: mod_base = OTHER; note = 2'-fluoroguanosine-3'-phosphorothioate
  modified_base 21: mod_base = OTHER; note = 2'-O-methylguanosine
aagttacaaaagcaaaacagg

SEQ ID NO: 2144 - RNA, 19 nt, synthetic construct
  source 1..19: mol_type = other RNA
  modified_base 1: mod_base = OTHER; note = 2'-O-methylguanosine-3'-phosphorothioate
  modified_base 2: mod_base = OTHER; note = 2'-O-methyluridine-3'-phosphorothioate
  modified_base 3: mod_base = OTHER; note = 2'-O-methyluridine-3'-phosphate
  modified_base 4: mod_base = OTHER; note = 2'-O-methyluridine-3'-phosphate
  modified_base 5: mod_base = OTHER; note = 2'-O-methyluridine-3'-phosphate
  modified_base 6: mod_base = OTHER; note = 2'-O-methylguanosine-3'-phosphate
  modified_base 7: mod_base = OTHER; note = 2'-fluorocytidine-3'-phosphate
  modified_base 8: mod_base = OTHER; note = 2'-fluorouridine-3'-phosphate
  modified_base 9: mod_base = OTHER; note = 2'-fluorouridine-3'-phosphate
  modified_base 10: mod_base = OTHER; note = 2'-O-methyluridine-3'-phosphate
  modified_base 11: mod_base = OTHER; note = 2'-O-methyluridine-3'-phosphate
  modified_base 12: mod_base = OTHER; note = 2'-O-methylguanosine-3'-phosphate
  modified_base 13: mod_base = OTHER; note = 2'-O-methyluridine-3'-phosphate
  modified_base 14: mod_base = OTHER; note = 2'-O-methyladenosine-3'-phosphate
  modified_base 15: mod_base = OTHER; note = 2'-O-methyladenosine-3'-phosphate
  modified_base 16: mod_base = OTHER; note = 2'-O-methylcytidine-3'-phosphate
  modified_base 17: mod_base = OTHER; note = 2'-O-methyluridine-3'-phosphorothioate
  modified_base 18: mod_base = OTHER; note = 2'-O-methyluridine-3'-phosphorothioate
  modified_base 19: mod_base = OTHER; note = 2'-O-methyladenosine
gttttgcttttgtaactta

SEQ ID NO: 2145 - RNA, 21 nt, synthetic construct
  source 1..21: mol_type = other RNA
  modified_base 1: mod_base = OTHER; note = 2'-O-methyluridine-3'-phosphorothioate
  modified_base 2: mod_base = OTHER; note = 2'-fluoroadenosine-3'-phosphorothioate
  modified_base 3: mod_base = OTHER; note = 2'-O-methyladenosine-3'-phosphate
  modified_base 4: mod_base = OTHER; note = 2'-fluoroguanosine-3'-phosphate
  modified_base 5: mod_base = OTHER; note = 2'-O-methyluridine-3'-phosphate
  modified_base 6: mod_base = OTHER; note = 2'-fluorouridine-3'-phosphate
  modified_base 7: mod_base = OTHER; note = 2'-O-methyladenosine-3'-phosphate
  modified_base 8: mod_base = OTHER; note = 2'-fluorocytidine-3'-phosphate
  modified_base 9: mod_base = OTHER; note = 2'-O-methyladenosine-3'-phosphate
  modified_base 10: mod_base = OTHER; note = 2'-fluoroadenosine-3'-phosphate
  modified_base 11: mod_base = OTHER; note = 2'-O-methyladenosine-3'-phosphate
  modified_base 12: mod_base = OTHER; note = 2'-fluoroadenosine-3'-phosphate
  modified_base 13: mod_base = OTHER; note = 2'-O-methylguanosine-3'-phosphate
  modified_base 14: mod_base = OTHER; note = 2'-fluorocytidine-3'-phosphate
  modified_base 15: mod_base = OTHER; note = 2'-O-methyladenosine-3'-phosphate
  modified_base 16: mod_base = OTHER; note = 2'-fluoroadenosine-3'-phosphate
  modified_base 17: mod_base = OTHER; note = 2'-O-methyladenosine-3'-phosphate
  modified_base 18: mod_base = OTHER; note = 2'-fluoroadenosine-3'-phosphate
  modified_base 19: mod_base = OTHER; note = 2'-O-methylcytidine-3'-phosphorothioate
  modified_base 20: mod_base = OTHER; note = 2'-fluoroadenosine-3'-phosphorothioate
  modified_base 21: mod_base = OTHER; note = 2'-O-methylguanosine
taagttacaaaagcaaaacag

SEQ ID NO: 2146 - RNA, 19 nt, synthetic construct
  source 1..19: mol_type = other RNA
  modified_base 1: mod_base = OTHER; note = 2'-O-methylguanosine-3'-phosphorothioate
  modified_base 2: mod_base = OTHER; note = 2'-O-methyluridine-3'-phosphorothioate
  modified_base 3: mod_base = OTHER; note = 2'-O-methyluridine-3'-phosphate
  modified_base 4: mod_base = OTHER; note = 2'-O-methyluridine-3'-phosphate
  modified_base 5: mod_base = OTHER; note = 2'-O-methyluridine-3'-phosphate
  modified_base 6: mod_base = OTHER; note = 2'-O-methylguanosine-3'-phosphate
  modified_base 7: mod_base = OTHER; note = 2'-fluorocytidine-3'-phosphate
  modified_base 8: mod_base = OTHER; note = 2'-fluorouridine-3'-phosphate
  modified_base 9: mod_base = OTHER; note = 2'-fluorouridine-3'-phosphate
  modified_base 10: mod_base = OTHER; note = 2'-O-methyluridine-3'-phosphate
  modified_base 11: mod_base = OTHER; note = 2'-O-methyluridine-3'-phosphate
  modified_base 12: mod_base = OTHER; note = 2'-O-methylguanosine-3'-phosphate
  modified_base 13: mod_base = OTHER; note = 2'-O-methyluridine-3'-phosphate
  modified_base 14: mod_base = OTHER; note = 2'-O-methyladenosine-3'-phosphate
  modified_base 15: mod_base = OTHER; note = 2'-O-methyladenosine-3'-phosphate
  modified_base 16: mod_base = OTHER; note = 2'-O-methylcytidine-3'-phosphate
  modified_base 17: mod_base = OTHER; note = 2'-O-methyluridine-3'-phosphorothioate
  modified_base 18: mod_base = OTHER; note = 2'-O-methyluridine-3'-phosphorothioate
  modified_base 19: mod_base = OTHER; note = 2'-O-methyladenosine
gttttgcttttgtaactta

SEQ ID NO: 2147 - RNA, 21 nt, synthetic construct
  source 1..21: mol_type = other RNA
  modified_base 1: mod_base = OTHER; note = 2'-O-methyluridine-3'-phosphorothioate
  modified_base 2: mod_base = OTHER; note = 2'-fluoroadenosine-3'-phosphorothioate
  modified_base 3: mod_base = OTHER; note = 2'-O-methyladenosine-3'-phosphate
  modified_base 4: mod_base = OTHER; note = 2'-fluoroguanosine-3'-phosphate
  modified_base 5: mod_base = OTHER; note = 2'-O-methyluridine-3'-phosphate
  modified_base 6: mod_base = OTHER; note = 2'-fluorouridine-3'-phosphate
  modified_base 7: mod_base = OTHER; note = 2'-O-methyladenosine-3'-phosphate
  modified_base 8: mod_base = OTHER; note = 2'-fluorocytidine-3'-phosphate
  modified_base 9: mod_base = OTHER; note = 2'-O-methyladenosine-3'-phosphate
  modified_base 10: mod_base = OTHER; note = 2'-fluoroadenosine-3'-phosphate
  modified_base 11: mod_base = OTHER; note = 2'-O-methyladenosine-3'-phosphate
  modified_base 12: mod_base = OTHER; note = 2'-fluoroadenosine-3'-phosphate
  modified_base 13: mod_base = OTHER; note = 2'-O-methylguanosine-3'-phosphate
  modified_base 14: mod_base = OTHER; note = 2'-fluorocytidine-3'-phosphate
  modified_base 15: mod_base = OTHER; note = 2'-O-methyladenosine-3'-phosphate
  modified_base 16: mod_base = OTHER; note = 2'-fluoroadenosine-3'-phosphate
  modified_base 17: mod_base = OTHER; note = 2'-O-methyladenosine-3'-phosphate
  modified_base 18: mod_base = OTHER; note = 2'-fluoroadenosine-3'-phosphate
  modified_base 19: mod_base = OTHER; note = 2'-O-methylcytidine-3'-phosphorothioate
  modified_base 20: mod_base = OTHER; note = 2'-fluoroadenosine-3'-phosphorothioate
  modified_base 21: mod_base = OTHER; note = 2'-O-methylguanosine
taagttacaaaagcaaaacag

SEQ ID NO: 2148 - RNA, 19 nt, synthetic construct
  source 1..19: mol_type = other RNA
  modified_base 1: mod_base = OTHER; note = 2'-O-methylguanosine-3'-phosphorothioate
  modified_base 2: mod_base = OTHER; note = 2'-O-methyluridine-3'-phosphorothioate
  modified_base 3: mod_base = OTHER; note = 2'-O-methyluridine-3'-phosphate
  modified_base 4: mod_base = OTHER; note = 2'-O-methyluridine-3'-phosphate
  modified_base 5: mod_base = OTHER; note = 2'-O-methyluridine-3'-phosphate
  modified_base 6: mod_base = OTHER; note = 2'-O-methylguanosine-3'-phosphate
  modified_base 7: mod_base = OTHER; note = 2'-fluorocytidine-3'-phosphate
  modified_base 8: mod_base = OTHER; note = 2'-fluorouridine-3'-phosphate
  modified_base 9: mod_base = OTHER; note = 2'-fluorouridine-3'-phosphate
  modified_base 10: mod_base = OTHER; note = 2'-O-methyluridine-3'-phosphate
  modified_base 11: mod_base = OTHER; note = 2'-O-methyluridine-3'-phosphate
  modified_base 12: mod_base = OTHER; note = 2'-O-methylguanosine-3'-phosphate
  modified_base 13: mod_base = OTHER; note = 2'-O-methyluridine-3'-phosphate
  modified_base 14: mod_base = OTHER; note = 2'-O-methyladenosine-3'-phosphate
  modified_base 15: mod_base = OTHER; note = 2'-O-methyladenosine-3'-phosphate
  modified_base 16: mod_base = OTHER; note = 2'-O-methylcytidine-3'-phosphate
  modified_base 17: mod_base = OTHER; note = 2'-O-methyluridine-3'-phosphate
  modified_base 18: mod_base = OTHER; note = 2'-O-methyluridine-3'-phosphorothioate
  modified_base 19: mod_base = OTHER; note = 2'-O-methyladenosine
gttttgcttttgtaactta

SEQ ID NO: 2149 - RNA, 21 nt, synthetic construct
  source 1..21: mol_type = other RNA
  modified_base 1: mod_base = OTHER; note = 2'-O-methyluridine-3'-phosphorothioate
  modified_base 2: mod_base = OTHER; note = 2'-fluoroadenosine-3'-phosphorothioate
  modified_base 3: mod_base = OTHER; note = 2'-O-methyladenosine-3'-phosphate
  modified_base 4: mod_base = OTHER; note = 2'-fluoroguanosine-3'-phosphate
  modified_base 5: mod_base = OTHER; note = 2'-O-methyluridine-3'-phosphate
  modified_base 6: mod_base = OTHER; note = 2'-fluorouridine-3'-phosphate
  modified_base 7: mod_base = OTHER; note = 2'-O-methyladenosine-3'-phosphate
  modified_base 8: mod_base = OTHER; note = 2'-fluorocytidine-3'-phosphate
  modified_base 9: mod_base = OTHER; note = 2'-O-methyladenosine-3'-phosphate
  modified_base 10: mod_base = OTHER; note = 2'-fluoroadenosine-3'-phosphate
  modified_base 11: mod_base = OTHER; note = 2'-O-methyladenosine-3'-phosphate
  modified_base 12: mod_base = OTHER; note = 2'-fluoroadenosine-3'-phosphate
  modified_base 13: mod_base = OTHER; note = 2'-O-methylguanosine-3'-phosphate
  modified_base 14: mod_base = OTHER; note = 2'-fluorocytidine-3'-phosphate
  modified_base 15: mod_base = OTHER; note = 2'-O-methyladenosine-3'-phosphate
  modified_base 16: mod_base = OTHER; note = 2'-fluoroadenosine-3'-phosphate
  modified_base 17: mod_base = OTHER; note = 2'-O-methyladenosine-3'-phosphate
  modified_base 18: mod_base = OTHER; note = 2'-fluoroadenosine-3'-phosphate
  modified_base 19: mod_base = OTHER; note = 2'-O-methylcytidine-3'-phosphorothioate
  modified_base 20: mod_base = OTHER; note = 2'-fluoroadenosine-3'-phosphorothioate
  modified_base 21: mod_base = OTHER; note = 2'-O-methylguanosine
taagttacaaaagcaaaacag

SEQ ID NO: 2150 - RNA, 19 nt, synthetic construct
  source 1..19: mol_type = other RNA
  modified_base 1: mod_base = OTHER; note = 2'-O-methylguanosine-3'-phosphorothioate
  modified_base 2: mod_base = OTHER; note = 2'-O-methyluridine-3'-phosphorothioate
  modified_base 3: mod_base = OTHER; note = 2'-O-methyluridine-3'-phosphate
  modified_base 4: mod_base = OTHER; note = 2'-O-methyluridine-3'-phosphate
  modified_base 5: mod_base = OTHER; note = 2'-O-methyluridine-3'-phosphate
  modified_base 6: mod_base = OTHER; note = 2'-O-methylguanosine-3'-phosphate
  modified_base 7: mod_base = OTHER; note = 2'-fluorocytidine-3'-phosphate
  modified_base 8: mod_base = OTHER; note = 2'-fluorouridine-3'-phosphate
  modified_base 9: mod_base = OTHER; note = 2'-fluorouridine-3'-phosphate
  modified_base 10: mod_base = OTHER; note = 2'-O-methyluridine-3'-phosphate
  modified_base 11: mod_base = OTHER; note = 2'-O-methyluridine-3'-phosphate
  modified_base 12: mod_base = OTHER; note = 2'-O-methylguanosine-3'-phosphate
  modified_base 13: mod_base = OTHER; note = 2'-O-methyluridine-3'-phosphate
  modified_base 14: mod_base = OTHER; note = 2'-O-methyladenosine-3'-phosphate
  modified_base 15: mod_base = OTHER; note = 2'-O-methyladenosine-3'-phosphate
  modified_base 16: mod_base = OTHER; note = 2'-O-methylcytidine-3'-phosphate
  modified_base 17: mod_base = OTHER; note = 2'-O-methyluridine-3'-phosphate
  modified_base 18: mod_base = OTHER; note = 2'-O-methyluridine-3'-phosphate
  modified_base 19: mod_base = OTHER; note = 2'-O-methyladenosine
gttttgcttttgtaactta

SEQ ID NO: 2151 - RNA, 21 nt, synthetic construct
  source 1..21: mol_type = other RNA
  modified_base 1: mod_base = OTHER; note = 2'-O-methyluridine-3'-phosphorothioate
  modified_base 2: mod_base = OTHER; note = 2'-fluoroadenosine-3'-phosphorothioate
  modified_base 3: mod_base = OTHER; note = 2'-O-methyladenosine-3'-phosphate
  modified_base 4: mod_base = OTHER; note = 2'-fluoroguanosine-3'-phosphate
  modified_base 5: mod_base = OTHER; note = 2'-O-methyluridine-3'-phosphate
  modified_base 6: mod_base = OTHER; note = 2'-fluorouridine-3'-phosphate
  modified_base 7: mod_base = OTHER; note = 2'-O-methyladenosine-3'-phosphate
  modified_base 8: mod_base = OTHER; note = 2'-fluorocytidine-3'-phosphate
  modified_base 9: mod_base = OTHER; note = 2'-O-methyladenosine-3'-phosphate
  modified_base 10: mod_base = OTHER; note = 2'-fluoroadenosine-3'-phosphate
  modified_base 11: mod_base = OTHER; note = 2'-O-methyladenosine-3'-phosphate
  modified_base 12: mod_base = OTHER; note = 2'-fluoroadenosine-3'-phosphate
  modified_base 13: mod_base = OTHER; note = 2'-O-methylguanosine-3'-phosphate
  modified_base 14: mod_base = OTHER; note = 2'-fluorocytidine-3'-phosphate
  modified_base 15: mod_base = OTHER; note = 2'-O-methyladenosine-3'-phosphate
  modified_base 16: mod_base = OTHER; note = 2'-fluoroadenosine-3'-phosphate
  modified_base 17: mod_base = OTHER; note = 2'-O-methyladenosine-3'-phosphate
  modified_base 18: mod_base = OTHER; note = 2'-fluoroadenosine-3'-phosphate
  modified_base 19: mod_base = OTHER; note = 2'-O-methylcytidine-3'-phosphorothioate
  modified_base 20: mod_base = OTHER; note = 2'-fluoroadenosine-3'-phosphorothioate
  modified_base 21: mod_base = OTHER; note = 2'-O-methylguanosine
taagttacaaaagcaaaacag

SEQ ID NO: 2152 - RNA, 19 nt, synthetic construct
  source 1..19: mol_type = other RNA
  modified_base 1: mod_base = OTHER; note = 2'-O-methyluridine-3'-phosphorothioate
  modified_base 2: mod_base = OTHER; note = 2'-O-methyluridine-3'-phosphorothioate
  modified_base 3: mod_base = OTHER; note = 2'-O-methyluridine-3'-phosphate
  modified_base 4: mod_base = OTHER; note = 2'-O-methyluridine-3'-phosphate
  modified_base 5: mod_base = OTHER; note = 2'-O-methylguanosine-3'-phosphate
  modified_base 6: mod_base = OTHER; note = 2'-O-methylcytidine-3'-phosphate
  modified_base 7: mod_base = OTHER; note = 2'-fluorouridine-3'-phosphate
  modified_base 8: mod_base = OTHER; note = 2'-fluorouridine-3'-phosphate
  modified_base 9: mod_base = OTHER; note = 2'-fluorouridine-3'-phosphate
  modified_base 10: mod_base = OTHER; note = 2'-O-methyluridine-3'-phosphate
  modified_base 11: mod_base = OTHER; note = 2'-O-methylguanosine-3'-phosphate
  modified_base 12: mod_base = OTHER; note = 2'-O-methyluridine-3'-phosphate
  modified_base 13: mod_base = OTHER; note = 2'-O-methyladenosine-3'-phosphate
  modified_base 14: mod_base = OTHER; note = 2'-O-methyladenosine-3'-phosphate
  modified_base 15: mod_base = OTHER; note = 2'-O-methylcytidine-3'-phosphate
  modified_base 16: mod_base = OTHER; note = 2'-O-methyluridine-3'-phosphate
  modified_base 17: mod_base = OTHER; note = 2'-O-methyluridine-3'-phosphorothioate
  modified_base 18: mod_base = OTHER; note = 2'-O-methylguanosine-3'-phosphorothioate
  modified_base 19: mod_base = OTHER; note = 2'-O-methyladenosine
ttttgcttttgtaacttga

SEQ ID NO: 2153 - RNA, 21 nt, synthetic construct
  source 1..21: mol_type = other RNA
  modified_base 1: mod_base = OTHER; note = 2'-O-methyluridine-3'-phosphorothioate
  modified_base 2: mod_base = OTHER; note = 2'-fluorocytidine-3'-phosphorothioate
  modified_base 3: mod_base = OTHER; note = 2'-O-methyladenosine-3'-phosphate
  modified_base 4: mod_base = OTHER; note = 2'-fluoroadenosine-3'-phosphate
  modified_base 5: mod_base = OTHER; note = 2'-O-methylguanosine-3'-phosphate
  modified_base 6: mod_base = OTHER; note = 2'-fluorouridine-3'-phosphate
  modified_base 7: mod_base = OTHER; note = 2'-O-methyluridine-3'-phosphate
  modified_base 8: mod_base = OTHER; note = 2'-fluoroadenosine-3'-phosphate
  modified_base 9: mod_base = OTHER; note = 2'-O-methylcytidine-3'-phosphate
  modified_base 10: mod_base = OTHER; note = 2'-fluoroadenosine-3'-phosphate
  modified_base 11: mod_base = OTHER; note = 2'-O-methyladenosine-3'-phosphate
  modified_base 12: mod_base = OTHER; note = 2'-fluoroadenosine-3'-phosphate
  modified_base 13: mod_base = OTHER; note = 2'-O-methyladenosine-3'-phosphate
  modified_base 14: mod_base = OTHER; note = 2'-fluoroguanosine-3'-phosphate
  modified_base 15: mod_base = OTHER; note = 2'-O-methylcytidine-3'-phosphate
  modified_base 16: mod_base = OTHER; note = 2'-fluoroadenosine-3'-phosphate
  modified_base 17: mod_base = OTHER; note = 2'-O-methyladenosine-3'-phosphate
  modified_base 18: mod_base = OTHER; note = 2'-fluoroadenosine-3'-phosphate
  modified_base 19: mod_base = OTHER; note = 2'-O-methyladenosine-3'-phosphorothioate
  modified_base 20: mod_base = OTHER; note = 2'-fluorocytidine-3'-phosphorothioate
  modified_base 21: mod_base = OTHER; note = 2'-O-methyladenosine
tcaagttacaaaagcaaaaca

SEQ ID NO: 2154 - RNA, 19 nt, synthetic construct
  source 1..19: mol_type = other RNA
  modified_base 1: mod_base = OTHER; note = 2'-O-methyluridine-3'-phosphorothioate
  modified_base 2: mod_base = OTHER; note = 2'-O-methyluridine-3'-phosphorothioate
  modified_base 3: mod_base = OTHER; note = 2'-O-methyluridine-3'-phosphate
  modified_base 4: mod_base = OTHER; note = 2'-O-methyluridine-3'-phosphate
  modified_base 5: mod_base = OTHER; note = 2'-O-methylguanosine-3'-phosphate
  modified_base 6: mod_base = OTHER; note = 2'-O-methylcytidine-3'-phosphate
  modified_base 7: mod_base = OTHER; note = 2'-fluorouridine-3'-phosphate
  modified_base 8: mod_base = OTHER; note = 2'-fluorouridine-3'-phosphate
  modified_base 9: mod_base = OTHER; note = 2'-fluorouridine-3'-phosphate
  modified_base 10: mod_base = OTHER; note = 2'-O-methyluridine-3'-phosphate
  modified_base 11: mod_base = OTHER; note = 2'-O-methylguanosine-3'-phosphate
  modified_base 12: mod_base = OTHER; note = 2'-O-methyluridine-3'-phosphate
  modified_base 13: mod_base = OTHER; note = 2'-O-methyladenosine-3'-phosphate
  modified_base 14: mod_base = OTHER; note = 2'-O-methyladenosine-3'-phosphate
  modified_base 15: mod_base = OTHER; note = 2'-O-methylcytidine-3'-phosphate
  modified_base 16: mod_base = OTHER; note = 2'-O-methyluridine-3'-phosphate
  modified_base 17: mod_base = OTHER; note = 2'-O-methyluridine-3'-phosphorothioate
  modified_base 18: mod_base = OTHER; note = 2'-O-methylguanosine-3'-phosphorothioate
  modified_base 19: mod_base = OTHER; note = 2'-O-methyladenosine
ttttgcttttgtaacttga

SEQ ID NO: 2155 - RNA, 21 nt, synthetic construct
  source 1..21: mol_type = other RNA
  modified_base 1: mod_base = OTHER; note = 2'-O-methyluridine-3'-phosphorothioate
  modified_base 2: mod_base = OTHER; note = 2'-fluorocytidine-3'-phosphorothioate
  modified_base 3: mod_base = OTHER; note = 2'-O-methyladenosine-3'-phosphate
  modified_base 4: mod_base = OTHER; note = 2'-fluoroadenosine-3'-phosphate
  modified_base 5: mod_base = OTHER; note = 2'-O-methylguanosine-3'-phosphate
  modified_base 6: mod_base = OTHER; note = 2'-fluorouridine-3'-phosphate
  modified_base 7: mod_base = OTHER; note = 2'-O-methyluridine-3'-phosphate
  modified_base 8: mod_base = OTHER; note = 2'-fluoroadenosine-3'-phosphate
  modified_base 9: mod_base = OTHER; note = 2'-O-methylcytidine-3'-phosphate
  modified_base 10: mod_base = OTHER; note = 2'-fluoroadenosine-3'-phosphate
  modified_base 11: mod_base = OTHER; note = 2'-O-methyladenosine-3'-phosphate
  modified_base 12: mod_base = OTHER; note = 2'-fluoroadenosine-3'-phosphate
  modified_base 13: mod_base = OTHER; note = 2'-O-methyladenosine-3'-phosphate
  modified_base 14: mod_base = OTHER; note = 2'-fluoroguanosine-3'-phosphate
  modified_base 15: mod_base = OTHER; note = 2'-O-methylcytidine-3'-phosphate
  modified_base 16: mod_base = OTHER; note = 2'-fluoroadenosine-3'-phosphate
  modified_base 17: mod_base = OTHER; note = 2'-O-methyladenosine-3'-phosphate
  modified_base 18: mod_base = OTHER; note = 2'-fluoroadenosine-3'-phosphate
  modified_base 19: mod_base = OTHER; note = 2'-O-methyladenosine-3'-phosphorothioate
  modified_base 20: mod_base = OTHER; note = 2'-fluorocytidine-3'-phosphorothioate
  modified_base 21: mod_base = OTHER; note = 2'-O-methyladenosine
tcaagttacaaaagcaaaaca

SEQ ID NO: 2156 - RNA, 19 nt, synthetic construct
  source 1..19: mol_type = other RNA
  modified_base 1: mod_base = OTHER; note = 2'-O-methyluridine-3'-phosphorothioate
  modified_base 2: mod_base = OTHER; note = 2'-O-methylguanosine-3'-phosphorothioate
  modified_base 3: mod_base = OTHER; note = 2'-O-methylcytidine-3'-phosphate
  modified_base 4: mod_base = OTHER; note = 2'-O-methyluridine-3'-phosphate
  modified_base 5: mod_base = OTHER; note = 2'-O-methyluridine-3'-phosphate
  modified_base 6: mod_base = OTHER; note = 2'-O-methyluridine-3'-phosphate
  modified_base 7: mod_base = OTHER; note = 2'-fluorouridine-3'-phosphate
  modified_base 8: mod_base = OTHER; note = 2'-fluoroguanosine-3'-phosphate
  modified_base 9: mod_base = OTHER; note = 2'-fluorouridine-3'-phosphate
  modified_base 10: mod_base = OTHER; note = 2'-O-methyladenosine-3'-phosphate
  modified_base 11: mod_base = OTHER; note = 2'-O-methyladenosine-3'-phosphate
  modified_base 12: mod_base = OTHER; note = 2'-O-methylcytidine-3'-phosphate
  modified_base 13: mod_base = OTHER; note = 2'-O-methyluridine-3'-phosphate
  modified_base 14: mod_base = OTHER; note = 2'-O-methyluridine-3'-phosphate
  modified_base 15: mod_base = OTHER; note = 2'-O-methylguanosine-3'-phosphate
  modified_base 16: mod_base = OTHER; note = 2'-O-methyladenosine-3'-phosphate
  modified_base 17: mod_base = OTHER; note = 2'-O-methyladenosine-3'-phosphorothioate
  modified_base 18: mod_base = OTHER; note = 2'-O-methylguanosine-3'-phosphorothioate
  modified_base 19: mod_base = OTHER; note = 2'-O-methyladenosine
tgcttttgtaacttgaaga

SEQ ID NO: 2157 - RNA, 21 nt, synthetic construct
  source 1..21: mol_type = other RNA
  modified_base 1: mod_base = OTHER; note = 2'-O-methyluridine-3'-phosphorothioate
  modified_base 2: mod_base = OTHER; note = 2'-fluorocytidine-3'-phosphorothioate
  modified_base 3: mod_base = OTHER; note = 2'-O-methyluridine-3'-phosphate
  modified_base 4: mod_base = OTHER; note = 2'-fluorouridine-3'-phosphate
  modified_base 5: mod_base = OTHER; note = 2'-O-methylcytidine-3'-phosphate
  modified_base 6: mod_base = OTHER; note = 2'-fluoroadenosine-3'-phosphate
  modified_base 7: mod_base = OTHER; note = 2'-O-methyladenosine-3'-phosphate
  modified_base 8: mod_base = OTHER; note = 2'-fluoroguanosine-3'-phosphate
  modified_base 9: mod_base = OTHER; note = 2'-O-methyluridine-3'-phosphate
  modified_base 10: mod_base = OTHER; note = 2'-fluorouridine-3'-phosphate
  modified_base 11: mod_base = OTHER; note = 2'-O-methyladenosine-3'-phosphate
  modified_base 12: mod_base = OTHER; note = 2'-fluorocytidine-3'-phosphate
  modified_base 13: mod_base = OTHER; note = 2'-O-methyladenosine-3'-phosphate
  modified_base 14: mod_base = OTHER; note = 2'-fluoroadenosine-3'-phosphate
  modified_base 15: mod_base = OTHER; note = 2'-O-methyladenosine-3'-phosphate
  modified_base 16: mod_base = OTHER; note = 2'-fluoroadenosine-3'-phosphate
  modified_base 17: mod_base = OTHER; note = 2'-O-methylguanosine-3'-phosphate
  modified_base 18: mod_base = OTHER; note = 2'-fluorocytidine-3'-phosphate
  modified_base 19: mod_base = OTHER; note = 2'-O-methyladenosine-3'-phosphorothioate
  modified_base 20: mod_base = OTHER; note = 2'-fluoroadenosine-3'-phosphorothioate
  modified_base 21: mod_base = OTHER; note = 2'-O-methyladenosine
tcttcaagttacaaaagcaaa

SEQ ID NO: 2158 - RNA, 19 nt, synthetic construct
  source 1..19: mol_type = other RNA
  modified_base 1: mod_base = OTHER; note = 2'-O-methylguanosine-3'-phosphorothioate
  modified_base 2: mod_base = OTHER; note = 2'-O-methylcytidine-3'-phosphorothioate
  modified_base 3: mod_base = OTHER; note = 2'-O-methyluridine-3'-phosphate
  modified_base 4: mod_base = OTHER; note = 2'-O-methyluridine-3'-phosphate
  modified_base 5: mod_base = OTHER; note = 2'-O-methyluridine-3'-phosphate
  modified_base 6: mod_base = OTHER; note = 2'-O-methyluridine-3'-phosphate
  modified_base 7: mod_base = OTHER; note = 2'-fluoroguanosine-3'-phosphate
  modified_base 8: mod_base = OTHER; note = 2'-fluorouridine-3'-phosphate
  modified_base 9: mod_base = OTHER; note = 2'-fluoroadenosine-3'-phosphate
  modified_base 10: mod_base = OTHER; note = 2'-O-methyladenosine-3'-phosphate
  modified_base 11: mod_base = OTHER; note = 2'-O-methylcytidine-3'-phosphate
  modified_base 12: mod_base = OTHER; note = 2'-O-methyluridine-3'-phosphate
  modified_base 13: mod_base = OTHER; note = 2'-O-methyluridine-3'-phosphate
  modified_base 14: mod_base = OTHER; note = 2'-O-methylguanosine-3'-phosphate
  modified_base 15: mod_base = OTHER; note = 2'-O-methyladenosine-3'-phosphate
  modified_base 16: mod_base = OTHER; note = 2'-O-methyladenosine-3'-phosphate
  modified_base 17: mod_base = OTHER; note = 2'-O-methylguanosine-3'-phosphorothioate
  modified_base 18: mod_base = OTHER; note = 2'-O-methyladenosine-3'-phosphorothioate
  modified_base 19: mod_base = OTHER; note = 2'-O-methyluridine
gcttttgtaacttgaagat

SEQ ID NO: 2159 - RNA, 21 nt, synthetic construct
  source 1..21: mol_type = other RNA
  modified_base 1: mod_base = OTHER; note = 2'-O-methyladenosine-3'-phosphorothioate
  modified_base 2: mod_base = OTHER; note = 2'-fluorouridine-3'-phosphorothioate
  modified_base 3: mod_base = OTHER; note = 2'-O-methylcytidine-3'-phosphate
  modified_base 4: mod_base = OTHER; note = 2'-fluorouridine-3'-phosphate
  modified_base 5: mod_base = OTHER; note = 2'-O-methyluridine-3'-phosphate
  modified_base 6: mod_base = OTHER; note = 2'-fluorocytidine-3'-phosphate
  modified_base 7: mod_base = OTHER; note = 2'-O-methyladenosine-3'-phosphate
  modified_base 8: mod_base = OTHER; note = 2'-fluoroadenosine-3'-phosphate
  modified_base 9: mod_base = OTHER; note = 2'-O-methylguanosine-3'-phosphate
  modified_base 10: mod_base = OTHER; note = 2'-fluorouridine-3'-phosphate
  modified_base 11: mod_base = OTHER; note = 2'-O-methyluridine-3'-phosphate
  modified_base 12: mod_base = OTHER; note = 2'-fluoroadenosine-3'-phosphate
  modified_base 13: mod_base = OTHER; note = 2'-O-methylcytidine-3'-phosphate
  modified_base 14: mod_base = OTHER; note = 2'-fluoroadenosine-3'-phosphate
  modified_base 15: mod_base = OTHER; note = 2'-O-methyladenosine-3'-phosphate
  modified_base 16: mod_base = OTHER; note = 2'-fluoroadenosine-3'-phosphate
  modified_base 17: mod_base = OTHER; note = 2'-O-methyladenosine-3'-phosphate
  modified_base 18: mod_base = OTHER; note = 2'-fluoroguanosine-3'-phosphate
  modified_base 19: mod_base = OTHER; note = 2'-O-methylcytidine-3'-phosphorothioate
  modified_base 20: mod_base = OTHER; note = 2'-fluoroadenosine-3'-phosphorothioate
  modified_base 21: mod_base = OTHER; note = 2'-O-methyladenosine
atcttcaagttacaaaagcaa

SEQ ID NO: 2160 - RNA, 19 nt, synthetic construct
  source 1..19: mol_type = other RNA
  modified_base 1: mod_base = OTHER; note = 2'-O-methylcytidine-3'-phosphorothioate
  modified_base 2: mod_base = OTHER; note = 2'-O-methyluridine-3'-phosphorothioate
  modified_base 3: mod_base = OTHER; note = 2'-O-methyluridine-3'-phosphate
  modified_base 4: mod_base = OTHER; note = 2'-O-methyluridine-3'-phosphate
  modified_base 5: mod_base = OTHER; note = 2'-O-methyluridine-3'-phosphate
  modified_base 6: mod_base = OTHER; note = 2'-O-methylguanosine-3'-phosphate
  modified_base 7: mod_base = OTHER; note = 2'-fluorouridine-3'-phosphate
  modified_base 8: mod_base = OTHER; note = 2'-fluoroadenosine-3'-phosphate
  modified_base 9: mod_base = OTHER; note = 2'-fluoroadenosine-3'-phosphate
  modified_base 10: mod_base = OTHER; note = 2'-O-methylcytidine-3'-phosphate
  modified_base 11: mod_base = OTHER; note = 2'-O-methyluridine-3'-phosphate
  modified_base 12: mod_base = OTHER; note = 2'-O-methyluridine-3'-phosphate
  modified_base 13: mod_base = OTHER; note = 2'-O-methylguanosine-3'-phosphate
  modified_base 14: mod_base = OTHER; note = 2'-O-methyladenosine-3'-phosphate
  modified_base 15: mod_base = OTHER; note = 2'-O-methyladenosine-3'-phosphate
  modified_base 16: mod_base = OTHER; note = 2'-O-methylguanosine-3'-phosphate
  modified_base 17: mod_base = OTHER; note = 2'-O-methyladenosine-3'-phosphorothioate
  modified_base 18: mod_base = OTHER; note = 2'-O-methyluridine-3'-phosphorothioate
  modified_base 19: mod_base = OTHER; note = 2'-O-methyladenosine
cttttgtaacttgaagata

SEQ ID NO: 2161 - RNA, 21 nt, synthetic construct
  source 1..21: mol_type = other RNA
  modified_base 1: mod_base = OTHER; note = 2'-O-methyluridine-3'-phosphorothioate
  modified_base 2: mod_base = OTHER; note = 2'-fluoroadenosine-3'-phosphorothioate
  modified_base 3: mod_base = OTHER; note = 2'-O-methyluridine-3'-phosphate
  modified_base 4: mod_base = OTHER; note = 2'-fluorocytidine-3'-phosphate
  modified_base 5: mod_base = OTHER; note = 2'-O-methyluridine-3'-phosphate
  modified_base 6: mod_base = OTHER; note = 2'-fluorouridine-3'-phosphate
  modified_base 7: mod_base = OTHER; note = 2'-O-methylcytidine-3'-phosphate
  modified_base 8: mod_base = OTHER; note = 2'-fluoroadenosine-3'-phosphate
  modified_base 9: mod_base = OTHER; note = 2'-O-methyladenosine-3'-phosphate
  modified_base 10: mod_base = OTHER; note = 2'-fluoroguanosine-3'-phosphate
  modified_base 11: mod_base = OTHER; note = 2'-O-methyluridine-3'-phosphate
  modified_base 12: mod_base = OTHER; note = 2'-fluorouridine-3'-phosphate
  modified_base 13: mod_base = OTHER; note = 2'-O-methyladenosine-3'-phosphate
  modified_base 14: mod_base = OTHER; note = 2'-fluorocytidine-3'-phosphate
  modified_base 15: mod_base = OTHER; note = 2'-O-methyladenosine-3'-phosphate
  modified_base 16: mod_base = OTHER; note = 2'-fluoroadenosine-3'-phosphate
  modified_base 17: mod_base = OTHER; note = 2'-O-methyladenosine-3'-phosphate
  modified_base 18: mod_base = OTHER; note = 2'-fluoroadenosine-3'-phosphate
  modified_base 19: mod_base = OTHER; note = 2'-O-methylguanosine-3'-phosphorothioate
  modified_base 20: mod_base = OTHER; note = 2'-fluorocytidine-3'-phosphorothioate
  modified_base 21: mod_base = OTHER; note = 2'-O-methyladenosine
tatcttcaagttacaaaagca

SEQ ID NO: 2162 - RNA, 19 nt, synthetic construct
  source 1..19: mol_type = other RNA
  modified_base 1: mod_base = OTHER; note = 2'-O-methyluridine-3'-phosphorothioate
  modified_base 2: mod_base = OTHER; note = 2'-O-methyluridine-3'-phosphorothioate
  modified_base 3: mod_base = OTHER; note = 2'-O-methyluridine-3'-phosphate
  modified_base 4: mod_base = OTHER; note = 2'-O-methyluridine-3'-phosphate
  modified_base 5: mod_base = OTHER; note = 2'-O-methylguanosine-3'-phosphate
  modified_base 6: mod_base = OTHER; note = 2'-O-methyluridine-3'-phosphate
  modified_base 7: mod_base = OTHER; note = 2'-fluoroadenosine-3'-phosphate
  modified_base 8: mod_base = OTHER; note = 2'-fluoroadenosine-3'-phosphate
  modified_base 9: mod_base = OTHER; note = 2'-fluorocytidine-3'-phosphate
  modified_base 10: mod_base = OTHER; note = 2'-O-methyluridine-3'-phosphate
  modified_base 11: mod_base = OTHER; note = 2'-O-methyluridine-3'-phosphate
  modified_base 12: mod_base = OTHER; note = 2'-O-methylguanosine-3'-phosphate
  modified_base 13: mod_base = OTHER; note = 2'-O-methyladenosine-3'-phosphate
  modified_base 14: mod_base = OTHER; note = 2'-O-methyladenosine-3'-phosphate
  modified_base 15: mod_base = OTHER; note = 2'-O-methylguanosine-3'-phosphate
  modified_base 16: mod_base = OTHER; note = 2'-O-methyladenosine-3'-phosphate
  modified_base 17: mod_base = OTHER; note = 2'-O-methyluridine-3'-phosphorothioate
  modified_base 18: mod_base = OTHER; note = 2'-O-methyladenosine-3'-phosphorothioate
  modified_base 19: mod_base = OTHER; note = 2'-O-methyluridine
ttttgtaacttgaagatat

SEQ ID NO: 2163 - RNA, 21 nt, synthetic construct
  source 1..21: mol_type = other RNA
  modified_base 1: mod_base = OTHER; note = 2'-O-methyladenosine-3'-phosphorothioate
  modified_base 2: mod_base = OTHER; note = 2'-fluorouridine-3'-phosphorothioate
  modified_base 3: mod_base = OTHER; note = 2'-O-methyladenosine-3'-phosphate
  modified_base 4: mod_base = OTHER; note = 2'-fluorouridine-3'-phosphate
  modified_base 5: mod_base = OTHER; note = 2'-O-methylcytidine-3'-phosphate
  modified_base 6: mod_base = OTHER; note = 2'-fluorouridine-3'-phosphate
  modified_base 7: mod_base = OTHER; note = 2'-O-methyluridine-3'-phosphate
  modified_base 8: mod_base = OTHER; note = 2'-fluorocytidine-3'-phosphate
  modified_base 9: mod_base = OTHER; note = 2'-O-methyladenosine-3'-phosphate
  modified_base 10: mod_base = OTHER; note = 2'-fluoroadenosine-3'-phosphate
  modified_base 11: mod_base = OTHER; note = 2'-O-methylguanosine-3'-phosphate
  modified_base 12: mod_base = OTHER; note = 2'-fluorouridine-3'-phosphate
  modified_base 13: mod_base = OTHER; note = 2'-O-methyluridine-3'-phosphate
  modified_base 14: mod_base = OTHER; note = 2'-fluoroadenosine-3'-phosphate
  modified_base 15: mod_base = OTHER; note = 2'-O-methylcytidine-3'-phosphate
  modified_base 16: mod_base = OTHER; note = 2'-fluoroadenosine-3'-phosphate
  modified_base 17: mod_base = OTHER; note = 2'-O-methyladenosine-3'-phosphate
  modified_base 18: mod_base = OTHER; note = 2'-fluoroadenosine-3'-phosphate
  modified_base 19: mod_base = OTHER; note = 2'-O-methyladenosine-3'-phosphorothioate
  modified_base 20: mod_base = OTHER; note = 2'-fluoroguanosine-3'-phosphorothioate
  modified_base 21: mod_base = OTHER; note = 2'-O-methylcytidine
atatcttcaagttacaaaagc

SEQ ID NO: 2164 - RNA, 22 nt, synthetic construct
  source 1..22: mol_type = other RNA
  modified_base 1: mod_base = OTHER; note (5-acetamido-2-(acetoxymethyl)-6-((5-((2S,6R)-2-((bis(4-met hoxyphenyl)(phenyl)methoxy)methyl)-2-((((2-cyanoethoxy)(dii sopropylamino)phosphaneyl)oxy)methyl)-6-(5-methyl-2,4-dioxo -3,4-dihydropyrimidin-1(2H)-yl)morpholino)pentyl)oxy)tetrah ydro-2H-pyran-3,4-diyldiacetate)-phosphate
  modified_base 2: mod_base = OTHER; note (5-acetamido-2-(acetoxymethyl)-6-((5-((2S,6R)-2-((bis(4-met hoxyphenyl)(phenyl)methoxy)methyl)-2-((((2-cyanoethoxy)(dii sopropylamino)phosphaneyl)oxy)methyl)-6-(5-methyl-2,4-dioxo -3,4-dihydropyrimidin-1(2H)-yl)morpholino)pentyl)oxy)tetrah ydro-2H-pyran-3,4-diyldiacetate)-phosphate
  modified_base 3: mod_base = OTHER; note (5-acetamido-2-(acetoxymethyl)-6-((5-((2S,6R)-2-((bis(4-met hoxyphenyl)(phenyl)methoxy)methyl)-2-((((2-cyanoethoxy)(dii sopropylamino)phosphaneyl)oxy)methyl)-6-(5-methyl-2,4-dioxo -3,4-dihydropyrimidin-1(2H)-yl)morpholino)pentyl)oxy)tetrah ydro-2H-pyran-3,4-diyldiacetate)-phosphate
  modified_base 4: mod_base = OTHER; note = 2'-fluorouridine-3'-phosphate
  modified_base 5: mod_base = OTHER; note = 2'-O-methyladenosine-3'-phosphate
  modified_base 6: mod_base = OTHER; note = 2'-fluorouridine-3'-phosphate
  modified_base 7: mod_base = OTHER; note = 2'-O-methylguanosine-3'-phosphate
  modified_base 8: mod_base = OTHER; note = 2'-fluoroguanosine-3'-phosphate
  modified_base 9: mod_base = OTHER; note = 2'-O-methyluridine-3'-phosphate
  modified_base 10: mod_base = OTHER; note = 2'-fluoroguanosine-3'-phosphate
  modified_base 11: mod_base = OTHER; note = 2'-O-methyladenosine-3'-phosphate
  modified_base 12: mod_base = OTHER; note = 2'-fluorocytidine-3'-phosphate
  modified_base 13: mod_base = OTHER; note = 2'-O-methyluridine-3'-phosphate
  modified_base 14: mod_base = OTHER; note = 2'-fluorouridine-3'-phosphate
  modified_base 15: mod_base = OTHER; note = 2'-O-methyluridine-3'-phosphate
  modified_base 16: mod_base = OTHER; note = 2'-fluorouridine-3'-phosphate
  modified_base 17: mod_base = OTHER; note = 2'-O-methyluridine-3'-phosphate
  modified_base 18: mod_base = OTHER; note = 2'-fluoroadenosine-3'-phosphate
  modified_base 19: mod_base = OTHER; note = 2'-O-methyladenosine-3'-phosphate
  modified_base 20: mod_base = OTHER; note = 2'-fluoroadenosine-3'-phosphorothioate
  modified_base 21: mod_base = OTHER; note = 2'-O-methyladenosine-3'-phosphorothioate
  modified_base 22: mod_base = OTHER; note = 2'-fluorouridine
ttttatggtgactttttaaaat

SEQ ID NO: 2165 - RNA, 22 nt, synthetic construct
  source 1..22: mol_type = other RNA
  modified_base 1: mod_base = OTHER; note (5-acetamido-2-(acetoxymethyl)-6-((5-((2S,6R)-2-((bis(4-met hoxyphenyl)(phenyl)methoxy)methyl)-2-((((2-cyanoethoxy)(dii sopropylamino)phosphaneyl)oxy)methyl)-6-(5-methyl-2,4-dioxo -3,4-dihydropyrimidin-1(2H)-yl)morpholino)pentyl)oxy)tetrah ydro-2H-pyran-3,4-diyldiacetate)-phosphate
  modified_base 2: mod_base = OTHER; note (5-acetamido-2-(acetoxymethyl)-6-((5-((2S,6R)-2-((bis(4-met hoxyphenyl)(phenyl)methoxy)methyl)-2-((((2-cyanoethoxy)(dii sopropylamino)phosphaneyl)oxy)methyl)-6-(5-methyl-2,4-dioxo -3,4-dihydropyrimidin-1(2H)-yl)morpholino)pentyl)oxy)tetrah ydro-2H-pyran-3,4-diyldiacetate)-phosphate
  modified_base 3: mod_base = OTHER; note (5-acetamido-2-(acetoxymethyl)-6-((5-((2S,6R)-2-((bis(4-met hoxyphenyl)(phenyl)methoxy)methyl)-2-((((2-cyanoethoxy)(dii sopropylamino)phosphaneyl)oxy)methyl)-6-(5-methyl-2,4-dioxo -3,4-dihydropyrimidin-1(2H)-yl)morpholino)pentyl)oxy)tetrah ydro-2H-pyran-3,4-diyldiacetate)-phosphate
  modified_base 4: mod_base = OTHER; note = 2'-O-methyluridine-3'-phosphate
  modified_base 5: mod_base = OTHER; note = 2'-O-methyladenosine-3'-phosphate
  modified_base 6: mod_base = OTHER; note = 2'-O-methyluridine-3'-phosphate
  modified_base 7: mod_base = OTHER; note = 2'-O-methylguanosine-3'-phosphate
  modified_base 8: mod_base = OTHER; note = 2'-fluoroguanosine-3'-phosphate
  modified_base 9: mod_base = OTHER; note = 2'-O-methyluridine-3'-phosphate
  modified_base 10: mod_base = OTHER; note = 2'-fluoroguanosine-3'-phosphate
  modified_base 11: mod_base = OTHER; note = 2'-fluoroadenosine-3'-phosphate
  modified_base 12: mod_base = OTHER; note = 2'-fluorocytidine-3'-phosphate
  modified_base 13: mod_base = OTHER; note = 2'-O-methyluridine-3'-phosphate
  modified_base 14: mod_base = OTHER; note = 2'-O-methyluridine-3'-phosphate
  modified_base 15: mod_base = OTHER; note = 2'-O-methyluridine-3'-phosphate
  modified_base 16: mod_base = OTHER; note = 2'-O-methyluridine-3'-phosphate
  modified_base 17: mod_base = OTHER; note = 2'-O-methyluridine-3'-phosphate
  modified_base 18: mod_base = OTHER; note = 2'-O-methyladenosine-3'-phosphate
  modified_base 19: mod_base = OTHER; note = 2'-O-methyladenosine-3'-phosphate
  modified_base 20: mod_base = OTHER; note = 2'-O-methyladenosine-3'-phosphate
  modified_base 21: mod_base = OTHER; note = 2'-O-methyladenosine-3'-phosphate
  modified_base 22: mod_base = OTHER; note = 2'-O-methyluridine
ttttatggtgactttttaaaat

SEQ ID NO: 2166 - RNA, 24 nt, synthetic construct
  source 1..24: mol_type = other RNA
  modified_base 1: mod_base = OTHER; note (5-acetamido-2-(acetoxymethyl)-6-((5-((2S,6R)-2-((bis(4-met hoxyphenyl)(phenyl)methoxy)methyl)-2-((((2-cyanoethoxy)(dii sopropylamino)phosphaneyl)oxy)methyl)-6-(5-methyl-2,4-dioxo -3,4-dihydropyrimidin-1(2H)-yl)morpholino)pentyl)oxy)tetrah ydro-2H-pyran-3,4-diyldiacetate)-phosphate
  modified_base 2: mod_base = OTHER; note (5-acetamido-2-(acetoxymethyl)-6-((5-((2S,6R)-2-((bis(4-met hoxyphenyl)(phenyl)methoxy)methyl)-2-((((2-cyanoethoxy)(dii sopropylamino)phosphaneyl)oxy)methyl)-6-(5-methyl-2,4-dioxo -3,4-dihydropyrimidin-1(2H)-yl)morpholino)pentyl)oxy)tetrah ydro-2H-pyran-3,4-diyldiacetate)-phosphate
  modified_base 3: mod_base = OTHER; note (5-acetamido-2-(acetoxymethyl)-6-((5-((2S,6R)-2-((bis(4-met hoxyphenyl)(phenyl)methoxy)methyl)-2-((((2-cyanoethoxy)(dii sopropylamino)phosphaneyl)oxy)methyl)-6-(5-methyl-2,4-dioxo -3,4-dihydropyrimidin-1(2H)-yl)morpholino)pentyl)oxy)tetrah ydro-2H-pyran-3,4-diyldiacetate)-phosphate
  modified_base 4: mod_base = OTHER; note = Uracil locked nucleotide-3'-phosphate
  modified_base 5: mod_base = OTHER; note = Adenine locked nucleotide-3'-phosphate
  modified_base 6: mod_base = OTHER; note = 2'-O-methyluridine-3'-phosphate
  modified_base 7: mod_base = OTHER; note = 2'-O-methylguanosine-3'-phosphate
  modified_base 8: mod_base = OTHER; note = 2'-fluoroguanosine-3'-phosphate
  modified_base 9: mod_base = OTHER; note = 2'-O-methyluridine-3'-phosphate
  modified_base 10: mod_base = OTHER; note = 2'-fluoroguanosine-3'-phosphate
  modified_base 11: mod_base = OTHER; note = 2'-fluoroadenosine-3'-phosphate
  modified_base 12: mod_base = OTHER; note = 2'-fluorocytidine-3'-phosphate
  modified_base 13: mod_base = OTHER; note = 2'-O-methyluridine-3'-phosphate
  modified_base 14: mod_base = OTHER; note = 2'-O-methyluridine-3'-phosphate
  modified_base 15: mod_base = OTHER; note = 2'-O-methyluridine-3'-phosphate
  modified_base 16: mod_base = OTHER; note = 2'-O-methyluridine-3'-phosphate
  modified_base 17: mod_base = OTHER; note = 2'-O-methyluridine-3'-phosphate
  modified_base 18: mod_base = OTHER; note = 2'-O-methyladenosine-3'-phosphate
  modified_base 19: mod_base = OTHER; note = 2'-O-methyladenosine-3'-phosphate
  modified_base 20: mod_base = OTHER; note = 2'-O-methyladenosine-3'-phosphate
  modified_base 21: mod_base = OTHER; note = 2'-O-methyladenosine-3'-phosphate
  modified_base 22: mod_base = OTHER; note = 2'-O-methyluridine-3'-phosphate
  modified_base 23: mod_base = OTHER; note (((2S,6R)-2-((bis(4-methoxyphenyl)(phenyl)methoxy)methyl)-4 -cyclohexyl-6-(5-methyl-2,4-dioxo-3,4-dihydropyrimidin-1(2H )-yl)morpholin-2-yl)methyl (2-cyanoethyl) diisopropylphosphoramidite) phosphate
  modified_base 24: mod_base = OTHER; note ((2S,6R)-2-((bis(4-methoxyphenyl)(phenyl)methoxy)methyl)-4- cyclohexyl-6-(5-methyl-2,4-dioxo-3,4-dihydropyrimidin-1(2H) -yl)morpholin-2-yl)methyl (2-cyanoethyl) diisopropylphosphoramidite
ttttatggtgactttttaaaattt

SEQ ID NO: 2167 - RNA, 22 nt, synthetic construct
  source 1..22: mol_type = other RNA
  modified_base 1: mod_base = OTHER; note (5-acetamido-2-(acetoxymethyl)-6-((5-((2S,6R)-2-((bis(4-met hoxyphenyl)(phenyl)methoxy)methyl)-2-((((2-cyanoethoxy)(dii sopropylamino)phosphaneyl)oxy)methyl)-6-(5-methyl-2,4-dioxo -3,4-dihydropyrimidin-1(2H)-yl)morpholino)pentyl)oxy)tetrah ydro-2H-pyran-3,4-diyldiacetate)-phosphate
  modified_base 2: mod_base = OTHER; note (5-acetamido-2-(acetoxymethyl)-6-((5-((2S,6R)-2-((bis(4-met hoxyphenyl)(phenyl)methoxy)methyl)-2-((((2-cyanoethoxy)(dii sopropylamino)phosphaneyl)oxy)methyl)-6-(5-methyl-2,4-dioxo -3,4-dihydropyrimidin-1(2H)-yl)morpholino)pentyl)oxy)tetrah ydro-2H-pyran-3,4-diyldiacetate)-phosphate
  modified_base 3: mod_base = OTHER; note (5-acetamido-2-(acetoxymethyl)-6-((5-((2S,6R)-2-((bis(4-met hoxyphenyl)(phenyl)methoxy)methyl)-2-((((2-cyanoethoxy)(dii sopropylamino)phosphaneyl)oxy)methyl)-6-(5-methyl-2,4-dioxo -3,4-dihydropyrimidin-1(2H)-yl)morpholino)pentyl)oxy)tetrah ydro-2H-pyran-3,4-diyldiacetate)-phosphate
  modified_base 4: mod_base = OTHER; note = 2'-fluorouridine-3'-phosphate
  modified_base 5: mod_base = OTHER; note = 2'-O-methyluridine-3'-phosphate
  modified_base 6: mod_base = OTHER; note = 2'-fluoroadenosine-3'-phosphate
  modified_base 7: mod_base = OTHER; note = 2'-O-methyluridine-3'-phosphate
  modified_base 8: mod_base = OTHER; note = 2'-fluorouridine-3'-phosphate
  modified_base 9: mod_base = OTHER; note = 2'-O-methyladenosine-3'-phosphate
  modified_base 10: mod_base = OTHER; note = 2'-fluoroadenosine-3'-phosphate
  modified_base 11: mod_base = OTHER; note = 2'-O-methyluridine-3'-phosphate
  modified_base 12: mod_base = OTHER; note = 2'-fluoroadenosine-3'-phosphate
  modified_base 13: mod_base = OTHER; note = 2'-O-methyluridine-3'-phosphate
  modified_base 14: mod_base = OTHER; note = 2'-fluoroguanosine-3'-phosphate
  modified_base 15: mod_base = OTHER; note = 2'-O-methylguanosine-3'-phosphate
  modified_base 16: mod_base = OTHER; note = 2'-fluorouridine-3'-phosphate
  modified_base 17: mod_base = OTHER; note = 2'-O-methylguanosine-3'-phosphate
  modified_base 18: mod_base = OTHER; note = 2'-fluoroadenosine-3'-phosphate
  modified_base 19: mod_base = OTHER; note = 2'-O-methylcytidine-3'-phosphate
  modified_base 20: mod_base = OTHER; note = 2'-fluorouridine-3'-phosphorothioate
  modified_base 21: mod_base = OTHER; note = 2'-O-methyluridine-3'-phosphorothioate
  modified_base 22: mod_base = OTHER; note = 2'-fluorouridine
tttttattaatatggtgacttt

SEQ ID NO: 2168 - RNA, 22 nt, synthetic construct
  source 1..22: mol_type = other RNA
  modified_base 1: mod_base = OTHER; note (5-acetamido-2-(acetoxymethyl)-6-((5-((2S,6R)-2-((bis(4-met hoxyphenyl)(phenyl)methoxy)methyl)-2-((((2-cyanoethoxy)(dii sopropylamino)phosphaneyl)oxy)methyl)-6-(5-methyl-2,4-dioxo -3,4-dihydropyrimidin-1(2H)-yl)morpholino)pentyl)oxy)tetrah ydro-2H-pyran-3,4-diyldiacetate)-phosphate
  modified_base 2: mod_base = OTHER; note (5-acetamido-2-(acetoxymethyl)-6-((5-((2S,6R)-2-((bis(4-met hoxyphenyl)(phenyl)methoxy)methyl)-2-((((2-cyanoethoxy)(dii sopropylamino)phosphaneyl)oxy)methyl)-6-(5-methyl-2,4-dioxo -3,4-dihydropyrimidin-1(2H)-yl)morpholino)pentyl)oxy)tetrah ydro-2H-pyran-3,4-diyldiacetate)-phosphate
  modified_base 3: mod_base = OTHER; note (5-acetamido-2-(acetoxymethyl)-6-((5-((2S,6R)-2-((bis(4-met hoxyphenyl)(phenyl)methoxy)methyl)-2-((((2-cyanoethoxy)(dii sopropylamino)phosphaneyl)oxy)methyl)-6-(5-methyl-2,4-dioxo -3,4-dihydropyrimidin-1(2H)-yl)morpholino)pentyl)oxy)tetrah ydro-2H-pyran-3,4-diyldiacetate)-phosphate
  modified_base 4: mod_base = OTHER; note = 2'-O-methyluridine-3'-phosphate
  modified_base 5: mod_base = OTHER; note = 2'-O-methyluridine-3'-phosphate
  modified_base 6: mod_base = OTHER; note = 2'-O-methyladenosine-3'-phosphate
  modified_base 7: mod_base = OTHER; note = 2'-O-methyluridine-3'-phosphate
  modified_base 8: mod_base = OTHER; note = 2'-fluorouridine-3'-phosphate
  modified_base 9: mod_base = OTHER; note = 2'-O-methyladenosine-3'-phosphate
  modified_base 10: mod_base = OTHER; note = 2'-fluoroadenosine-3'-phosphate
  modified_base 11: mod_base = OTHER; note = 2'-fluorouridine-3'-phosphate
  modified_base 12: mod_base = OTHER; note = 2'-fluoroadenosine-3'-phosphate
  modified_base 13: mod_base = OTHER; note = 2'-O-methyluridine-3'-phosphate
  modified_base 14: mod_base = OTHER; note = 2'-O-methylguanosine-3'-phosphate
  modified_base 15: mod_base = OTHER; note = 2'-O-methylguanosine-3'-phosphate
  modified_base 16: mod_base = OTHER; note = 2'-O-methyluridine-3'-phosphate
  modified_base 17: mod_base = OTHER; note = 2'-O-methylguanosine-3'-phosphate
  modified_base 18: mod_base = OTHER; note = 2'-O-methyladenosine-3'-phosphate
  modified_base 19: mod_base = OTHER; note = 2'-O-methylcytidine-3'-phosphate
  modified_base 20: mod_base = OTHER; note = 2'-O-methyluridine-3'-phosphorothioate
  modified_base 21: mod_base = OTHER; note = 2'-O-methyluridine-3'-phosphorothioate
  modified_base 22: mod_base = OTHER; note = 2'-O-methyluridine
tttttattaatatggtgacttt

SEQ ID NO: 2169 - RNA, 22 nt, synthetic construct
  source 1..22: mol_type = other RNA
  modified_base 1: mod_base = OTHER; note (5-acetamido-2-(acetoxymethyl)-6-((5-((2S,6R)-2-((bis(4-met hoxyphenyl)(phenyl)methoxy)methyl)-2-((((2-cyanoethoxy)(dii sopropylamino)phosphaneyl)oxy)methyl)-6-(5-methyl-2,4-dioxo -3,4-dihydropyrimidin-1(2H)-yl)morpholino)pentyl)oxy)tetrah ydro-2H-pyran-3,4-diyldiacetate)-phosphate
  modified_base 2: mod_base = OTHER; note (5-acetamido-2-(acetoxymethyl)-6-((5-((2S,6R)-2-((bis(4-met hoxyphenyl)(phenyl)methoxy)methyl)-2-((((2-cyanoethoxy)(dii sopropylamino)phosphaneyl)oxy)methyl)-6-(5-methyl-2,4-dioxo -3,4-dihydropyrimidin-1(2H)-yl)morpholino)pentyl)oxy)tetrah ydro-2H-pyran-3,4-diyldiacetate)-phosphate
  modified_base 3: mod_base = OTHER; note (5-acetamido-2-(acetoxymethyl)-6-((5-((2S,6R)-2-((bis(4-met hoxyphenyl)(phenyl)methoxy)methyl)-2-((((2-cyanoethoxy)(dii sopropylamino)phosphaneyl)oxy)methyl)-6-(5-methyl-2,4-dioxo -3,4-dihydropyrimidin-1(2H)-yl)morpholino)pentyl)oxy)tetrah ydro-2H-pyran-3,4-diyldiacetate)-phosphate
  modified_base 4: mod_base = OTHER; note = Uracil locked nucleotide-3'-phosphate
  modified_base 5: mod_base = OTHER; note = Uracil locked nucleotide-3'-phosphate
  modified_base 6: mod_base = OTHER; note = 2'-O-methyladenosine-3'-phosphate
  modified_base 7: mod_base = OTHER; note = 2'-O-methyluridine-3'-phosphate
  modified_base 8: mod_base = OTHER; note = 2'-fluorouridine-3'-phosphate
  modified_base 9: mod_base = OTHER; note = 2'-O-methyladenosine-3'-phosphate
  modified_base 10: mod_base = OTHER; note = 2'-fluoroadenosine-3'-phosphate
  modified_base 11: mod_base = OTHER; note = 2'-fluorouridine-3'-phosphate
  modified_base 12: mod_base = OTHER; note = 2'-fluoroadenosine-3'-phosphate
  modified_base 13: mod_base = OTHER; note = 2'-O-methyluridine-3'-phosphate
  modified_base 14: mod_base = OTHER; note = 2'-O-methylguanosine-3'-phosphate
  modified_base 15: mod_base = OTHER; note = 2'-O-methylguanosine-3'-phosphate
  modified_base 16: mod_base = OTHER; note = 2'-O-methyluridine-3'-phosphate
  modified_base 17: mod_base = OTHER; note = 2'-O-methylguanosine-3'-phosphate
  modified_base 18: mod_base = OTHER; note = 2'-O-methyladenosine-3'-phosphate
  modified_base 19: mod_base = OTHER; note = 2'-O-methylcytidine-3'-phosphate
  modified_base 20: mod_base = OTHER; note = 2'-O-methyluridine-3'-phosphorothioate
  modified_base 21: mod_base = OTHER; note = 2'-O-methyluridine-3'-phosphorothioate
  modified_base 22: mod_base = OTHER; note = 2'-O-methyluridine
tttttattaatatggtgacttt

SEQ ID NO: 2170 - RNA, 24 nt, synthetic construct
  source 1..24: mol_type = other RNA
  modified_base 1: mod_base = OTHER; note (5-acetamido-2-(acetoxymethyl)-6-((5-((2S,6R)-2-((bis(4-met hoxyphenyl)(phenyl)methoxy)methyl)-2-((((2-cyanoethoxy)(dii sopropylamino)phosphaneyl)oxy)methyl)-6-(5-methyl-2,4-dioxo -3,4-dihydropyrimidin-1(2H)-yl)morpholino)pentyl)oxy)tetrah ydro-2H-pyran-3,4-diyldiacetate)-phosphate
  modified_base 2: mod_base = OTHER; note (5-acetamido-2-(acetoxymethyl)-6-((5-((2S,6R)-2-((bis(4-met hoxyphenyl)(phenyl)methoxy)methyl)-2-((((2-cyanoethoxy)(dii sopropylamino)phosphaneyl)oxy)methyl)-6-(5-methyl-2,4-dioxo -3,4-dihydropyrimidin-1(2H)-yl)morpholino)pentyl)oxy)tetrah ydro-2H-pyran-3,4-diyldiacetate)-phosphate
  modified_base 3: mod_base = OTHER; note (5-acetamido-2-(acetoxymethyl)-6-((5-((2S,6R)-2-((bis(4-met hoxyphenyl)(phenyl)methoxy)methyl)-2-((((2-cyanoethoxy)(dii sopropylamino)phosphaneyl)oxy)methyl)-6-(5-methyl-2,4-dioxo -3,4-dihydropyrimidin-1(2H)-yl)morpholino)pentyl)oxy)tetrah ydro-2H-pyran-3,4-diyldiacetate)-phosphate
  modified_base 4: mod_base = OTHER; note = 2'-O-methyluridine-3'-phosphate
  modified_base 5: mod_base = OTHER; note = 2'-O-methyluridine-3'-phosphate
  modified_base 6: mod_base = OTHER; note = 2'-O-methyladenosine-3'-phosphate
  modified_base 7: mod_base = OTHER; note = 2'-O-methyluridine-3'-phosphate
  modified_base 8: mod_base = OTHER; note = 2'-fluorouridine-3'-phosphate
  modified_base 9: mod_base = OTHER; note = 2'-O-methyladenosine-3'-phosphate
  modified_base 10: mod_base = OTHER; note = 2'-fluoroadenosine-3'-phosphate
  modified_base 11: mod_base = OTHER; note = 2'-fluorouridine-3'-phosphate
  modified_base 12: mod_base = OTHER; note = 2'-fluoroadenosine-3'-phosphate
  modified_base 13: mod_base = OTHER; note = 2'-O-methyluridine-3'-phosphate
  modified_base 14: mod_base = OTHER; note = 2'-O-methylguanosine-3'-phosphate
  modified_base 15: mod_base = OTHER; note = 2'-O-methylguanosine-3'-phosphate
  modified_base 16: mod_base = OTHER; note = 2'-O-methyluridine-3'-phosphate
  modified_base 17: mod_base = OTHER; note = 2'-O-methylguanosine-3'-phosphate
  modified_base 18: mod_base = OTHER; note = 2'-O-methyladenosine-3'-phosphate
  modified_base 19: mod_base = OTHER; note = 2'-O-methylcytidine-3'-phosphate
  modified_base 20: mod_base = OTHER; note = 2'-O-methyluridine-3'-phosphate
  modified_base 21: mod_base = OTHER; note = 2'-O-methyluridine-3'-phosphate
  modified_base 22: mod_base = OTHER; note = 2'-O-methyluridine-3'-phosphate
  modified_base 23: mod_base = OTHER; note (((2S,6R)-2-((bis(4-methoxyphenyl)(phenyl)methoxy)methyl)-4 -cyclohexyl-6-(5-methyl-2,4-dioxo-3,4-dihydropyrimidin-1(2H )-yl)morpholin-2-yl)methyl (2-cyanoethyl) diisopropylphosphoramidite) phosphate
  modified_base 24: mod_base = OTHER; note ((2S,6R)-2-((bis(4-methoxyphenyl)(phenyl)methoxy)methyl)-4- cyclohexyl-6-(5-methyl-2,4-dioxo-3,4-dihydropyrimidin-1(2H) -yl)morpholin-2-yl)methyl (2-cyanoethyl) diisopropylphosphoramidite
tttttattaatatggtgacttttt

SEQ ID NO: 2171 - DNA, 21 bp, synthetic construct
  source 1..21: mol_type = other DNA
  modified_base 1: mod_base = OTHER; note = 2'-fluoroadenosine-3'-phosphorothioate
  modified_base 2: mod_base = OTHER; note = 2'-fluorouridine-3'-phosphorothioate
  modified_base 3: mod_base = OTHER; note = 2'-O-methyluridine-3'-phosphate
  modified_base 4: mod_base = OTHER; note = 2'-fluorouridine-3'-phosphate
  modified_base 5: mod_base = OTHER; note = 2'-O-methyluridine-3'-phosphate
  modified_base 6: mod_base = OTHER; note = 2'-fluoroadenosine-3'-phosphate
  modified_base 7: mod_base = OTHER; note = 2'-O-methyladenosine-3'-phosphate
  modified_base 8: mod_base = OTHER; note = 2'-fluoroadenosine-3'-phosphate
  modified_base 9: mod_base = OTHER; note = 2'-O-methyladenosine-3'-phosphate
  modified_base 10: mod_base = OTHER; note = 2'-fluoroadenosine-3'-phosphate
  modified_base 11: mod_base = OTHER; note = 2'-O-methylguanosine-3'-phosphate
  modified_base 12: mod_base = OTHER; note = 2'-fluorouridine-3'-phosphate
  modified_base 13: mod_base = OTHER; note = 2'-O-methylcytidine-3'-phosphate
  modified_base 14: mod_base = OTHER; note = 2'-fluoroadenosine-3'-phosphate
  modified_base 15: mod_base = OTHER; note = 2'-O-methylcytidine-3'-phosphate
  modified_base 16: mod_base = OTHER; note = 2'-fluorocytidine-3'-phosphate
  modified_base 17: mod_base = OTHER; note = 2'-O-methyladenosine-3'-phosphate
  modified_base 18: mod_base = OTHER; note = 2'-fluorouridine-3'-phosphate
  modified_base 19: mod_base = OTHER; note = 2'-O-methyladenosine-3'-phosphorothioate
  modified_base 20: mod_base = OTHER; note = 2'-deoxythymidine(or 5-methyluridine)-3'-phosphorothioate
  misc_feature 1..19: note = RNA
  misc_feature 20..21: note = DNA
attttaaaaagtcaccatatt

SEQ ID NO: 2172 - RNA, 21 nt, synthetic construct
  source 1..21: mol_type = other RNA
  modified_base 1: mod_base = OTHER; note = 2'-O-methyladenosine-3'-phosphorothioate
  modified_base 2: mod_base = OTHER; note = 2'-fluorouridine-3'-phosphorothioate
  modified_base 3: mod_base = OTHER; note = 2'-O-methyluridine-3'-phosphate
  modified_base 4: mod_base = OTHER; note = 2'-O-methyluridine-3'-phosphate
  modified_base 5: mod_base = OTHER; note = 2'-O-methyluridine-3'-phosphate
  modified_base 6: mod_base = OTHER; note = 2'-fluoroadenosine-3'-phosphate
  modified_base 7: mod_base = OTHER; note = 2'-O-methyladenosine-3'-phosphate
  modified_base 8: mod_base = OTHER; note = 2'-O-methyladenosine-3'-phosphate
  modified_base 9: mod_base = OTHER; note = 2'-O-methyladenosine-3'-phosphate
  modified_base 10: mod_base = OTHER; note = 2'-O-methyladenosine-3'-phosphate
  modified_base 11: mod_base = OTHER; note = 2'-O-methylguanosine-3'-phosphate
  modified_base 12: mod_base = OTHER; note = 2'-O-methyluridine-3'-phosphate
  modified_base 13: mod_base = OTHER; note = 2'-O-methylcytidine-3'-phosphate
  modified_base 14: mod_base = OTHER; note = 2'-fluoroadenosine-3'-phosphate
  modified_base 15: mod_base = OTHER; note = 2'-O-methylcytidine-3'-phosphate
  modified_base 16: mod_base = OTHER; note = 2'-fluorocytidine-3'-phosphate
  modified_base 17: mod_base = OTHER; note = 2'-O-methyladenosine-3'-phosphate
  modified_base 18: mod_base = OTHER; note = 2'-O-methyluridine-3'-phosphate
  modified_base 19: mod_base = OTHER; note = 2'-O-methyladenosine-3'-phosphorothioate
  modified_base 20: mod_base = OTHER; note = 2'-O-methyladenosine-3'-phosphorothioate
  modified_base 21: mod_base = OTHER; note = 2'-O-methyladenosine
attttaaaaagtcaccataaa

SEQ ID NO: 2173 - DNA, 21 bp, synthetic construct
  source 1..21: mol_type = other DNA
  modified_base 1: mod_base = OTHER; note = 2'-fluoroadenosine-3'-phosphorothioate
  modified_base 2: mod_base = OTHER; note = 2'-fluoroadenosine-3'-phosphorothioate
  modified_base 3: mod_base = OTHER; note = 2'-O-methyladenosine-3'-phosphate
  modified_base 4: mod_base = OTHER; note = 2'-fluoroguanosine-3'-phosphate
  modified_base 5: mod_base = OTHER; note = 2'-O-methyluridine-3'-phosphate
  modified_base 6: mod_base = OTHER; note = 2'-fluorocytidine-3'-phosphate
  modified_base 7: mod_base = OTHER; note = 2'-O-methyladenosine-3'-phosphate
  modified_base 8: mod_base = OTHER; note = 2'-fluorocytidine-3'-phosphate
  modified_base 9: mod_base = OTHER; note = 2'-O-methylcytidine-3'-phosphate
  modified_base 10: mod_base = OTHER; note = 2'-fluoroadenosine-3'-phosphate
  modified_base 11: mod_base = OTHER; note = 2'-O-methyluridine-3'-phosphate
  modified_base 12: mod_base = OTHER; note = 2'-fluoroadenosine-3'-phosphate
  modified_base 13: mod_base = OTHER; note = 2'-O-methyluridine-3'-phosphate
  modified_base 14: mod_base = OTHER; note = 2'-fluorouridine-3'-phosphate
  modified_base 15: mod_base = OTHER; note = 2'-O-methyladenosine-3'-phosphate
  modified_base 16: mod_base = OTHER; note = 2'-fluoroadenosine-3'-phosphate
  modified_base 17: mod_base = OTHER; note = 2'-O-methyluridine-3'-phosphate
  modified_base 18: mod_base = OTHER; note = 2'-fluoroadenosine-3'-phosphate
  modified_base 19: mod_base = OTHER; note = 2'-O-methyladenosine-3'-phosphorothioate
  modified_base 20: mod_base = OTHER; note = 2'-deoxythymidine(or 5-methyluridine)-3'-phosphorothioate
  misc_feature 1..19: note = RNA
  misc_feature 20..21: note = DNA
aaagtcaccatattaataatt

SEQ ID NO: 2174 - RNA, 21 nt, synthetic construct
  source 1..21: mol_type = other RNA
  modified_base 1: mod_base = OTHER; note = 2'-O-methyladenosine-3'-phosphorothioate
  modified_base 2: mod_base = OTHER; note = 2'-fluoroadenosine-3'-phosphorothioate
  modified_base 3: mod_base = OTHER; note = 2'-O-methyladenosine-3'-phosphate
  modified_base 4: mod_base = OTHER; note = 2'-fluoroguanosine-3'-phosphate
  modified_base 5: mod_base = OTHER; note = 2'-O-methyluridine-3'-phosphate
  modified_base 6: mod_base = OTHER; note = 2'-O-methylcytidine-3'-phosphate
  modified_base 7: mod_base = OTHER; note = 2'-O-methyladenosine-3'-phosphate
  modified_base 8: mod_base = OTHER; note = 2'-O-methylcytidine-3'-phosphate
  modified_base 9: mod_base = OTHER; note = 2'-O-methylcytidine-3'-phosphate
  modified_base 10: mod_base = OTHER; note = 2'-O-methyladenosine-3'-phosphate
  modified_base 11: mod_base = OTHER; note = 2'-O-methyluridine-3'-phosphate
  modified_base 12: mod_base = OTHER; note = 2'-O-methyladenosine-3'-phosphate
  modified_base 13: mod_base = OTHER; note = 2'-O-methyluridine-3'-phosphate
  modified_base 14: mod_base = OTHER; note = 2'-fluorouridine-3'-phosphate
  modified_base 15: mod_base = OTHER; note = 2'-O-methyladenosine-3'-phosphate
  modified_base 16: mod_base = OTHER; note = 2'-fluoroadenosine-3'-phosphate
  modified_base 17: mod_base = OTHER; note = 2'-O-methyluridine-3'-phosphate
  modified_base 18: mod_base = OTHER; note = 2'-O-methyladenosine-3'-phosphate
  modified_base 19: mod_base = OTHER; note = 2'-O-methyladenosine-3'-phosphorothioate
  modified_base 20: mod_base = OTHER; note = 2'-O-methyladenosine-3'-phosphorothioate
  modified_base 21: mod_base = OTHER; note = 2'-O-methyladenosine
aaagtcaccatattaataaaa

SEQ ID NO: 2175 - RNA, 21 nt, synthetic construct
  source 1..21: mol_type = other RNA
  modified_base 1: mod_base = OTHER; note = 2'-O-methyladenosine-3'-phosphorothioate
  modified_base 2: mod_base = OTHER; note = 2'-fluoroadenosine-3'-phosphorothioate
  modified_base 3: mod_base = OTHER; note = 2'-O-methyladenosine-3'-phosphate
  modified_base 4: mod_base = OTHER; note = 2'-fluoroguanosine-3'-phosphate
  modified_base 5: mod_base = OTHER; note = 2'-O-methyluridine-3'-phosphate
  modified_base 6: mod_base = OTHER; note = 2'-O-methylcytidine-3'-phosphate
  modified_base 7: mod_base = OTHER; note = 2'-O-methyladenosine-3'-phosphate
  modified_base 8: mod_base = OTHER; note = 2'-fluorocytidine-3'-phosphate
  modified_base 9: mod_base = OTHER; note = 2'-fluorocytidine-3'-phosphate
  modified_base 10: mod_base = OTHER; note = 2'-O-methyladenosine-3'-phosphate
  modified_base 11: mod_base = OTHER; note = 2'-O-methyluridine-3'-phosphate
  modified_base 12: mod_base = OTHER; note = 2'-O-methyladenosine-3'-phosphate
  modified_base 13: mod_base = OTHER; note = 2'-O-methyluridine-3'-phosphate
  modified_base 14: mod_base = OTHER; note = 2'-fluorouridine-3'-phosphate
  modified_base 15: mod_base = OTHER; note = 2'-O-methyladenosine-3'-phosphate
  modified_base 16: mod_base = OTHER; note = 2'-fluoroadenosine-3'-phosphate
  modified_base 17: mod_base = OTHER; note = 2'-O-methyluridine-3'-phosphate
  modified_base 18: mod_base = OTHER; note = 2'-O-methyladenosine-3'-phosphate
  modified_base 19: mod_base = OTHER; note = 2'-O-methyladenosine-3'-phosphorothioate
  modified_base 20: mod_base = OTHER; note = 2'-O-methyladenosine-3'-phosphorothioate
  modified_base 21: mod_base = OTHER; note = 2'-O-methyladenosine
aaagtcaccatattaataaaa

SEQ ID NO: 2176 - RNA, 21 nt, synthetic construct
  source 1..21: mol_type = other RNA
  modified_base 1: mod_base = OTHER; note = 2'-O-methyladenosine-3'-phosphorothioate
  modified_base 2: mod_base = OTHER; note = 2'-fluoroadenosine-3'-phosphorothioate
  modified_base 3: mod_base = OTHER; note = 2'-O-methyladenosine-3'-phosphate
  modified_base 4: mod_base = OTHER; note = 2'-fluoroguanosine-3'-phosphate
  modified_base 5: mod_base = OTHER; note = 2'-O-methyluridine-3'-phosphate
  modified_base 6: mod_base = OTHER; note = 2'-O-methylcytidine-3'-phosphate
  modified_base 7: mod_base = OTHER; note = 2'-O-methyladenosine-3'-phosphate
  modified_base 8: mod_base = OTHER; note = 2'-O-methylcytidine-3'-phosphate
  modified_base 9: mod_base = OTHER; note = 2'-fluorocytidine-3'-phosphate
  modified_base 10: mod_base = OTHER; note = 2'-O-methyladenosine-3'-phosphate
  modified_base 11: mod_base = OTHER; note = 2'-O-methyluridine-3'-phosphate
  modified_base 12: mod_base = OTHER; note = 2'-O-methyladenosine-3'-phosphate
  modified_base 13: mod_base = OTHER; note = 2'-O-methyluridine-3'-phosphate
  modified_base 14: mod_base = OTHER; note = 2'-fluorouridine-3'-phosphate
  modified_base 15: mod_base = OTHER; note = 2'-O-methyladenosine-3'-phosphate
  modified_base 16: mod_base = OTHER; note = 2'-fluoroadenosine-3'-phosphate
  modified_base 17: mod_base = OTHER; note = 2'-O-methyluridine-3'-phosphate
  modified_base 18: mod_base = OTHER; note = 2'-O-methyladenosine-3'-phosphate
  modified_base 19: mod_base = OTHER; note = 2'-O-methyladenosine-3'-phosphorothioate
  modified_base 20: mod_base = OTHER; note = 2'-O-methyladenosine-3'-phosphorothioate
  modified_base 21: mod_base = OTHER; note = 2'-O-methyladenosine
aaagtcaccatattaataaaa

SEQ ID NO: 2177 - RNA, 21 nt, synthetic construct
  source 1..21: mol_type = other RNA
  modified_base 1: mod_base = OTHER; note = 2'-O-methyladenosine-3'-phosphorothioate
  modified_base 2: mod_base = OTHER; note = 2'-fluoroadenosine-3'-phosphorothioate
  modified_base 3: mod_base = OTHER; note = 2'-O-methyladenosine-3'-phosphate
  modified_base 4: mod_base = OTHER; note = 2'-fluoroguanosine-3'-phosphate
  modified_base 5: mod_base = OTHER; note = 2'-O-methyluridine-3'-phosphate
  modified_base 6: mod_base = OTHER; note = 2'-O-methylcytidine-3'-phosphate
  modified_base 7: mod_base = OTHER; note = 2'-O-methyladenosine-3'-phosphate
  modified_base 8: mod_base = OTHER; note = 2'-fluorocytidine-3'-phosphate
  modified_base 9: mod_base = OTHER; note = 2'-fluorocytidine-3'-phosphate
  modified_base 10: mod_base = OTHER; note = 2'-O-methyladenosine-3'-phosphate
  modified_base 11: mod_base = OTHER; note = 2'-O-methyluridine-3'-phosphate
  modified_base 12: mod_base = OTHER; note = 2'-O-methyladenosine-3'-phosphate
  modified_base 13: mod_base = OTHER; note = 2'-O-methyluridine-3'-phosphate
  modified_base 14: mod_base = OTHER; note = 2'-fluorouridine-3'-phosphate
  modified_base 15: mod_base = OTHER; note = 2'-O-methyladenosine-3'-phosphate
  modified_base 16: mod_base = OTHER; note = 2'-fluoroadenosine-3'-phosphate
  modified_base 17: mod_base = OTHER; note = 2'-O-methyluridine-3'-phosphate
  modified_base 18: mod_base = OTHER; note = 2'-O-methyladenosine-3'-phosphate
  modified_base 19: mod_base = OTHER; note = 2'-O-methyladenosine-3'-phosphorothioate
  modified_base 20: mod_base = OTHER; note = Adenine locked nucleotide-3'-phosphorothioate
  modified_base 21: mod_base = OTHER; note = Adenine locked nucleotide
aaagtcaccatattaataaaa

SEQ ID NO: 2178 - RNA, 21 nt, synthetic construct
  source 1..21: mol_type = other RNA
  modified_base 1: mod_base = OTHER; note = 2'-O-methyladenosine-3'-phosphorothioate
  modified_base 2: mod_base = OTHER; note = 2'-fluoroadenosine-3'-phosphorothioate
  modified_base 3: mod_base = OTHER; note = 2'-O-methyladenosine-3'-phosphate
  modified_base 4: mod_base = OTHER; note = 2'-fluoroguanosine-3'-phosphate
  modified_base 5: mod_base = OTHER; note = 2'-O-methyluridine-3'-phosphate
  modified_base 6: mod_base = OTHER; note = 2'-O-methylcytidine-3'-phosphate
  modified_base 7: mod_base = OTHER; note = 2'-O-methyladenosine-3'-phosphate
  modified_base 8: mod_base = OTHER; note = 2'-O-methylcytidine-3'-phosphate
  modified_base 9: mod_base = OTHER; note = 2'-fluorocytidine-3'-phosphate
  modified_base 10: mod_base = OTHER; note = 2'-O-methyladenosine-3'-phosphate
  modified_base 11: mod_base = OTHER; note = 2'-O-methyluridine-3'-phosphate
  modified_base 12: mod_base = OTHER; note = 2'-O-methyladenosine-3'-phosphate
  modified_base 13: mod_base = OTHER; note = 2'-O-methyluridine-3'-phosphate
  modified_base 14: mod_base = OTHER; note = 2'-fluorouridine-3'-phosphate
  modified_base 15: mod_base = OTHER; note = 2'-O-methyladenosine-3'-phosphate
  modified_base 16: mod_base = OTHER; note = 2'-fluoroadenosine-3'-phosphate
  modified_base 17: mod_base = OTHER; note = 2'-O-methyluridine-3'-phosphate
  modified_base 18: mod_base = OTHER; note = 2'-O-methyladenosine-3'-phosphate
  modified_base 19: mod_base = OTHER; note = 2'-O-methyladenosine-3'-phosphorothioate
  modified_base 20: mod_base = OTHER; note = Adenine locked nucleotide-3'-phosphorothioate
  modified_base 21: mod_base = OTHER; note = Adenine locked nucleotide
aaagtcaccatattaataaaa

SEQ ID NO: 2179 - RNA, 22 nt, synthetic construct
  source 1..22: mol_type = other RNA
  modified_base 1: mod_base = OTHER; note (5-acetamido-2-(acetoxymethyl)-6-((5-((2S,6R)-2-((bis(4-met hoxyphenyl)(phenyl)methoxy)methyl)-2-((((2-cyanoethoxy)(dii sopropylamino)phosphaneyl)oxy)methyl)-6-(5-methyl-2,4-dioxo -3,4-dihydropyrimidin-1(2H)-yl)morpholino)pentyl)oxy)tetrah ydro-2H-pyran-3,4-diyldiacetate)-phosphate
  modified_base 2: mod_base = OTHER; note (5-acetamido-2-(acetoxymethyl)-6-((5-((2S,6R)-2-((bis(4-met hoxyphenyl)(phenyl)methoxy)methyl)-2-((((2-cyanoethoxy)(dii sopropylamino)phosphaneyl)oxy)methyl)-6-(5-methyl-2,4-dioxo -3,4-dihydropyrimidin-1(2H)-yl)morpholino)pentyl)oxy)tetrah ydro-2H-pyran-3,4-diyldiacetate)-phosphate
  modified_base 3: mod_base = OTHER; note (5-acetamido-2-(acetoxymethyl)-6-((5-((2S,6R)-2-((bis(4-met hoxyphenyl)(phenyl)methoxy)methyl)-2-((((2-cyanoethoxy)(dii sopropylamino)phosphaneyl)oxy)methyl)-6-(5-methyl-2,4-dioxo -3,4-dihydropyrimidin-1(2H)-yl)morpholino)pentyl)oxy)tetrah ydro-2H-pyran-3,4-diyldiacetate)-phosphate
  modified_base 4: mod_base = OTHER; note = 2'-fluorouridine-3'-phosphate
  modified_base 5: mod_base = OTHER; note = 2'-O-methyladenosine-3'-phosphate
  modified_base 6: mod_base = OTHER; note = 2'-fluorouridine-3'-phosphate
  modified_base 7: mod_base = OTHER; note = 2'-O-methylguanosine-3'-phosphate
  modified_base 8: mod_base = OTHER; note = 2'-fluoroguanosine-3'-phosphate
  modified_base 9: mod_base = OTHER; note = 2'-O-methyluridine-3'-phosphate
  modified_base 10: mod_base = OTHER; note = 2'-fluoroguanosine-3'-phosphate
  modified_base 11: mod_base = OTHER; note = 2'-O-methyladenosine-3'-phosphate
  modified_base 12: mod_base = OTHER; note = 2'-fluorocytidine-3'-phosphate
  modified_base 13: mod_base = OTHER; note = 2'-O-methyluridine-3'-phosphate
  modified_base 14: mod_base = OTHER; note = 2'-fluorouridine-3'-phosphate
  modified_base 15: mod_base = OTHER; note = 2'-O-methyluridine-3'-phosphate
  modified_base 16: mod_base = OTHER; note = 2'-fluorouridine-3'-phosphate
  modified_base 17: mod_base = OTHER; note = 2'-O-methyluridine-3'-phosphate
  modified_base 18: mod_base = OTHER; note = 2'-fluoroadenosine-3'-phosphate
  modified_base 19: mod_base = OTHER; note = 2'-O-methyladenosine-3'-phosphate
  modified_base 20: mod_base = OTHER; note = 2'-fluoroadenosine-3'-phosphorothioate
  modified_base 21: mod_base = OTHER; note = 2'-O-methyladenosine-3'-phosphorothioate
  modified_base 22: mod_base = OTHER; note = 2'-fluorouridine
ttttatggtgactttttaaaat

SEQ ID NO: 2180 - DNA, 21 bp, synthetic construct
  source 1..21: mol_type = other DNA
  modified_base 1: mod_base = OTHER; note = 2'-fluoroadenosine-3'-phosphorothioate
  modified_base 2: mod_base = OTHER; note = 2'-fluorouridine-3'-phosphorothioate
  modified_base 3: mod_base = OTHER; note = 2'-O-methyluridine-3'-phosphate
  modified_base 4: mod_base = OTHER; note = 2'-fluorouridine-3'-phosphate
  modified_base 5: mod_base = OTHER; note = 2'-O-methyluridine-3'-phosphate
  modified_base 6: mod_base = OTHER; note = 2'-fluoroadenosine-3'-phosphate
  modified_base 7: mod_base = OTHER; note = 2'-O-methyladenosine-3'-phosphate
  modified_base 8: mod_base = OTHER; note = 2'-fluoroadenosine-3'-phosphate
  modified_base 9: mod_base = OTHER; note = 2'-O-methyladenosine-3'-phosphate
  modified_base 10: mod_base = OTHER; note = 2'-fluoroadenosine-3'-phosphate
  modified_base 11: mod_base = OTHER; note = 2'-O-methylguanosine-3'-phosphate
  modified_base 12: mod_base = OTHER; note = 2'-fluorouridine-3'-phosphate
  modified_base 13: mod_base = OTHER; note = 2'-O-methylcytidine-3'-phosphate
  modified_base 14: mod_base = OTHER; note = 2'-fluoroadenosine-3'-phosphate
  modified_base 15: mod_base = OTHER; note = 2'-O-methylcytidine-3'-phosphate
  modified_base 16: mod_base = OTHER; note = 2'-fluorocytidine-3'-phosphate
  modified_base 17: mod_base = OTHER; note = 2'-O-methyladenosine-3'-phosphate
  modified_base 18: mod_base = OTHER; note = 2'-fluorouridine-3'-phosphate
  modified_base 19: mod_base = OTHER; note = 2'-O-methyladenosine-3'-phosphorothioate
  modified_base 20: mod_base = OTHER; note = 2'-deoxythymidine(or 5-methyluridine)-3'-phosphorothioate
  misc_feature 1..19: note = RNA
  misc_feature 20..21: note = DNA
attttaaaaagtcaccatatt

SEQ ID NO: 2181 - RNA, 22 nt, synthetic construct
  source 1..22: mol_type = other RNA
  modified_base 1: mod_base = OTHER; note (5-acetamido-2-(acetoxymethyl)-6-((5-((2S,6R)-2-((bis(4-met hoxyphenyl)(phenyl)methoxy)methyl)-2-((((2-cyanoethoxy)(dii sopropylamino)phosphaneyl)oxy)methyl)-6-(5-methyl-2,4-dioxo -3,4-dihydropyrimidin-1(2H)-yl)morpholino)pentyl)oxy)tetrah ydro-2H-pyran-3,4-diyldiacetate)-phosphate
  modified_base 2: mod_base = OTHER; note (5-acetamido-2-(acetoxymethyl)-6-((5-((2S,6R)-2-((bis(4-met hoxyphenyl)(phenyl)methoxy)methyl)-2-((((2-cyanoethoxy)(dii sopropylamino)phosphaneyl)oxy)methyl)-6-(5-methyl-2,4-dioxo -3,4-dihydropyrimidin-1(2H)-yl)morpholino)pentyl)oxy)tetrah ydro-2H-pyran-3,4-diyldiacetate)-phosphate
  modified_base 3: mod_base = OTHER; note (5-acetamido-2-(acetoxymethyl)-6-((5-((2S,6R)-2-((bis(4-met hoxyphenyl)(phenyl)methoxy)methyl)-2-((((2-cyanoethoxy)(dii sopropylamino)phosphaneyl)oxy)methyl)-6-(5-methyl-2,4-dioxo -3,4-dihydropyrimidin-1(2H)-yl)morpholino)pentyl)oxy)tetrah ydro-2H-pyran-3,4-diyldiacetate)-phosphate
  modified_base 4: mod_base = OTHER; note = 2'-fluorouridine-3'-phosphate
  modified_base 5: mod_base = OTHER; note = 2'-O-methyluridine-3'-phosphate
  modified_base 6: mod_base = OTHER; note = 2'-fluoroadenosine-3'-phosphate
  modified_base 7: mod_base = OTHER; note = 2'-O-methyluridine-3'-phosphate
  modified_base 8: mod_base = OTHER; note = 2'-fluorouridine-3'-phosphate
  modified_base 9: mod_base = OTHER; note = 2'-O-methyladenosine-3'-phosphate
  modified_base 10: mod_base = OTHER; note = 2'-fluoroadenosine-3'-phosphate
  modified_base 11: mod_base = OTHER; note = 2'-O-methyluridine-3'-phosphate
  modified_base 12: mod_base = OTHER; note = 2'-fluoroadenosine-3'-phosphate
  modified_base 13: mod_base = OTHER; note = 2'-O-methyluridine-3'-phosphate
  modified_base 14: mod_base = OTHER; note = 2'-fluoroguanosine-3'-phosphate
  modified_base 15: mod_base = OTHER; note = 2'-O-methylguanosine-3'-phosphate
  modified_base 16: mod_base = OTHER; note = 2'-fluorouridine-3'-phosphate
  modified_base 17: mod_base = OTHER; note = 2'-O-methylguanosine-3'-phosphate
  modified_base 18: mod_base = OTHER; note = 2'-fluoroadenosine-3'-phosphate
  modified_base 19: mod_base = OTHER; note = 2'-O-methylcytidine-3'-phosphate
  modified_base 20: mod_base = OTHER; note = 2'-fluorouridine-3'-phosphorothioate
  modified_base 21: mod_base = OTHER; note = 2'-O-methyluridine-3'-phosphorothioate
  modified_base 22: mod_base = OTHER; note = 2'-fluorouridine
tttttattaatatggtgacttt

SEQ ID NO: 2182 - DNA, 21 bp, synthetic construct
  source 1..21: mol_type = other DNA
  modified_base 1: mod_base = OTHER; note = 2'-fluoroadenosine-3'-phosphorothioate
  modified_base 2: mod_base = OTHER; note = 2'-fluoroadenosine-3'-phosphorothioate
  modified_base 3: mod_base = OTHER; note = 2'-O-methyladenosine-3'-phosphate
  modified_base 4: mod_base = OTHER; note = 2'-fluoroguanosine-3'-phosphate
  modified_base 5: mod_base = OTHER; note = 2'-O-methyluridine-3'-phosphate
  modified_base 6: mod_base = OTHER; note = 2'-fluorocytidine-3'-phosphate
  modified_base 7: mod_base = OTHER; note = 2'-O-methyladenosine-3'-phosphate
  modified_base 8: mod_base = OTHER; note = 2'-fluorocytidine-3'-phosphate
  modified_base 9: mod_base = OTHER; note = 2'-O-methylcytidine-3'-phosphate
  modified_base 10: mod_base = OTHER; note = 2'-fluoroadenosine-3'-phosphate
  modified_base 11: mod_base = OTHER; note = 2'-O-methyluridine-3'-phosphate
  modified_base 12: mod_base = OTHER; note = 2'-fluoroadenosine-3'-phosphate
  modified_base 13: mod_base = OTHER; note = 2'-O-methyluridine-3'-phosphate
  modified_base 14: mod_base = OTHER; note = 2'-fluorouridine-3'-phosphate
  modified_base 15: mod_base = OTHER; note = 2'-O-methyladenosine-3'-phosphate
  modified_base 16: mod_base = OTHER; note = 2'-fluoroadenosine-3'-phosphate
  modified_base 17: mod_base = OTHER; note = 2'-O-methyluridine-3'-phosphate
  modified_base 18: mod_base = OTHER; note = 2'-fluoroadenosine-3'-phosphate
  modified_base 19: mod_base = OTHER; note = 2'-O-methyladenosine-3'-phosphorothioate
  modified_base 20: mod_base = OTHER; note = 2'-deoxythymidine(or 5-methyluridine)-3'-phosphorothioate
  misc_feature 1..19: note = RNA
  misc_feature 20..21: note = DNA
aaagtcaccatattaataatt

SEQ ID NO: 2183 - RNA, 24 nt, synthetic construct
  source 1..24: mol_type = other RNA
  modified_base 1: mod_base = OTHER; note (5-acetamido-2-(acetoxymethyl)-6-((5-((2S,6R)-2-((bis(4-met hoxyphenyl)(phenyl)methoxy)methyl)-2-((((2-cyanoethoxy)(dii sopropylamino)phosphaneyl)oxy)methyl)-6-(5-methyl-2,4-dioxo -3,4-dihydropyrimidin-1(2H)-yl)morpholino)pentyl)oxy)tetrah ydro-2H-pyran-3,4-diyldiacetate)-phosphate
  modified_base 2: mod_base = OTHER; note (5-acetamido-2-(acetoxymethyl)-6-((5-((2S,6R)-2-((bis(4-met hoxyphenyl)(phenyl)methoxy)methyl)-2-((((2-cyanoethoxy)(dii sopropylamino)phosphaneyl)oxy)methyl)-6-(5-methyl-2,4-dioxo -3,4-dihydropyrimidin-1(2H)-yl)morpholino)pentyl)oxy)tetrah ydro-2H-pyran-3,4-diyldiacetate)-phosphate
  modified_base 3: mod_base = OTHER; note (5-acetamido-2-(acetoxymethyl)-6-((5-((2S,6R)-2-((bis(4-met hoxyphenyl)(phenyl)methoxy)methyl)-2-((((2-cyanoethoxy)(dii sopropylamino)phosphaneyl)oxy)methyl)-6-(5-methyl-2,4-dioxo -3,4-dihydropyrimidin-1(2H)-yl)morpholino)pentyl)oxy)tetrah ydro-2H-pyran-3,4-diyldiacetate)-phosphate
  modified_base 4: mod_base = OTHER; note = 2'-O-methyluridine-3'-phosphate
  modified_base 5: mod_base = OTHER; note = 2'-O-methyladenosine-3'-phosphate
  modified_base 6: mod_base = OTHER; note = 2'-O-methyluridine-3'-phosphate
  modified_base 7: mod_base = OTHER; note = 2'-O-methylguanosine-3'-phosphate
  modified_base 8: mod_base = OTHER; note = 2'-fluoroguanosine-3'-phosphate
  modified_base 9: mod_base = OTHER; note = 2'-O-methyluridine-3'-phosphate
  modified_base 10: mod_base = OTHER; note = 2'-fluoroguanosine-3'-phosphate
  modified_base 11: mod_base = OTHER; note = 2'-fluoroadenosine-3'-phosphate
  modified_base 12: mod_base = OTHER; note = 2'-fluorocytidine-3'-phosphate
  modified_base 13: mod_base = OTHER; note = 2'-O-methyluridine-3'-phosphate
  modified_base 14: mod_base = OTHER; note = 2'-O-methyluridine-3'-phosphate
  modified_base 15: mod_base = OTHER; note = 2'-O-methyluridine-3'-phosphate
  modified_base 16: mod_base = OTHER; note = 2'-O-methyluridine-3'-phosphate
  modified_base 17: mod_base = OTHER; note = 2'-O-methyluridine-3'-phosphate
  modified_base 18: mod_base = OTHER; note = 2'-O-methyladenosine-3'-phosphate
  modified_base 19: mod_base = OTHER; note = 2'-O-methyladenosine-3'-phosphate
  modified_base 20: mod_base = OTHER; note = 2'-O-methyladenosine-3'-phosphate
  modified_base 21: mod_base = OTHER; note = 2'-O-methyladenosine-3'-phosphate
  modified_base 22: mod_base = OTHER; note = 2'-O-methyluridine-3'-phosphate
  modified_base 23: mod_base = OTHER; note ((2S,6R)-2-((bis(4-methoxyphenyl)(phenyl)methoxy)methyl)-4- cyclohexyl-6-(5-methyl-2,4-dioxo-3,4-dihydropyrimidin-1(2H) -yl)morpholin-2-yl)methyl (2-cyanoethyl) diisopropylphosphoramidite phosphate
  modified_base 24: mod_base = OTHER; note ((2S,6R)-2-((bis(4-methoxyphenyl)(phenyl)methoxy)methyl)-4- cyclohexyl-6-(5-methyl-2,4-dioxo-3,4-dihydropyrimidin-1(2H) -yl)morpholin-2-yl)methyl (2-cyanoethyl) diisopropylphosphoramidite
ttttatggtgactttttaaaattt

SEQ ID NO: 2184 - RNA, 21 nt, synthetic construct
  source 1..21: mol_type = other RNA
  modified_base 1: mod_base = OTHER; note = 2'-O-methyladenosine-3'-phosphorothioate
  modified_base 2: mod_base = OTHER; note = 2'-fluorouridine-3'-phosphorothioate
  modified_base 3: mod_base = OTHER; note = 2'-O-methyluridine-3'-phosphate
  modified_base 4: mod_base = OTHER; note = 2'-O-methyluridine-3'-phosphate
  modified_base 5: mod_base = OTHER; note = 2'-O-methyluridine-3'-phosphate
  modified_base 6: mod_base = OTHER; note = 2'-fluoroadenosine-3'-phosphate
  modified_base 7: mod_base = OTHER; note = 2'-O-methyladenosine-3'-phosphate
  modified_base 8: mod_base = OTHER; note = 2'-O-methyladenosine-3'-phosphate
  modified_base 9: mod_base = OTHER; note = 2'-O-methyladenosine-3'-phosphate
  modified_base 10: mod_base = OTHER; note = 2'-O-methyladenosine-3'-phosphate
  modified_base 11: mod_base = OTHER; note = 2'-O-methylguanosine-3'-phosphate
  modified_base 12: mod_base = OTHER; note = 2'-O-methyluridine-3'-phosphate
  modified_base 13: mod_base = OTHER; note = 2'-O-methylcytidine-3'-phosphate
  modified_base 14: mod_base = OTHER; note = 2'-fluoroadenosine-3'-phosphate
  modified_base 15: mod_base = OTHER; note = 2'-O-methylcytidine-3'-phosphate
  modified_base 16: mod_base = OTHER; note = 2'-fluorocytidine-3'-phosphate
  modified_base 17: mod_base = OTHER; note = 2'-O-methyladenosine-3'-phosphate
  modified_base 18: mod_base = OTHER; note = 2'-O-methyluridine-3'-phosphate
  modified_base 19: mod_base = OTHER; note = 2'-O-methyladenosine-3'-phosphorothioate
  modified_base 20: mod_base = OTHER; note = 2'-O-methyladenosine-3'-phosphorothioate
  modified_base 21: mod_base = OTHER; note = 2'-O-methyladenosine
attttaaaaagtcaccataaa

SEQ ID NO: 2185 - RNA, 24 nt, synthetic construct
  source 1..24: mol_type = other RNA
  modified_base 1: mod_base = OTHER; note (5-acetamido-2-(acetoxymethyl)-6-((5-((2S,6R)-2-((bis(4-met hoxyphenyl)(phenyl)methoxy)methyl)-2-((((2-cyanoethoxy)(dii sopropylamino)phosphaneyl)oxy)methyl)-6-(5-methyl-2,4-dioxo -3,4-dihydropyrimidin-1(2H)-yl)morpholino)pentyl)oxy)tetrah ydro-2H-pyran-3,4-diyldiacetate)-phosphate
  modified_base 2: mod_base = OTHER; note (5-acetamido-2-(acetoxymethyl)-6-((5-((2S,6R)-2-((bis(4-met hoxyphenyl)(phenyl)methoxy)methyl)-2-((((2-cyanoethoxy)(dii sopropylamino)phosphaneyl)oxy)methyl)-6-(5-methyl-2,4-dioxo -3,4-dihydropyrimidin-1(2H)-yl)morpholino)pentyl)oxy)tetrah ydro-2H-pyran-3,4-diyldiacetate)-phosphate
  modified_base 3: mod_base = OTHER; note (5-acetamido-2-(acetoxymethyl)-6-((5-((2S,6R)-2-((bis(4-met hoxyphenyl)(phenyl)methoxy)methyl)-2-((((2-cyanoethoxy)(dii sopropylamino)phosphaneyl)oxy)methyl)-6-(5-methyl-2,4-dioxo -3,4-dihydropyrimidin-1(2H)-yl)morpholino)pentyl)oxy)tetrah ydro-2H-pyran-3,4-diyldiacetate)-phosphate
  modified_base 4: mod_base = OTHER; note = Uracil locked nucleotide-3'-phosphate
  modified_base 5: mod_base = OTHER; note = Adenine locked nucleotide-3'-phosphate
  modified_base 6: mod_base = OTHER; note = 2'-O-methyluridine-3'-phosphate
  modified_base 7: mod_base = OTHER; note = 2'-O-methylguanosine-3'-phosphate
  modified_base 8: mod_base = OTHER; note = 2'-fluoroguanosine-3'-phosphate
  modified_base 9: mod_base = OTHER; note = 2'-O-methyluridine-3'-phosphate
  modified_base 10: mod_base = OTHER; note = 2'-fluoroguanosine-3'-phosphate
  modified_base 11: mod_base = OTHER; note = 2'-fluoroadenosine-3'-phosphate
  modified_base 12: mod_base = OTHER; note = 2'-fluorocytidine-3'-phosphate
  modified_base 13: mod_base = OTHER; note = 2'-O-methyluridine-3'-phosphate
  modified_base 14: mod_base = OTHER; note = 2'-O-methyluridine-3'-phosphate
  modified_base 15: mod_base = OTHER; note = 2'-O-methyluridine-3'-phosphate
  modified_base 16: mod_base = OTHER; note = 2'-O-methyluridine-3'-phosphate
  modified_base 17: mod_base = OTHER; note = 2'-O-methyluridine-3'-phosphate
  modified_base 18: mod_base = OTHER; note = 2'-O-methyladenosine-3'-phosphate
  modified_base 19: mod_base = OTHER; note = 2'-O-methyladenosine-3'-phosphate
  modified_base 20: mod_base = OTHER; note = 2'-O-methyladenosine-3'-phosphate
  modified_base 21: mod_base = OTHER; note = 2'-O-methyladenosine-3'-phosphate
  modified_base 22: mod_base = OTHER; note = 2'-O-methyluridine-3'-phosphate
  modified_base 23: mod_base = OTHER; note ((2S,6R)-2-((bis(4-methoxyphenyl)(phenyl)methoxy)methyl)-4- cyclohexyl-6-(5-methyl-2,4-dioxo-3,4-dihydropyrimidin-1(2H) -yl)morpholin-2-yl)methyl (2-cyanoethyl) diisopropylphosphoramidite phosphate
  modified_base 24: mod_base = OTHER; note ((2S,6R)-2-((bis(4-methoxyphenyl)(phenyl)methoxy)methyl)-4- cyclohexyl-6-(5-methyl-2,4-dioxo-3,4-dihydropyrimidin-1(2H) -yl)morpholin-2-yl)methyl (2-cyanoethyl) diisopropylphosphoramidite
ttttatggtgactttttaaaattt

SEQ ID NO: 2186 - RNA, 21 nt, synthetic construct
  source 1..21: mol_type = other RNA
  modified_base 1: mod_base = OTHER; note = 2'-O-methyladenosine-3'-phosphorothioate
  modified_base 2: mod_base = OTHER; note = 2'-fluorouridine-3'-phosphorothioate
  modified_base 3: mod_base = OTHER; note = 2'-O-methyluridine-3'-phosphate
  modified_base 4: mod_base = OTHER; note = 2'-O-methyluridine-3'-phosphate
  modified_base 5: mod_base = OTHER; note = 2'-O-methyluridine-3'-phosphate
  modified_base 6: mod_base = OTHER; note = 2'-fluoroadenosine-3'-phosphate
  modified_base 7: mod_base = OTHER; note = 2'-O-methyladenosine-3'-phosphate
  modified_base 8: mod_base = OTHER; note = 2'-O-methyladenosine-3'-phosphate
  modified_base 9: mod_base = OTHER; note = 2'-O-methyladenosine-3'-phosphate
  modified_base 10: mod_base = OTHER; note = 2'-O-methyladenosine-3'-phosphate
  modified_base 11: mod_base = OTHER; note = 2'-O-methylguanosine-3'-phosphate
  modified_base 12: mod_base = OTHER; note = 2'-O-methyluridine-3'-phosphate
  modified_base 13: mod_base = OTHER; note = 2'-O-methylcytidine-3'-phosphate
  modified_base 14: mod_base = OTHER; note = 2'-fluoroadenosine-3'-phosphate
  modified_base 15: mod_base = OTHER; note = 2'-O-methylcytidine-3'-phosphate
  modified_base 16: mod_base = OTHER; note = 2'-fluorocytidine-3'-phosphate
  modified_base 17: mod_base = OTHER; note = 2'-O-methyladenosine-3'-phosphate
  modified_base 18: mod_base = OTHER; note = 2'-O-methyluridine-3'-phosphate
  modified_base 19: mod_base = OTHER; note = 2'-O-methyladenosine-3'-phosphorothioate
  modified_base 20: mod_base = OTHER; note = 2'-O-methyladenosine-3'-phosphorothioate
  modified_base 21: mod_base = OTHER; note = 2'-O-methyladenosine
attttaaaaagtcaccataaa

SEQ ID NO: 2187 - RNA, 22 nt, synthetic construct
  source 1..22: mol_type = other RNA
  modified_base 1: mod_base = OTHER; note (5-acetamido-2-(acetoxymethyl)-6-((5-((2S,6R)-2-((bis(4-met hoxyphenyl)(phenyl)methoxy)methyl)-2-((((2-cyanoethoxy)(dii sopropylamino)phosphaneyl)oxy)methyl)-6-(5-methyl-2,4-dioxo -3,4-dihydropyrimidin-1(2H)-yl)morpholino)pentyl)oxy)tetrah ydro-2H-pyran-3,4-diyldiacetate)-phosphate
  modified_base 2: mod_base = OTHER; note (5-acetamido-2-(acetoxymethyl)-6-((5-((2S,6R)-2-((bis(4-met hoxyphenyl)(phenyl)methoxy)methyl)-2-((((2-cyanoethoxy)(dii sopropylamino)phosphaneyl)oxy)methyl)-6-(5-methyl-2,4-dioxo -3,4-dihydropyrimidin-1(2H)-yl)morpholino)pentyl)oxy)tetrah ydro-2H-pyran-3,4-diyldiacetate)-phosphate
  modified_base 3: mod_base = OTHER; note (5-acetamido-2-(acetoxymethyl)-6-((5-((2S,6R)-2-((bis(4-met hoxyphenyl)(phenyl)methoxy)methyl)-2-((((2-cyanoethoxy)(dii sopropylamino)phosphaneyl)oxy)methyl)-6-(5-methyl-2,4-dioxo -3,4-dihydropyrimidin-1(2H)-yl)morpholino)pentyl)oxy)tetrah ydro-2H-pyran-3,4-diyldiacetate)-phosphate
  modified_base 4: mod_base = OTHER; note = 2'-O-methyluridine-3'-phosphate
  modified_base 5: mod_base = OTHER; note = 2'-O-methyluridine-3'-phosphate
  modified_base 6: mod_base = OTHER; note = 2'-O-methyladenosine-3'-phosphate
  modified_base 7: mod_base = OTHER; note = 2'-O-methyluridine-3'-phosphate
  modified_base 8: mod_base = OTHER; note = 2'-fluorouridine-3'-phosphate
  modified_base 9: mod_base = OTHER; note = 2'-O-methyladenosine-3'-phosphate
  modified_base 10: mod_base = OTHER; note = 2'-fluoroadenosine-3'-phosphate
  modified_base 11: mod_base = OTHER; note = 2'-fluorouridine-3'-phosphate
  modified_base 12: mod_base = OTHER; note = 2'-fluoroadenosine-3'-phosphate
  modified_base 13: mod_base = OTHER; note = 2'-O-methyluridine-3'-phosphate
  modified_base 14: mod_base = OTHER; note = 2'-O-methylguanosine-3'-phosphate
  modified_base 15: mod_base = OTHER; note = 2'-O-methylguanosine-3'-phosphate
  modified_base 16: mod_base = OTHER; note = 2'-O-methyluridine-3'-phosphate
  modified_base 17: mod_base = OTHER; note = 2'-O-methylguanosine-3'-phosphate
  modified_base 18: mod_base = OTHER; note = 2'-O-methyladenosine-3'-phosphate
  modified_base 19: mod_base = OTHER; note = 2'-O-methylcytidine-3'-phosphate
  modified_base 20: mod_base = OTHER; note = 2'-O-methyluridine-3'-phosphorothioate
  modified_base 21: mod_base = OTHER; note = 2'-O-methyluridine-3'-phosphorothioate
  modified_base 22: mod_base = OTHER; note = 2'-O-methyluridine
tttttattaatatggtgacttt

SEQ ID NO: 2188 - RNA, 21 nt, synthetic construct
  source 1..21: mol_type = other RNA
  modified_base 1: mod_base = OTHER; note = 2'-O-methyladenosine-3'-phosphorothioate
  modified_base 2: mod_base = OTHER; note = 2'-fluoroadenosine-3'-phosphorothioate
  modified_base 3: mod_base = OTHER; note = 2'-O-methyladenosine-3'-phosphate
  modified_base 4: mod_base = OTHER; note = 2'-fluoroguanosine-3'-phosphate
  modified_base 5: mod_base = OTHER; note = 2'-O-methyluridine-3'-phosphate
  modified_base 6: mod_base = OTHER; note = 2'-O-methylcytidine-3'-phosphate
  modified_base 7: mod_base = OTHER; note = 2'-O-methyladenosine-3'-phosphate
  modified_base 8: mod_base = OTHER; note = 2'-fluorocytidine-3'-phosphate
  modified_base 9: mod_base = OTHER; note = 2'-fluorocytidine-3'-phosphate
  modified_base 10: mod_base = OTHER; note = 2'-O-methyladenosine-3'-phosphate
  modified_base 11: mod_base = OTHER; note = 2'-O-methyluridine-3'-phosphate
  modified_base 12: mod_base = OTHER; note = 2'-O-methyladenosine-3'-phosphate
  modified_base 13: mod_base = OTHER; note = 2'-O-methyluridine-3'-phosphate
  modified_base 14: mod_base = OTHER; note = 2'-fluorouridine-3'-phosphate
  modified_base 15: mod_base = OTHER; note = 2'-O-methyladenosine-3'-phosphate
  modified_base 16: mod_base = OTHER; note = 2'-fluoroadenosine-3'-phosphate
  modified_base 17: mod_base = OTHER; note = 2'-O-methyluridine-3'-phosphate
  modified_base 18: mod_base = OTHER; note = 2'-O-methyladenosine-3'-phosphate
  modified_base 19: mod_base = OTHER; note = 2'-O-methyladenosine-3'-phosphorothioate
  modified_base 20: mod_base = OTHER; note = 2'-O-methyladenosine-3'-phosphorothioate
  modified_base 21: mod_base = OTHER; note = 2'-O-methyladenosine
aaagtcaccatattaataaaa

SEQ ID NO: 2189 - RNA, 22 nt, synthetic construct
  source 1..22: mol_type = other RNA
  modified_base 1: mod_base = OTHER; note (5-acetamido-2-(acetoxymethyl)-6-((5-((2S,6R)-2-((bis(4-met hoxyphenyl)(phenyl)methoxy)methyl)-2-((((2-cyanoethoxy)(dii sopropylamino)phosphaneyl)oxy)methyl)-6-(5-methyl-2,4-dioxo -3,4-dihydropyrimidin-1(2H)-yl)morpholino)pentyl)oxy)tetrah ydro-2H-pyran-3,4-diyldiacetate)-phosphate
  modified_base 2: mod_base = OTHER; note (5-acetamido-2-(acetoxymethyl)-6-((5-((2S,6R)-2-((bis(4-met hoxyphenyl)(phenyl)methoxy)methyl)-2-((((2-cyanoethoxy)(dii sopropylamino)phosphaneyl)oxy)methyl)-6-(5-methyl-2,4-dioxo -3,4-dihydropyrimidin-1(2H)-yl)morpholino)pentyl)oxy)tetrah ydro-2H-pyran-3,4-diyldiacetate)-phosphate
  modified_base 3: mod_base = OTHER; note (5-acetamido-2-(acetoxymethyl)-6-((5-((2S,6R)-2-((bis(4-met hoxyphenyl)(phenyl)methoxy)methyl)-2-((((2-cyanoethoxy)(dii sopropylamino)phosphaneyl)oxy)methyl)-6-(5-methyl-2,4-dioxo -3,4-dihydropyrimidin-1(2H)-yl)morpholino)pentyl)oxy)tetrah ydro-2H-pyran-3,4-diyldiacetate)-phosphate
  modified_base 4: mod_base = OTHER; note = Uracil locked nucleotide-3'-phosphate
  modified_base 5: mod_base = OTHER; note = Uracil locked nucleotide-3'-phosphate
  modified_base 6: mod_base = OTHER; note = 2'-O-methyladenosine-3'-phosphate
  modified_base 7: mod_base = OTHER; note = 2'-O-methyluridine-3'-phosphate
  modified_base 8: mod_base = OTHER; note = 2'-fluorouridine-3'-phosphate
  modified_base 9: mod_base = OTHER; note = 2'-O-methyladenosine-3'-phosphate
  modified_base 10: mod_base = OTHER; note = 2'-fluoroadenosine-3'-phosphate
  modified_base 11: mod_base = OTHER; note = 2'-fluorouridine-3'-phosphate
  modified_base 12: mod_base = OTHER; note = 2'-fluoroadenosine-3'-phosphate
  modified_base 13: mod_base = OTHER; note = 2'-O-methyluridine-3'-phosphate
  modified_base 14: mod_base = OTHER; note = 2'-O-methylguanosine-3'-phosphate
  modified_base 15: mod_base = OTHER; note = 2'-O-methylguanosine-3'-phosphate
  modified_base 16: mod_base = OTHER; note = 2'-O-methyluridine-3'-phosphate
  modified_base 17: mod_base = OTHER; note = 2'-O-methylguanosine-3'-phosphate
  modified_base 18: mod_base = OTHER; note = 2'-O-methyladenosine-3'-phosphate
  modified_base 19: mod_base = OTHER; note = 2'-O-methylcytidine-3'-phosphate
  modified_base 20: mod_base = OTHER; note = 2'-O-methyluridine-3'-phosphorothioate
  modified_base 21: mod_base = OTHER; note = 2'-O-methyluridine-3'-phosphorothioate
  modified_base 22: mod_base = OTHER; note = 2'-O-methyluridine
tttttattaatatggtgacttt

SEQ ID NO: 2190 - RNA, 21 nt, synthetic construct
  source 1..21: mol_type = other RNA
  modified_base 1: mod_base = OTHER; note = 2'-O-methyladenosine-3'-phosphorothioate
  modified_base 2: mod_base = OTHER; note = 2'-fluoroadenosine-3'-phosphorothioate
  modified_base 3: mod_base = OTHER; note = 2'-O-methyladenosine-3'-phosphate
  modified_base 4: mod_base = OTHER; note = 2'-fluoroguanosine-3'-phosphate
  modified_base 5: mod_base = OTHER; note = 2'-O-methyluridine-3'-phosphate
  modified_base 6: mod_base = OTHER; note = 2'-O-methylcytidine-3'-phosphate
  modified_base 7: mod_base = OTHER; note = 2'-O-methyladenosine-3'-phosphate
  modified_base 8: mod_base = OTHER; note = 2'-O-methylcytidine-3'-phosphate
  modified_base 9: mod_base = OTHER; note = 2'-O-methylcytidine-3'-phosphate
  modified_base 10: mod_base = OTHER; note = 2'-O-methyladenosine-3'-phosphate
  modified_base 11: mod_base = OTHER; note = 2'-O-methyluridine-3'-phosphate
  modified_base 12: mod_base = OTHER; note = 2'-O-methyladenosine-3'-phosphate
  modified_base 13: mod_base = OTHER; note = 2'-O-methyluridine-3'-phosphate
  modified_base 14: mod_base = OTHER; note = 2'-fluorouridine-3'-phosphate
  modified_base 15: mod_base = OTHER; note = 2'-O-methyladenosine-3'-phosphate
  modified_base 16: mod_base = OTHER; note = 2'-fluoroadenosine-3'-phosphate
  modified_base 17: mod_base = OTHER; note = 2'-O-methyluridine-3'-phosphate
  modified_base 18: mod_base = OTHER; note = 2'-O-methyladenosine-3'-phosphate
  modified_base 19: mod_base = OTHER; note = 2'-O-methyladenosine-3'-phosphorothioate
  modified_base 20: mod_base = OTHER; note = 2'-O-methyladenosine-3'-phosphorothioate
  modified_base 21: mod_base = OTHER; note = 2'-O-methyladenosine
aaagtcaccatattaataaaa

SEQ ID NO: 2191 - RNA, 22 nt, synthetic construct
  source 1..22: mol_type = other RNA
  modified_base 1: mod_base = OTHER; note (5-acetamido-2-(acetoxymethyl)-6-((5-((2S,6R)-2-((bis(4-met hoxyphenyl)(phenyl)methoxy)methyl)-2-((((2-cyanoethoxy)(dii sopropylamino)phosphaneyl)oxy)methyl)-6-(5-methyl-2,4-dioxo -3,4-dihydropyrimidin-1(2H)-yl)morpholino)pentyl)oxy)tetrah ydro-2H-pyran-3,4-diyldiacetate)-phosphate
  modified_base 2: mod_base = OTHER; note (5-acetamido-2-(acetoxymethyl)-6-((5-((2S,6R)-2-((bis(4-met hoxyphenyl)(phenyl)methoxy)methyl)-2-((((2-cyanoethoxy)(dii sopropylamino)phosphaneyl)oxy)methyl)-6-(5-methyl-2,4-dioxo -3,4-dihydropyrimidin-1(2H)-yl)morpholino)pentyl)oxy)tetrah ydro-2H-pyran-3,4-diyldiacetate)-phosphate
  modified_base 3: mod_base = OTHER; note (5-acetamido-2-(acetoxymethyl)-6-((5-((2S,6R)-2-((bis(4-met hoxyphenyl)(phenyl)methoxy)methyl)-2-((((2-cyanoethoxy)(dii sopropylamino)phosphaneyl)oxy)methyl)-6-(5-methyl-2,4-dioxo -3,4-dihydropyrimidin-1(2H)-yl)morpholino)pentyl)oxy)tetrah ydro-2H-pyran-3,4-diyldiacetate)-phosphate
  modified_base 4: mod_base = OTHER; note = Uracil locked nucleotide-3'-phosphate
  modified_base 5: mod_base = OTHER; note = Uracil locked nucleotide-3'-phosphate
  modified_base 6: mod_base = OTHER; note = 2'-O-methyladenosine-3'-phosphate
  modified_base 7: mod_base = OTHER; note = 2'-O-methyluridine-3'-phosphate
  modified_base 8: mod_base = OTHER; note = 2'-fluorouridine-3'-phosphate
  modified_base 9: mod_base = OTHER; note = 2'-O-methyladenosine-3'-phosphate
  modified_base 10: mod_base = OTHER; note = 2'-fluoroadenosine-3'-phosphate
  modified_base 11: mod_base = OTHER; note = 2'-fluorouridine-3'-phosphate
  modified_base 12: mod_base = OTHER; note = 2'-fluoroadenosine-3'-phosphate
  modified_base 13: mod_base = OTHER; note = 2'-O-methyluridine-3'-phosphate
  modified_base 14: mod_base = OTHER; note = 2'-O-methylguanosine-3'-phosphate
  modified_base 15: mod_base = OTHER; note = 2'-O-methylguanosine-3'-phosphate
  modified_base 16: mod_base = OTHER; note = 2'-O-methyluridine-3'-phosphate
  modified_base 17: mod_base = OTHER; note = 2'-O-methylguanosine-3'-phosphate
  modified_base 18: mod_base = OTHER; note = 2'-O-methyladenosine-3'-phosphate
  modified_base 19: mod_base = OTHER; note = 2'-O-methylcytidine-3'-phosphate
  modified_base 20: mod_base = OTHER; note = 2'-O-methyluridine-3'-phosphorothioate
  modified_base 21: mod_base = OTHER; note = 2'-O-methyluridine-3'-phosphorothioate
  modified_base 22: mod_base = OTHER; note = 2'-O-methyluridine
tttttattaatatggtgacttt

SEQ ID NO: 2192 - RNA, 21 nt, synthetic construct
  source 1..21: mol_type = other RNA
  modified_base 1: mod_base = OTHER; note = 2'-O-methyladenosine-3'-phosphorothioate
  modified_base 2: mod_base = OTHER; note = 2'-fluoroadenosine-3'-phosphorothioate
  modified_base 3: mod_base = OTHER; note = 2'-O-methyladenosine-3'-phosphate
  modified_base 4: mod_base = OTHER; note = 2'-fluoroguanosine-3'-phosphate
  modified_base 5: mod_base = OTHER; note = 2'-O-methyluridine-3'-phosphate
  modified_base 6: mod_base = OTHER; note = 2'-O-methylcytidine-3'-phosphate
  modified_base 7: mod_base = OTHER; note = 2'-O-methyladenosine-3'-phosphate
  modified_base 8: mod_base = OTHER; note = 2'-fluorocytidine-3'-phosphate
  modified_base 9: mod_base = OTHER; note = 2'-fluorocytidine-3'-phosphate
  modified_base 10: mod_base = OTHER; note = 2'-O-methyladenosine-3'-phosphate
  modified_base 11: mod_base = OTHER; note = 2'-O-methyluridine-3'-phosphate
  modified_base 12: mod_base = OTHER; note = 2'-O-methyladenosine-3'-phosphate
  modified_base 13: mod_base = OTHER; note = 2'-O-methyluridine-3'-phosphate
  modified_base 14: mod_base = OTHER; note = 2'-fluorouridine-3'-phosphate
  modified_base 15: mod_base = OTHER; note = 2'-O-methyladenosine-3'-phosphate
  modified_base 16: mod_base = OTHER; note = 2'-fluoroadenosine-3'-phosphate
  modified_base 17: mod_base = OTHER; note = 2'-O-methyluridine-3'-phosphate
  modified_base 18: mod_base = OTHER; note = 2'-O-methyladenosine-3'-phosphate
  modified_base 19: mod_base = OTHER; note = 2'-O-methyladenosine-3'-phosphorothioate
  modified_base 20: mod_base = OTHER; note = 2'-O-methyladenosine-3'-phosphorothioate
  modified_base 21: mod_base = OTHER; note = 2'-O-methyladenosine
aaagtcaccatattaataaaa

SEQ ID NO: 2193 - RNA, 21 nt, synthetic construct
  source 1..21: mol_type = other RNA
  modified_base 1: mod_base = OTHER; note (5-acetamido-2-(acetoxymethyl)-6-((5-((2S,6R)-2-((bis(4-met hoxyphenyl)(phenyl)methoxy)methyl)-2-((((2-cyanoethoxy)(dii sopropylamino)phosphaneyl)oxy)methyl)-6-(5-methyl-2,4-dioxo -3,4-dihydropyrimidin-1(2H)-yl)morpholino)pentyl)oxy)tetrah ydro-2H-pyran-3,4-diyldiacetate)-phosphate
  modified_base 2: mod_base = OTHER; note (5-acetamido-2-(acetoxymethyl)-6-((5-((2S,6R)-2-((bis(4-met hoxyphenyl)(phenyl)methoxy)methyl)-2-((((2-cyanoethoxy)(dii sopropylamino)phosphaneyl)oxy)methyl)-6-(5-methyl-2,4-dioxo -3,4-dihydropyrimidin-1(2H)-yl)morpholino)pentyl)oxy)tetrah ydro-2H-pyran-3,4-diyldiacetate)-phosphate
  modified_base 3: mod_base = OTHER; note (5-acetamido-2-(acetoxymethyl)-6-((5-((2S,6R)-2-((bis(4-met hoxyphenyl)(phenyl)methoxy)methyl)-2-((((2-cyanoethoxy)(dii sopropylamino)phosphaneyl)oxy)methyl)-6-(5-methyl-2,4-dioxo -3,4-dihydropyrimidin-1(2H)-yl)morpholino)pentyl)oxy)tetrah ydro-2H-pyran-3,4-diyldiacetate)-phosphate
  modified_base 4: mod_base = OTHER; note = Uracil locked nucleotide-3'-phosphate
  modified_base 5: mod_base = OTHER; note = 2'-O-methyladenosine-3'-phosphate
  modified_base 6: mod_base = OTHER; note = 2'-O-methyluridine-3'-phosphate
  modified_base 7: mod_base = OTHER; note = 2'-fluorouridine-3'-phosphate
  modified_base 8: mod_base = OTHER; note = 2'-O-methyladenosine-3'-phosphate
  modified_base 9: mod_base = OTHER; note = 2'-fluoroadenosine-3'-phosphate
  modified_base 10: mod_base = OTHER; note = 2'-fluorouridine-3'-phosphate
  modified_base 11: mod_base = OTHER; note = 2'-fluoroadenosine-3'-phosphate
  modified_base 12: mod_base = OTHER; note = 2'-O-methyluridine-3'-phosphate
  modified_base 13: mod_base = OTHER; note = 2'-O-methylguanosine-3'-phosphate
  modified_base 14: mod_base = OTHER; note = 2'-O-methylguanosine-3'-phosphate
  modified_base 15: mod_base = OTHER; note = 2'-O-methyluridine-3'-phosphate
  modified_base 16: mod_base = OTHER; note = 2'-O-methylguanosine-3'-phosphate
  modified_base 17: mod_base = OTHER; note = 2'-O-methyladenosine-3'-phosphate
  modified_base 18: mod_base = OTHER; note = 2'-O-methylcytidine-3'-phosphate
  modified_base 19: mod_base = OTHER; note = 2'-O-methyluridine-3'-phosphorothioate
  modified_base 20: mod_base = OTHER; note = 2'-O-methyluridine-3'-phosphorothioate
  modified_base 21: mod_base = OTHER; note = 2'-O-methyluridine
ttttattaatatggtgacttt

SEQ ID NO: 2194 - RNA, 21 nt, synthetic construct
  source 1..21: mol_type = other RNA
  modified_base 1: mod_base = OTHER; note = 2'-O-methyladenosine-3'-phosphorothioate
  modified_base 2: mod_base = OTHER; note = 2'-fluoroadenosine-3'-phosphorothioate
  modified_base 3: mod_base = OTHER; note = 2'-O-methyladenosine-3'-phosphate
  modified_base 4: mod_base = OTHER; note = 2'-fluoroguanosine-3'-phosphate
  modified_base 5: mod_base = OTHER; note = 2'-O-methyluridine-3'-phosphate
  modified_base 6: mod_base = OTHER; note = 2'-O-methylcytidine-3'-phosphate
  modified_base 7: mod_base = OTHER; note = 2'-O-methyladenosine-3'-phosphate
  modified_base 8: mod_base = OTHER; note = 2'-O-methylcytidine-3'-phosphate
  modified_base 9: mod_base = OTHER; note = 2'-fluorocytidine-3'-phosphate
  modified_base 10: mod_base = OTHER; note = 2'-O-methyladenosine-3'-phosphate
  modified_base 11: mod_base = OTHER; note = 2'-O-methyluridine-3'-phosphate
  modified_base 12: mod_base = OTHER; note = 2'-O-methyladenosine-3'-phosphate
  modified_base 13: mod_base = OTHER; note = 2'-O-methyluridine-3'-phosphate
  modified_base 14: mod_base = OTHER; note = 2'-fluorouridine-3'-phosphate
  modified_base 15: mod_base = OTHER; note = 2'-O-methyladenosine-3'-phosphate
  modified_base 16: mod_base = OTHER; note = 2'-fluoroadenosine-3'-phosphate
  modified_base 17: mod_base = OTHER; note = 2'-O-methyluridine-3'-phosphate
  modified_base 18: mod_base = OTHER; note = 2'-O-methyladenosine-3'-phosphate
  modified_base 19: mod_base = OTHER; note = 2'-O-methyladenosine-3'-phosphorothioate
  modified_base 20: mod_base = OTHER; note = 2'-O-methyladenosine-3'-phosphorothioate
  modified_base 21: mod_base = OTHER; note = 2'-O-methyladenosine
aaagtcaccatattaataaaa

SEQ ID NO: 2195 - RNA, 24 nt, synthetic construct
  source 1..24: mol_type = other RNA
  modified_base 1: mod_base = OTHER; note (5-acetamido-2-(acetoxymethyl)-6-((5-((2S,6R)-2-((bis(4-met hoxyphenyl)(phenyl)methoxy)methyl)-2-((((2-cyanoethoxy)(dii sopropylamino)phosphaneyl)oxy)methyl)-6-(5-methyl-2,4-dioxo -3,4-dihydropyrimidin-1(2H)-yl)morpholino)pentyl)oxy)tetrah ydro-2H-pyran-3,4-diyldiacetate)-phosphate
  modified_base 2: mod_base = OTHER; note (5-acetamido-2-(acetoxymethyl)-6-((5-((2S,6R)-2-((bis(4-met hoxyphenyl)(phenyl)methoxy)methyl)-2-((((2-cyanoethoxy)(dii sopropylamino)phosphaneyl)oxy)methyl)-6-(5-methyl-2,4-dioxo -3,4-dihydropyrimidin-1(2H)-yl)morpholino)pentyl)oxy)tetrah ydro-2H-pyran-3,4-diyldiacetate)-phosphate
  modified_base 3: mod_base = OTHER; note (5-acetamido-2-(acetoxymethyl)-6-((5-((2S,6R)-2-((bis(4-met hoxyphenyl)(phenyl)methoxy)methyl)-2-((((2-cyanoethoxy)(dii sopropylamino)phosphaneyl)oxy)methyl)-6-(5-methyl-2,4-dioxo -3,4-dihydropyrimidin-1(2H)-yl)morpholino)pentyl)oxy)tetrah ydro-2H-pyran-3,4-diyldiacetate)-phosphate
  modified_base 4: mod_base = OTHER; note = 2'-O-methyluridine-3'-phosphate
  modified_base 5: mod_base = OTHER; note = 2'-O-methyluridine-3'-phosphate
  modified_base 6: mod_base = OTHER; note = 2'-O-methyladenosine-3'-phosphate
  modified_base 7: mod_base = OTHER; note = 2'-O-methyluridine-3'-phosphate
  modified_base 8: mod_base = OTHER; note = 2'-fluorouridine-3'-phosphate
  modified_base 9: mod_base = OTHER; note = 2'-O-methyladenosine-3'-phosphate
  modified_base 10: mod_base = OTHER; note = 2'-fluoroadenosine-3'-phosphate
  modified_base 11: mod_base = OTHER; note = 2'-fluorouridine-3'-phosphate
  modified_base 12: mod_base = OTHER; note = 2'-fluoroadenosine-3'-phosphate
  modified_base 13: mod_base = OTHER; note = 2'-O-methyluridine-3'-phosphate
  modified_base 14: mod_base = OTHER; note = 2'-O-methylguanosine-3'-phosphate
  modified_base 15: mod_base = OTHER; note = 2'-O-methylguanosine-3'-phosphate
  modified_base 16: mod_base = OTHER; note = 2'-O-methyluridine-3'-phosphate
  modified_base 17: mod_base = OTHER; note = 2'-O-methylguanosine-3'-phosphate
  modified_base 18: mod_base = OTHER; note = 2'-O-methyladenosine-3'-phosphate
  modified_base 19: mod_base = OTHER; note = 2'-O-methylcytidine-3'-phosphate
  modified_base 20: mod_base = OTHER; note = 2'-O-methyluridine-3'-phosphate
  modified_base 21: mod_base = OTHER; note = 2'-O-methyluridine-3'-phosphate
  modified_base 22: mod_base = OTHER; note = 2'-O-methyluridine-3'-phosphate
  modified_base 23: mod_base = OTHER; note ((2S,6R)-2-((bis(4-methoxyphenyl)(phenyl)methoxy)methyl)-4- cyclohexyl-6-(5-methyl-2,4-dioxo-3,4-dihydropyrimidin-1(2H) -yl)morpholin-2-yl)methyl (2-cyanoethyl) diisopropylphosphoramidite phosphate
  modified_base 24: mod_base = OTHER; note ((2S,6R)-2-((bis(4-methoxyphenyl)(phenyl)methoxy)methyl)-4- cyclohexyl-6-(5-methyl-2,4-dioxo-3,4-dihydropyrimidin-1(2H) -yl)morpholin-2-yl)methyl (2-cyanoethyl) diisopropylphosphoramidite
tttttattaatatggtgacttttt

SEQ ID NO: 2196 - RNA, 21 nt, synthetic construct
  source 1..21: mol_type = other RNA
  modified_base 1: mod_base = OTHER; note = 2'-O-methyladenosine-3'-phosphorothioate
  modified_base 2: mod_base = OTHER; note = 2'-fluoroadenosine-3'-phosphorothioate
  modified_base 3: mod_base = OTHER; note = 2'-O-methyladenosine-3'-phosphate
  modified_base 4: mod_base = OTHER; note = 2'-fluoroguanosine-3'-phosphate
  modified_base 5: mod_base = OTHER; note = 2'-O-methyluridine-3'-phosphate
  modified_base 6: mod_base = OTHER; note = 2'-O-methylcytidine-3'-phosphate
  modified_base 7: mod_base = OTHER; note = 2'-O-methyladenosine-3'-phosphate
  modified_base 8: mod_base = OTHER; note = 2'-fluorocytidine-3'-phosphate
  modified_base 9: mod_base = OTHER; note = 2'-fluorocytidine-3'-phosphate
  modified_base 10: mod_base = OTHER; note = 2'-O-methyladenosine-3'-phosphate
  modified_base 11: mod_base = OTHER; note = 2'-O-methyluridine-3'-phosphate
  modified_base 12: mod_base = OTHER; note = 2'-O-methyladenosine-3'-phosphate
  modified_base 13: mod_base = OTHER; note = 2'-O-methyluridine-3'-phosphate
  modified_base 14: mod_base = OTHER; note = 2'-fluorouridine-3'-phosphate
  modified_base 15: mod_base = OTHER; note = 2'-O-methyladenosine-3'-phosphate
  modified_base 16: mod_base = OTHER; note = 2'-fluoroadenosine-3'-phosphate
  modified_base 17: mod_base = OTHER; note = 2'-O-methyluridine-3'-phosphate
  modified_base 18: mod_base = OTHER; note = 2'-O-methyladenosine-3'-phosphate
  modified_base 19: mod_base = OTHER; note = 2'-O-methyladenosine-3'-phosphorothioate
  modified_base 20: mod_base = OTHER; note = Adenine locked nucleotide-3'-phosphorothioate
  modified_base 21: mod_base = OTHER; note = Adenine locked nucleotide
aaagtcaccatattaataaaa

SEQ ID NO: 2197 - RNA, 24 nt, synthetic construct
  source 1..24: mol_type = other RNA
  modified_base 1: mod_base = OTHER; note (5-acetamido-2-(acetoxymethyl)-6-((5-((2S,6R)-2-((bis(4-met hoxyphenyl)(phenyl)methoxy)methyl)-2-((((2-cyanoethoxy)(dii sopropylamino)phosphaneyl)oxy)methyl)-6-(5-methyl-2,4-dioxo -3,4-dihydropyrimidin-1(2H)-yl)morpholino)pentyl)oxy)tetrah ydro-2H-pyran-3,4-diyldiacetate)-phosphate
  modified_base 2: mod_base = OTHER; note (5-acetamido-2-(acetoxymethyl)-6-((5-((2S,6R)-2-((bis(4-met hoxyphenyl)(phenyl)methoxy)methyl)-2-((((2-cyanoethoxy)(dii sopropylamino)phosphaneyl)oxy)methyl)-6-(5-methyl-2,4-dioxo -3,4-dihydropyrimidin-1(2H)-yl)morpholino)pentyl)oxy)tetrah ydro-2H-pyran-3,4-diyldiacetate)-phosphate
  modified_base 3: mod_base = OTHER; note (5-acetamido-2-(acetoxymethyl)-6-((5-((2S,6R)-2-((bis(4-met hoxyphenyl)(phenyl)methoxy)methyl)-2-((((2-cyanoethoxy)(dii sopropylamino)phosphaneyl)oxy)methyl)-6-(5-methyl-2,4-dioxo -3,4-dihydropyrimidin-1(2H)-yl)morpholino)pentyl)oxy)tetrah ydro-2H-pyran-3,4-diyldiacetate)-phosphate
  modified_base 4: mod_base = OTHER; note = 2'-O-methyluridine-3'-phosphate
  modified_base 5: mod_base = OTHER; note = 2'-O-methyluridine-3'-phosphate
  modified_base 6: mod_base = OTHER; note = 2'-O-methyladenosine-3'-phosphate
  modified_base 7: mod_base = OTHER; note = 2'-O-methyluridine-3'-phosphate
  modified_base 8: mod_base = OTHER; note = 2'-fluorouridine-3'-phosphate
  modified_base 9: mod_base = OTHER; note = 2'-O-methyladenosine-3'-phosphate
  modified_base 10: mod_base = OTHER; note = 2'-fluoroadenosine-3'-phosphate
  modified_base 11: mod_base = OTHER; note = 2'-fluorouridine-3'-phosphate
  modified_base 12: mod_base = OTHER; note = 2'-fluoroadenosine-3'-phosphate
  modified_base 13: mod_base = OTHER; note = 2'-O-methyluridine-3'-phosphate
  modified_base 14: mod_base = OTHER; note = 2'-O-methylguanosine-3'-phosphate
  modified_base 15: mod_base = OTHER; note = 2'-O-methylguanosine-3'-phosphate
  modified_base 16: mod_base = OTHER; note = 2'-O-methyluridine-3'-phosphate
  modified_base 17: mod_base = OTHER; note = 2'-O-methylguanosine-3'-phosphate
  modified_base 18: mod_base = OTHER; note = 2'-O-methyladenosine-3'-phosphate
  modified_base 19: mod_base = OTHER; note = 2'-O-methylcytidine-3'-phosphate
  modified_base 20: mod_base = OTHER; note = 2'-O-methyluridine-3'-phosphate
  modified_base 21: mod_base = OTHER; note = 2'-O-methyluridine-3'-phosphate
  modified_base 22: mod_base = OTHER; note = 2'-O-methyluridine-3'-phosphate
  modified_base 23: mod_base = OTHER; note ((2S,6R)-2-((bis(4-methoxyphenyl)(phenyl)methoxy)methyl)-4- cyclohexyl-6-(5-methyl-2,4-dioxo-3,4-dihydropyrimidin-1(2H) -yl)morpholin-2-yl)methyl (2-cyanoethyl) diisopropylphosphoramidite phosphate
  modified_base 24: mod_base = OTHER; note ((2S,6R)-2-((bis(4-methoxyphenyl)(phenyl)methoxy)methyl)-4- cyclohexyl-6-(5-methyl-2,4-dioxo-3,4-dihydropyrimidin-1(2H) -yl)morpholin-2-yl)methyl (2-cyanoethyl) diisopropylphosphoramidite
tttttattaatatggtgacttttt

SEQ ID NO: 2198 - RNA, 21 nt, synthetic construct
  source 1..21: mol_type = other RNA
  modified_base 1: mod_base = OTHER; note = 2'-O-methyladenosine-3'-phosphorothioate
  modified_base 2: mod_base = OTHER; note = 2'-fluoroadenosine-3'-phosphorothioate
  modified_base 3: mod_base = OTHER; note = 2'-O-methyladenosine-3'-phosphate
  modified_base 4: mod_base = OTHER; note = 2'-fluoroguanosine-3'-phosphate
  modified_base 5: mod_base = OTHER; note = 2'-O-methyluridine-3'-phosphate
  modified_base 6: mod_base = OTHER; note = 2'-O-methylcytidine-3'-phosphate
  modified_base 7: mod_base = OTHER; note = 2'-O-methyladenosine-3'-phosphate
  modified_base 8: mod_base = OTHER; note = 2'-O-methylcytidine-3'-phosphate
  modified_base 9: mod_base = OTHER; note = 2'-fluorocytidine-3'-phosphate
  modified_base 10: mod_base = OTHER; note = 2'-O-methyladenosine-3'-phosphate
  modified_base 11: mod_base = OTHER; note = 2'-O-methyluridine-3'-phosphate
  modified_base 12: mod_base = OTHER; note = 2'-O-methyladenosine-3'-phosphate
  modified_base 13: mod_base = OTHER; note = 2'-O-methyluridine-3'-phosphate
  modified_base 14: mod_base = OTHER; note = 2'-fluorouridine-3'-phosphate
  modified_base 15: mod_base = OTHER; note = 2'-O-methyladenosine-3'-phosphate
  modified_base 16: mod_base = OTHER; note = 2'-fluoroadenosine-3'-phosphate
  modified_base 17: mod_base = OTHER; note = 2'-O-methyluridine-3'-phosphate
  modified_base 18: mod_base = OTHER; note = 2'-O-methyladenosine-3'-phosphate
  modified_base 19: mod_base = OTHER; note = 2'-O-methyladenosine-3'-phosphorothioate
  modified_base 20: mod_base = OTHER; note = Adenine locked nucleotide-3'-phosphorothioate
  modified_base 21: mod_base = OTHER; note = Adenine locked nucleotide
aaagtcaccatattaataaaa

SEQ ID NO: 2199 - RNA, 21 nt, synthetic construct
  source 1..21: mol_type = other RNA
  modified_base 1: mod_base = OTHER; note = 2'-O-methyladenosine-3'-phosphorothioate
  modified_base 2: mod_base = OTHER; note = 2'-O-methylguanosine-3'-phosphorothioate
  modified_base 3: mod_base = OTHER; note = 2'-O-methyladenosine-3'-phosphate
  modified_base 4: mod_base = OTHER; note = 2'-O-methyladenosine-3'-phosphate
  modified_base 5: mod_base = OTHER; note = 2'-O-methyluridine-3'-phosphate
  modified_base 6: mod_base = OTHER; note = 2'-O-methylguanosine-3'-phosphate
  modified_base 7: mod_base = OTHER; note = 2'-fluoroadenosine-3'-phosphate
  modified_base 8: mod_base = OTHER; note = 2'-O-methylcytidine-3'-phosphate
  modified_base 9: mod_base = OTHER; note = 2'-fluorouridine-3'-phosphate
  modified_base 10: mod_base = OTHER; note = 2'-O-methyluridine-3'-phosphate
  modified_base 11: mod_base = OTHER; note = 2'-O-methyluridine-3'-phosphate
  modified_base 12: mod_base = OTHER; note = 2'-O-methyluridine-3'-phosphate
  modified_base 13: mod_base = OTHER; note = 2'-O-methyladenosine-3'-phosphate
  modified_base 14: mod_base = OTHER; note = 2'-O-methyluridine-3'-phosphate
  modified_base 15: mod_base = OTHER; note = 2'-O-methyluridine-3'-phosphate
  modified_base 16: mod_base = OTHER; note = 2'-O-methylguanosine-3'-phosphate
  modified_base 17: mod_base = OTHER; note = 2'-O-methyladenosine-3'-phosphate
  modified_base 18: mod_base = OTHER; note = 2'-O-methylguanosine-3'-phosphate
  modified_base 19: mod_base = OTHER; note = 2'-O-methylcytidine-3'-phosphate
  modified_base 20: mod_base = OTHER; note = 2'-O-methyluridine-3'-phosphate
  modified_base 21: mod_base = OTHER; note = 2'-O-methylcytidine
agaatgacttttattgagctc

SEQ ID NO: 2200 - RNA, 21 nt, synthetic construct
  source 1..21: mol_type = other RNA
  modified_base 1: mod_base = OTHER; note = 2'-O-methyladenosine-3'-phosphorothioate
  modified_base 2: mod_base = OTHER; note = 2'-fluoroadenosine-3'-phosphorothioate
  modified_base 3: mod_base = OTHER; note = 2'-O-methylguanosine-3'-phosphate
  modified_base 4: mod_base = OTHER; note = 2'-fluoroadenosine-3'-phosphate
  modified_base 5: mod_base = OTHER; note = 2'-fluoroguanosine-3'-phosphate
  modified_base 6: mod_base = OTHER; note = 2'-fluorocytidine-3'-phosphate
  modified_base 7: mod_base = OTHER; note = 2'-O-methyluridine-3'-phosphate
  modified_base 8: mod_base = OTHER; note = 2'-fluorocytidine-3'-phosphate
  modified_base 9: mod_base = OTHER; note = 2'-O-methyladenosine-3'-phosphate
  modified_base 10: mod_base = OTHER; note = 2'-fluoroadenosine-3'-phosphate
  modified_base 11: mod_base = OTHER; note = 2'-O-methyluridine-3'-phosphate
  modified_base 12: mod_base = OTHER; note = 2'-fluoroadenosine-3'-phosphate
  modified_base 13: mod_base = OTHER; note = 2'-O-methyladenosine-3'-phosphate
  modified_base 14: mod_base = OTHER; note = 2'-fluoroadenosine-3'-phosphate
  modified_base 15: mod_base = OTHER; note = 2'-O-methyladenosine-3'-phosphate
  modified_base 16: mod_base = OTHER; note = 2'-fluoroguanosine-3'-phosphate
  modified_base 17: mod_base = OTHER; note = 2'-O-methyluridine-3'-phosphate
  modified_base 18: mod_base = OTHER; note = 2'-fluorocytidine-3'-phosphate
  modified_base 19: mod_base = OTHER; note = 2'-O-methyladenosine-3'-phosphorothioate
  modified_base 20: mod_base = OTHER; note = 2'-O-methyluridine-3'-phosphorothioate
  modified_base 21: mod_base = OTHER; note = 2'-O-methyluridine
aagagctcaataaaagtcatt

SEQ ID NO: 2201 - RNA, 21 nt, synthetic construct
  source 1..21: mol_type = other RNA
  modified_base 1: mod_base = OTHER; note = 2'-O-methyladenosine-3'-phosphorothioate
  modified_base 2: mod_base = OTHER; note = 2'-O-methyluridine-3'-phosphorothioate
  modified_base 3: mod_base = OTHER; note = 2'-O-methyluridine-3'-phosphate
  modified_base 4: mod_base = OTHER; note = 2'-O-methyluridine-3'-phosphate
  modified_base 5: mod_base = OTHER; note = 2'-O-methylcytidine-3'-phosphate
  modified_base 6: mod_base = OTHER; note = 2'-O-methyladenosine-3'-phosphate
  modified_base 7: mod_base = OTHER; note = 2'-fluorocytidine-3'-phosphate
  modified_base 8: mod_base = OTHER; note = 2'-O-methylcytidine-3'-phosphate
  modified_base 9: mod_base = OTHER; note = 2'-fluoroadenosine-3'-phosphate
  modified_base 10: mod_base = OTHER; note = 2'-O-methyluridine-3'-phosphate
  modified_base 11: mod_base = OTHER; note = 2'-O-methyluridine-3'-phosphate
  modified_base 12: mod_base = OTHER; note = 2'-O-methylcytidine-3'-phosphate
  modified_base 13: mod_base = OTHER; note = 2'-O-methyladenosine-3'-phosphate
  modified_base 14: mod_base = OTHER; note = 2'-O-methyladenosine-3'-phosphate
  modified_base 15: mod_base = OTHER; note = 2'-O-methyladenosine-3'-phosphate
  modified_base 16: mod_base = OTHER; note = 2'-O-methylcytidine-3'-phosphate
  modified_base 17: mod_base = OTHER; note = 2'-O-methyladenosine-3'-phosphate
  modified_base 18: mod_base = OTHER; note = 2'-O-methylguanosine-3'-phosphate
  modified_base 19: mod_base = OTHER; note = 2'-O-methylguanosine-3'-phosphate
  modified_base 20: mod_base = OTHER; note = 2'-O-methyluridine-3'-phosphate
  modified_base 21: mod_base = OTHER; note = 2'-O-methylcytidine
atttcaccattcaaacaggtc

SEQ ID NO: 2202 - RNA, 21 nt, synthetic construct
  source 1..21: mol_type = other RNA
  modified_base 1: mod_base = OTHER; note = 2'-O-methyluridine-3'-phosphorothioate
  modified_base 2: mod_base = OTHER; note = 2'-fluorocytidine-3'-phosphorothioate
  modified_base 3: mod_base = OTHER; note = 2'-O-methylguanosine-3'-phosphate
  modified_base 4: mod_base = OTHER; note = 2'-fluoroadenosine-3'-phosphate
  modified_base 5: mod_base = OTHER; note = 2'-fluorocytidine-3'-phosphate
  modified_base 6: mod_base = OTHER; note = 2'-fluorocytidine-3'-phosphate
  modified_base 7: mod_base = OTHER; note = 2'-O-methyluridine-3'-phosphate
  modified_base 8: mod_base = OTHER; note = 2'-fluoroguanosine-3'-phosphate
  modified_base 9: mod_base = OTHER; note = 2'-O-methyluridine-3'-phosphate
  modified_base 10: mod_base = OTHER; note = 2'-fluorouridine-3'-phosphate
  modified_base 11: mod_base = OTHER; note = 2'-O-methyluridine-3'-phosphate
  modified_base 12: mod_base = OTHER; note = 2'-fluoroguanosine-3'-phosphate
  modified_base 13: mod_base = OTHER; note = 2'-O-methyladenosine-3'-phosphate
  modified_base 14: mod_base = OTHER; note = 2'-fluoroadenosine-3'-phosphate
  modified_base 15: mod_base = OTHER; note = 2'-O-methyluridine-3'-phosphate
  modified_base 16: mod_base = OTHER; note = 2'-fluoroguanosine-3'-phosphate
  modified_base 17: mod_base = OTHER; note = 2'-O-methylguanosine-3'-phosphate
  modified_base 18: mod_base = OTHER; note = 2'-fluorouridine-3'-phosphate
  modified_base 19: mod_base = OTHER; note = 2'-O-methylguanosine-3'-phosphorothioate
  modified_base 20: mod_base = OTHER; note = 2'-O-methyladenosine-3'-phosphorothioate
  modified_base 21: mod_base = OTHER; note = 2'-O-methyladenosine
tcgacctgtttgaatggtgaa

SEQ ID NO: 2203 - RNA, 21 nt, synthetic construct
  source 1..21: mol_type = other RNA
  modified_base 1: mod_base = OTHER; note = 2'-O-methylcytidine-3'-phosphorothioate
  modified_base 2: mod_base = OTHER; note = 2'-O-methylguanosine-3'-phosphorothioate
  modified_base 3: mod_base = OTHER; note = 2'-O-methyladenosine-3'-phosphate
  modified_base 4: mod_base = OTHER; note = 2'-O-methyluridine-3'-phosphate
  modified_base 5: mod_base = OTHER; note = 2'-O-methylguanosine-3'-phosphate
  modified_base 6: mod_base = OTHER; note = 2'-O-methyluridine-3'-phosphate
  modified_base 7: mod_base = OTHER; note = 2'-fluorocytidine-3'-phosphate
  modified_base 8: mod_base = OTHER; note = 2'-O-methylcytidine-3'-phosphate
  modified_base 9: mod_base = OTHER; note = 2'-fluoroguanosine-3'-phosphate
  modified_base 10: mod_base = OTHER; note = 2'-O-methyluridine-3'-phosphate
  modified_base 11: mod_base = OTHER; note = 2'-O-methylguanosine-3'-phosphate
  modified_base 12: mod_base = OTHER; note = 2'-O-methylguanosine-3'-phosphate
  modified_base 13: mod_base = OTHER; note = 2'-O-methylguanosine-3'-phosphate
  modified_base 14: mod_base = OTHER; note = 2'-O-methylcytidine-3'-phosphate
  modified_base 15: mod_base = OTHER; note = 2'-O-methyladenosine-3'-phosphate
  modified_base 16: mod_base = OTHER; note = 2'-O-methylguanosine-3'-phosphate
  modified_base 17: mod_base = OTHER; note = 2'-O-methyladenosine-3'-phosphate
  modified_base 18: mod_base = OTHER; note = 2'-O-methyladenosine-3'-phosphate
  modified_base 19: mod_base = OTHER; note = 2'-O-methyluridine-3'-phosphate
  modified_base 20: mod_base = OTHER; note = 2'-O-methylguanosine-3'-phosphate
  modified_base 21: mod_base = OTHER; note = 2'-O-methyladenosine
cgatgtccgtgggcagaatga

SEQ ID NO: 2204 - RNA, 21 nt, synthetic construct
  source 1..21: mol_type = other RNA
  modified_base 1: mod_base = OTHER; note = 2'-O-methyladenosine-3'-phosphorothioate
  modified_base 2: mod_base = OTHER; note = 2'-fluoroguanosine-3'-phosphorothioate
  modified_base 3: mod_base = OTHER; note = 2'-O-methyluridine-3'-phosphate
  modified_base 4: mod_base = OTHER; note = 2'-fluorocytidine-3'-phosphate
  modified_base 5: mod_base = OTHER; note = 2'-fluoroadenosine-3'-phosphate
  modified_base 6: mod_base = OTHER; note = 2'-fluorouridine-3'-phosphate
  modified_base 7: mod_base = OTHER; note = 2'-O-methyluridine-3'-phosphate
  modified_base 8: mod_base = OTHER; note = 2'-fluorocytidine-3'-phosphate
  modified_base 9: mod_base = OTHER; note = 2'-O-methyluridine-3'-phosphate
  modified_base 10: mod_base = OTHER; note = 2'-fluoroguanosine-3'-phosphate
  modified_base 11: mod_base = OTHER; note = 2'-O-methylcytidine-3'-phosphate
  modified_base 12: mod_base = OTHER; note = 2'-fluorocytidine-3'-phosphate
  modified_base 13: mod_base = OTHER; note = 2'-O-methylcytidine-3'-phosphate
  modified_base 14: mod_base = OTHER; note = 2'-fluoroadenosine-3'-phosphate
  modified_base 15: mod_base = OTHER; note = 2'-O-methylcytidine-3'-phosphate
  modified_base 16: mod_base = OTHER; note = 2'-fluoroguanosine-3'-phosphate
  modified_base 17: mod_base = OTHER; note = 2'-O-methylguanosine-3'-phosphate
  modified_base 18: mod_base = OTHER; note = 2'-fluoroadenosine-3'-phosphate
  modified_base 19: mod_base = OTHER; note = 2'-O-methylcytidine-3'-phosphorothioate
  modified_base 20: mod_base = OTHER; note = 2'-O-methyladenosine-3'-phosphorothioate
  modified_base 21: mod_base = OTHER; note = 2'-O-methyluridine
agtcattctgcccacggacat

SEQ ID NO: 2205 - RNA, 21 nt, synthetic construct
  source 1..21: mol_type = other RNA
  modified_base 1: mod_base = OTHER; note = 2'-O-methyluridine-3'-phosphorothioate
  modified_base 2: mod_base = OTHER; note = 2'-O-methyluridine-3'-phosphorothioate
  modified_base 3: mod_base = OTHER; note = 2'-O-methyladenosine-3'-phosphate
  modified_base 4: mod_base = OTHER; note = 2'-O-methyluridine-3'-phosphate
  modified_base 5: mod_base = OTHER; note = 2'-O-methyluridine-3'-phosphate
  modified_base 6: mod_base = OTHER; note = 2'-O-methylguanosine-3'-phosphate
  modified_base 7: mod_base = OTHER; note = 2'-fluoroadenosine-3'-phosphate
  modified_base 8: mod_base = OTHER; note = 2'-O-methylguanosine-3'-phosphate
  modified_base 9: mod_base = OTHER; note = 2'-fluorocytidine-3'-phosphate
  modified_base 10: mod_base = OTHER; note = 2'-O-methyluridine-3'-phosphate
  modified_base 11: mod_base = OTHER; note = 2'-O-methylcytidine-3'-phosphate
  modified_base 12: mod_base = OTHER; note = 2'-O-methyluridine-3'-phosphate
  modified_base 13: mod_base = OTHER; note = 2'-O-methyluridine-3'-phosphate
  modified_base 14: mod_base = OTHER; note = 2'-O-methylguanosine-3'-phosphate
  modified_base 15: mod_base = OTHER; note = 2'-O-methyluridine-3'-phosphate
  modified_base 16: mod_base = OTHER; note = 2'-O-methyluridine-3'-phosphate
  modified_base 17: mod_base = OTHER; note = 2'-O-methylcytidine-3'-phosphate
  modified_base 18: mod_base = OTHER; note = 2'-O-methylcytidine-3'-phosphate
  modified_base 19: mod_base = OTHER; note = 2'-O-methylguanosine-3'-phosphate
  modified_base 20: mod_base = OTHER; note = 2'-O-methyluridine-3'-phosphate
  modified_base 21: mod_base = OTHER; note = 2'-O-methylguanosine
ttattgagctcttgttccgtg

SEQ ID NO: 2206 - RNA, 21 nt, synthetic construct
  source 1..21: mol_type = other RNA
  modified_base 1: mod_base = OTHER; note = 2'-O-methylguanosine-3'-phosphorothioate
  modified_base 2: mod_base = OTHER; note = 2'-fluoroguanosine-3'-phosphorothioate
  modified_base 3: mod_base = OTHER; note = 2'-O-methylcytidine-3'-phosphate
  modified_base 4: mod_base = OTHER; note = 2'-fluoroadenosine-3'-phosphate
  modified_base 5: mod_base = OTHER; note = 2'-fluorocytidine-3'-phosphate
  modified_base 6: mod_base = OTHER; note = 2'-fluoroguanosine-3'-phosphate
  modified_base 7: mod_base = OTHER; note = 2'-O-methylguanosine-3'-phosphate
  modified_base 8: mod_base = OTHER; note = 2'-fluoroadenosine-3'-phosphate
  modified_base 9: mod_base = OTHER; note = 2'-O-methyladenosine-3'-phosphate
  modified_base 10: mod_base = OTHER; note = 2'-fluorocytidine-3'-phosphate
  modified_base 11: mod_base = OTHER; note = 2'-O-methyladenosine-3'-phosphate
  modified_base 12: mod_base = OTHER; note = 2'-fluoroadenosine-3'-phosphate
  modified_base 13: mod_base = OTHER; note = 2'-O-methylguanosine-3'-phosphate
  modified_base 14: mod_base = OTHER; note = 2'-fluoroadenosine-3'-phosphate
  modified_base 15: mod_base = OTHER; note = 2'-O-methylguanosine-3'-phosphate
  modified_base 16: mod_base = OTHER; note = 2'-fluorocytidine-3'-phosphate
  modified_base 17: mod_base = OTHER; note = 2'-O-methyluridine-3'-phosphate
  modified_base 18: mod_base = OTHER; note = 2'-fluorocytidine-3'-phosphate
  modified_base 19: mod_base = OTHER; note = 2'-O-methyladenosine-3'-phosphorothioate
  modified_base 20: mod_base = OTHER; note = 2'-O-methyladenosine-3'-phosphorothioate
  modified_base 21: mod_base = OTHER; note = 2'-O-methyluridine
ggcacggaacaagagctcaat

SEQ ID NO: 2207 - RNA, 21 nt, synthetic construct
  source 1..21: mol_type = other RNA
  modified_base 1: mod_base = OTHER; note = 2'-O-methylguanosine-3'-phosphorothioate
  modified_base 2: mod_base = OTHER; note = 2'-O-methylcytidine-3'-phosphorothioate
  modified_base 3: mod_base = OTHER; note = 2'-O-methyluridine-3'-phosphate
  modified_base 4: mod_base = OTHER; note = 2'-O-methylcytidine-3'-phosphate
  modified_base 5: mod_base = OTHER; note = 2'-O-methylcytidine-3'-phosphate
  modified_base 6: mod_base = OTHER; note = 2'-O-methylcytidine-3'-phosphate
  modified_base 7: mod_base = OTHER; note = 2'-fluoroadenosine-3'-phosphate
  modified_base 8: mod_base = OTHER; note = 2'-O-methyladenosine-3'-phosphate
  modified_base 9: mod_base = OTHER; note = 2'-fluorouridine-3'-phosphate
  modified_base 10: mod_base = OTHER; note = 2'-O-methylguanosine-3'-phosphate
  modified_base 11: mod_base = OTHER; note = 2'-O-methyluridine-3'-phosphate
  modified_base 12: mod_base = OTHER; note = 2'-O-methylguanosine-3'-phosphate
  modified_base 13: mod_base = OTHER; note = 2'-O-methylcytidine-3'-phosphate
  modified_base 14: mod_base = OTHER; note = 2'-O-methylcytidine-3'-phosphate
  modified_base 15: mod_base = OTHER; note = 2'-O-methylguanosine-3'-phosphate
  modified_base 16: mod_base = OTHER; note = 2'-O-methyladenosine-3'-phosphate
  modified_base 17: mod_base = OTHER; note = 2'-O-methyluridine-3'-phosphate
  modified_base 18: mod_base = OTHER; note = 2'-O-methylguanosine-3'-phosphate
  modified_base 19: mod_base = OTHER; note = 2'-O-methyluridine-3'-phosphate
  modified_base 20: mod_base = OTHER; note = 2'-O-methylcytidine-3'-phosphate
  modified_base 21: mod_base = OTHER; note = 2'-O-methylcytidine
gctcccaatgtgccgatgtcc

SEQ ID NO: 2208 - RNA, 21 nt, synthetic construct
  source 1..21: mol_type = other RNA
  modified_base 1: mod_base = OTHER; note = 2'-O-methyladenosine-3'-phosphorothioate
  modified_base 2: mod_base = OTHER; note = 2'-fluorocytidine-3'-phosphorothioate
  modified_base 3: mod_base = OTHER; note = 2'-O-methylguanosine-3'-phosphate
  modified_base 4: mod_base = OTHER; note = 2'-fluoroguanosine-3'-phosphate
  modified_base 5: mod_base = OTHER; note = 2'-fluoroadenosine-3'-phosphate
  modified_base 6: mod_base = OTHER; note = 2'-fluorocytidine-3'-phosphate
  modified_base 7: mod_base = OTHER; note = 2'-O-methyladenosine-3'-phosphate
  modified_base 8: mod_base = OTHER; note = 2'-fluorouridine-3'-phosphate
  modified_base 9: mod_base = OTHER; note = 2'-O-methylcytidine-3'-phosphate
  modified_base 10: mod_base = OTHER; note = 2'-fluoroguanosine-3'-phosphate
  modified_base 11: mod_base = OTHER; note = 2'-O-methylguanosine-3'-phosphate
  modified_base 12: mod_base = OTHER; note = 2'-fluorocytidine-3'-phosphate
  modified_base 13: mod_base = OTHER; note = 2'-O-methyladenosine-3'-phosphate
  modified_base 14: mod_base = OTHER; note = 2'-fluorocytidine-3'-phosphate
  modified_base 15: mod_base = OTHER; note = 2'-O-methyladenosine-3'-phosphate
  modified_base 16: mod_base = OTHER; note = 2'-fluorouridine-3'-phosphate
  modified_base 17: mod_base = OTHER; note = 2'-O-methyluridine-3'-phosphate
  modified_base 18: mod_base = OTHER; note = 2'-fluoroguanosine-3'-phosphate
  modified_base 19: mod_base = OTHER; note = 2'-O-methylguanosine-3'-phosphorothioate
  modified_base 20: mod_base = OTHER; note = 2'-O-methylguanosine-3'-phosphorothioate
  modified_base 21: mod_base = OTHER; note = 2'-O-methyladenosine
acggacatcggcacattggga

SEQ ID NO: 2209 - RNA, 21 nt, synthetic construct
  source 1..21: mol_type = other RNA
  modified_base 1: mod_base = OTHER; note = 2'-O-methyluridine-3'-phosphorothioate
  modified_base 2: mod_base = OTHER; note = 2'-O-methylguanosine-3'-phosphorothioate
  modified_base 3: mod_base = OTHER; note = 2'-O-methylcytidine-3'-phosphate
  modified_base 4: mod_base = OTHER; note = 2'-O-methylcytidine-3'-phosphate
  modified_base 5: mod_base = OTHER; note = 2'-O-methylguanosine-3'-phosphate
  modified_base 6: mod_base = OTHER; note = 2'-O-methyladenosine-3'-phosphate
  modified_base 7: mod_base = OTHER; note = 2'-fluorouridine-3'-phosphate
  modified_base 8: mod_base = OTHER; note = 2'-O-methylguanosine-3'-phosphate
  modified_base 9: mod_base = OTHER; note = 2'-fluorouridine-3'-phosphate
  modified_base 10: mod_base = OTHER; note = 2'-O-methylcytidine-3'-phosphate
  modified_base 11: mod_base = OTHER; note = 2'-O-methylcytidine-3'-phosphate
  modified_base 12: mod_base = OTHER; note = 2'-O-methylguanosine-3'-phosphate
  modified_base 13: mod_base = OTHER; note = 2'-O-methyluridine-3'-phosphate
  modified_base 14: mod_base = OTHER; note = 2'-O-methylguanosine-3'-phosphate
  modified_base 15: mod_base = OTHER; note = 2'-O-methylguanosine-3'-phosphate
  modified_base 16: mod_base = OTHER; note = 2'-O-methylguanosine-3'-phosphate
  modified_base 17: mod_base = OTHER; note = 2'-O-methylcytidine-3'-phosphate
  modified_base 18: mod_base = OTHER; note = 2'-O-methyladenosine-3'-phosphate
  modified_base 19: mod_base = OTHER; note = 2'-O-methylguanosine-3'-phosphate
  modified_base 20: mod_base = OTHER; note = 2'-O-methyladenosine-3'-phosphate
  modified_base 21: mod_base = OTHER; note = 2'-O-methyladenosine
tgccgatgtccgtgggcagaa

SEQ ID NO: 2210 - RNA, 21 nt, synthetic construct
  source 1..21: mol_type = other RNA
  modified_base 1: mod_base = OTHER; note = 2'-O-methylcytidine-3'-phosphorothioate
  modified_base 2: mod_base = OTHER; note = 2'-fluoroadenosine-3'-phosphorothioate
  modified_base 3: mod_base = OTHER; note = 2'-O-methyluridine-3'-phosphate
  modified_base 4: mod_base = OTHER; note = 2'-fluorouridine-3'-phosphate
  modified_base 5: mod_base = OTHER; note = 2'-fluorocytidine-3'-phosphate
  modified_base 6: mod_base = OTHER; note = 2'-fluorouridine-3'-phosphate
  modified_base 7: mod_base = OTHER; note = 2'-O-methylguanosine-3'-phosphate
  modified_base 8: mod_base = OTHER; note = 2'-fluorocytidine-3'-phosphate
  modified_base 9: mod_base = OTHER; note = 2'-O-methylcytidine-3'-phosphate
  modified_base 10: mod_base = OTHER; note = 2'-fluorocytidine-3'-phosphate
  modified_base 11: mod_base = OTHER; note = 2'-O-methyladenosine-3'-phosphate
  modified_base 12: mod_base = OTHER; note = 2'-fluorocytidine-3'-phosphate
  modified_base 13: mod_base = OTHER; note = 2'-O-methylguanosine-3'-phosphate
  modified_base 14: mod_base = OTHER; note = 2'-fluoroguanosine-3'-phosphate
  modified_base 15: mod_base = OTHER; note = 2'-O-methyladenosine-3'-phosphate
  modified_base 16: mod_base = OTHER; note = 2'-fluorocytidine-3'-phosphate
  modified_base 17: mod_base = OTHER; note = 2'-O-methyladenosine-3'-phosphate
  modified_base 18: mod_base = OTHER; note = 2'-fluorouridine-3'-phosphate
  modified_base 19: mod_base = OTHER; note = 2'-O-methylcytidine-3'-phosphorothioate
  modified_base 20: mod_base = OTHER; note = 2'-O-methylguanosine-3'-phosphorothioate
  modified_base 21: mod_base = OTHER; note = 2'-O-methylguanosine
cattctgcccacggacatcgg

SEQ ID NO: 2211 - RNA, 21 nt, synthetic construct
  source 1..21: mol_type = other RNA
  modified_base 1: mod_base = OTHER; note = 2'-O-methylcytidine-3'-phosphorothioate
  modified_base 2: mod_base = OTHER; note = 2'-O-methyladenosine-3'-phosphorothioate
  modified_base 3: mod_base = OTHER; note = 2'-O-methylcytidine-3'-phosphate
  modified_base 4: mod_base = OTHER; note = 2'-O-methylcytidine-3'-phosphate
  modified_base 5: mod_base = OTHER; note = 2'-O-methyladenosine-3'-phosphate
  modified_base 6: mod_base = OTHER; note = 2'-O-methyluridine-3'-phosphate
  modified_base 7: mod_base = OTHER; note = 2'-fluorouridine-3'-phosphate
  modified_base 8: mod_base = OTHER; note = 2'-O-methylcytidine-3'-phosphate
  modified_base 9: mod_base = OTHER; note = 2'-fluoroadenosine-3'-phosphate
  modified_base 10: mod_base = OTHER; note = 2'-O-methyladenosine-3'-phosphate
  modified_base 11: mod_base = OTHER; note = 2'-O-methyladenosine-3'-phosphate
  modified_base 12: mod_base = OTHER; note = 2'-O-methylcytidine-3'-phosphate
  modified_base 13: mod_base = OTHER; note = 2'-O-methyladenosine-3'-phosphate
  modified_base 14: mod_base = OTHER; note = 2'-O-methylguanosine-3'-phosphate
  modified_base 15: mod_base = OTHER; note = 2'-O-methylguanosine-3'-phosphate
  modified_base 16: mod_base = OTHER; note = 2'-O-methyluridine-3'-phosphate
  modified_base 17: mod_base = OTHER; note = 2'-O-methylcytidine-3'-phosphate
  modified_base 18: mod_base = OTHER; note = 2'-O-methylguanosine-3'-phosphate
  modified_base 19: mod_base = OTHER; note = 2'-O-methyladenosine-3'-phosphate
  modified_base 20: mod_base = OTHER; note = 2'-O-methylguanosine-3'-phosphate
  modified_base 21: mod_base = OTHER; note = 2'-O-methylcytidine
caccattcaaacaggtcgagc

SEQ ID NO: 2212 - RNA, 21 nt, synthetic construct
  source 1..21: mol_type = other RNA
  modified_base 1: mod_base = OTHER; note = 2'-O-methylcytidine-3'-phosphorothioate
  modified_base 2: mod_base = OTHER; note = 2'-fluoroadenosine-3'-phosphorothioate
  modified_base 3: mod_base = OTHER; note = 2'-O-methylguanosine-3'-phosphate
  modified_base 4: mod_base = OTHER; note = 2'-fluorocytidine-3'-phosphate
  modified_base 5: mod_base = OTHER; note = 2'-fluorouridine-3'-phosphate
  modified_base 6: mod_base = OTHER; note = 2'-fluorocytidine-3'-phosphate
  modified_base 7: mod_base = OTHER; note = 2'-O-methylguanosine-3'-phosphate
  modified_base 8: mod_base = OTHER; note = 2'-fluoroadenosine-3'-phosphate
  modified_base 9: mod_base = OTHER; note = 2'-O-methylcytidine-3'-phosphate
  modified_base 10: mod_base = OTHER; note = 2'-fluorocytidine-3'-phosphate
  modified_base 11: mod_base = OTHER; note = 2'-O-methyluridine-3'-phosphate
  modified_base 12: mod_base = OTHER; note = 2'-fluoroguanosine-3'-phosphate
  modified_base 13: mod_base = OTHER; note = 2'-O-methyluridine-3'-phosphate
  modified_base 14: mod_base = OTHER; note = 2'-fluorouridine-3'-phosphate
  modified_base 15: mod_base = OTHER; note = 2'-O-methyluridine-3'-phosphate
  modified_base 16: mod_base = OTHER; note = 2'-fluoroguanosine-3'-phosphate
  modified_base 17: mod_base = OTHER; note = 2'-O-methyladenosine-3'-phosphate
  modified_base 18: mod_base = OTHER; note = 2'-fluoroadenosine-3'-phosphate
  modified_base 19: mod_base = OTHER; note = 2'-O-methyluridine-3'-phosphorothioate
  modified_base 20: mod_base = OTHER; note = 2'-O-methylguanosine-3'-phosphorothioate
  modified_base 21: mod_base = OTHER; note = 2'-O-methylguanosine
cagctcgacctgtttgaatgg

SEQ ID NO: 2213 - RNA, 21 nt, synthetic construct
  source 1..21: mol_type = other RNA
  modified_base 1: mod_base = OTHER; note = 2'-O-methylcytidine-3'-phosphorothioate
  modified_base 2: mod_base = OTHER; note = 2'-O-methylcytidine-3'-phosphorothioate
  modified_base 3: mod_base = OTHER; note = 2'-O-methyladenosine-3'-phosphate
  modified_base 4: mod_base = OTHER; note = 2'-O-methyladenosine-3'-phosphate
  modified_base 5: mod_base = OTHER; note = 2'-O-methyluridine-3'-phosphate
  modified_base 6: mod_base = OTHER; note = 2'-O-methylguanosine-3'-phosphate
  modified_base 7: mod_base = OTHER; note = 2'-fluorouridine-3'-phosphate
  modified_base 8: mod_base = OTHER; note = 2'-O-methylguanosine-3'-phosphate
  modified_base 9: mod_base = OTHER; note = 2'-fluorocytidine-3'-phosphate
  modified_base 10: mod_base = OTHER; note = 2'-O-methylcytidine-3'-phosphate
  modified_base 11: mod_base = OTHER; note = 2'-O-methylguanosine-3'-phosphate
  modified_base 12: mod_base = OTHER; note = 2'-O-methyladenosine-3'-phosphate
  modified_base 13: mod_base = OTHER; note = 2'-O-methyluridine-3'-phosphate
  modified_base 14: mod_base = OTHER; note = 2'-O-methylguanosine-3'-phosphate
  modified_base 15: mod_base = OTHER; note = 2'-O-methyluridine-3'-phosphate
  modified_base 16: mod_base = OTHER; note = 2'-O-methylcytidine-3'-phosphate
  modified_base 17: mod_base = OTHER; note = 2'-O-methylcytidine-3'-phosphate
  modified_base 18: mod_base = OTHER; note = 2'-O-methylguanosine-3'-phosphate
  modified_base 19: mod_base = OTHER; note = 2'-O-methyluridine-3'-phosphate
  modified_base 20: mod_base = OTHER; note = 2'-O-methylguanosine-3'-phosphate
  modified_base 21: mod_base = OTHER; note = 2'-O-methylguanosine
ccaatgtgccgatgtccgtgg

SEQ ID NO: 2214 - RNA, 21 nt, synthetic construct
  source 1..21: mol_type = other RNA
  modified_base 1: mod_base = OTHER; note = 2'-O-methylguanosine-3'-phosphorothioate
  modified_base 2: mod_base = OTHER; note = 2'-fluorocytidine-3'-phosphorothioate
  modified_base 3: mod_base = OTHER; note = 2'-O-methylcytidine-3'-phosphate
  modified_base 4: mod_base = OTHER; note = 2'-fluorocytidine-3'-phosphate
  modified_base 5: mod_base = OTHER; note = 2'-fluoroadenosine-3'-phosphate
  modified_base 6: mod_base = OTHER; note = 2'-fluorocytidine-3'-phosphate
  modified_base 7: mod_base = OTHER; note = 2'-O-methylguanosine-3'-phosphate
  modified_base 8: mod_base = OTHER; note = 2'-fluoroguanosine-3'-phosphate
  modified_base 9: mod_base = OTHER; note = 2'-O-methyladenosine-3'-phosphate
  modified_base 10: mod_base = OTHER; note = 2'-fluorocytidine-3'-phosphate
  modified_base 11: mod_base = OTHER; note = 2'-O-methyladenosine-3'-phosphate
  modified_base 12: mod_base = OTHER; note = 2'-fluorouridine-3'-phosphate
  modified_base 13: mod_base = OTHER; note = 2'-O-methylcytidine-3'-phosphate
  modified_base 14: mod_base = OTHER; note = 2'-fluoroguanosine-3'-phosphate
  modified_base 15: mod_base = OTHER; note = 2'-O-methylguanosine-3'-phosphate
  modified_base 16: mod_base = OTHER; note = 2'-fluorocytidine-3'-phosphate
  modified_base 17: mod_base = OTHER; note = 2'-O-methyladenosine-3'-phosphate
  modified_base 18: mod_base = OTHER; note = 2'-fluorocytidine-3'-phosphate
  modified_base 19: mod_base = OTHER; note = 2'-O-methyladenosine-3'-phosphorothioate
  modified_base 20: mod_base = OTHER; note = 2'-O-methyluridine-3'-phosphorothioate
  modified_base 21: mod_base = OTHER; note = 2'-O-methyluridine
gcccacggacatcggcacatt

SEQ ID NO: 2215 - RNA, 21 nt, synthetic construct
  source 1..21: mol_type = other RNA
  modified_base 1: mod_base = OTHER; note = 2'-O-methyluridine-3'-phosphorothioate
  modified_base 2: mod_base = OTHER; note = 2'-O-methyluridine-3'-phosphorothioate
  modified_base 3: mod_base = OTHER; note = 2'-O-methyluridine-3'-phosphate
  modified_base 4: mod_base = OTHER; note = 2'-O-methyladenosine-3'-phosphate
  modified_base 5: mod_base = OTHER; note = 2'-O-methyluridine-3'-phosphate
  modified_base 6: mod_base = OTHER; note = 2'-O-methyluridine-3'-phosphate
  modified_base 7: mod_base = OTHER; note = 2'-fluoroguanosine-3'-phosphate
  modified_base 8: mod_base = OTHER; note = 2'-O-methyladenosine-3'-phosphate
  modified_base 9: mod_base = OTHER; note = 2'-fluoroguanosine-3'-phosphate
  modified_base 10: mod_base = OTHER; note = 2'-O-methylcytidine-3'-phosphate
  modified_base 11: mod_base = OTHER; note = 2'-O-methyluridine-3'-phosphate
  modified_base 12: mod_base = OTHER; note = 2'-O-methylcytidine-3'-phosphate
  modified_base 13: mod_base = OTHER; note = 2'-O-methyluridine-3'-phosphate
  modified_base 14: mod_base = OTHER; note = 2'-O-methyluridine-3'-phosphate
  modified_base 15: mod_base = OTHER; note = 2'-O-methylguanosine-3'-phosphate
  modified_base 16: mod_base = OTHER; note = 2'-O-methyluridine-3'-phosphate
  modified_base 17: mod_base = OTHER; note = 2'-O-methyluridine-3'-phosphate
  modified_base 18: mod_base = OTHER; note = 2'-O-methylcytidine-3'-phosphate
  modified_base 19: mod_base = OTHER; note = 2'-O-methylcytidine-3'-phosphate
  modified_base 20: mod_base = OTHER; note = 2'-O-methylguanosine-3'-phosphate
  modified_base 21: mod_base = OTHER; note = 2'-O-methyluridine
tttattgagctcttgttccgt

SEQ ID NO: 2216 - RNA, 21 nt, synthetic construct
  source 1..21: mol_type = other RNA
  modified_base 1: mod_base = OTHER; note = 2'-O-methylguanosine-3'-phosphorothioate
  modified_base 2: mod_base = OTHER; note = 2'-fluorocytidine-3'-phosphorothioate
  modified_base 3: mod_base = OTHER; note = 2'-O-methyladenosine-3'-phosphate
  modified_base 4: mod_base = OTHER; note = 2'-fluorocytidine-3'-phosphate
  modified_base 5: mod_base = OTHER; note = 2'-fluoroguanosine-3'-phosphate
  modified_base 6: mod_base = OTHER; note = 2'-fluoroguanosine-3'-phosphate
  modified_base 7: mod_base = OTHER; note = 2'-O-methyladenosine-3'-phosphate
  modified_base 8: mod_base = OTHER; note = 2'-fluoroadenosine-3'-phosphate
  modified_base 9: mod_base = OTHER; note = 2'-O-methylcytidine-3'-phosphate
  modified_base 10: mod_base = OTHER; note = 2'-fluoroadenosine-3'-phosphate
  modified_base 11: mod_base = OTHER; note = 2'-O-methyladenosine-3'-phosphate
  modified_base 12: mod_base = OTHER; note = 2'-fluoroguanosine-3'-phosphate
  modified_base 13: mod_base = OTHER; note = 2'-O-methyladenosine-3'-phosphate
  modified_base 14: mod_base = OTHER; note = 2'-fluoroguanosine-3'-phosphate
  modified_base 15: mod_base = OTHER; note = 2'-O-methylcytidine-3'-phosphate
  modified_base 16: mod_base = OTHER; note = 2'-fluorouridine-3'-phosphate
  modified_base 17: mod_base = OTHER; note = 2'-O-methylcytidine-3'-phosphate
  modified_base 18: mod_base = OTHER; note = 2'-fluoroadenosine-3'-phosphate
  modified_base 19: mod_base = OTHER; note = 2'-O-methyladenosine-3'-phosphorothioate
  modified_base 20: mod_base = OTHER; note = 2'-O-methyluridine-3'-phosphorothioate
  modified_base 21: mod_base = OTHER; note = 2'-O-methyladenosine
gcacggaacaagagctcaata

SEQ ID NO: 2217 - RNA, 21 nt, synthetic construct
  source 1..21: mol_type = other RNA
  modified_base 1: mod_base = OTHER; note = 2'-O-methylguanosine-3'-phosphorothioate
  modified_base 2: mod_base = OTHER; note = 2'-O-methylguanosine-3'-phosphorothioate
  modified_base 3: mod_base = OTHER; note = 2'-O-methylguanosine-3'-phosphate
  modified_base 4: mod_base = OTHER; note = 2'-O-methylcytidine-3'-phosphate
  modified_base 5: mod_base = OTHER; note = 2'-O-methyluridine-3'-phosphate
  modified_base 6: mod_base = OTHER; note = 2'-O-methylguanosine-3'-phosphate
  modified_base 7: mod_base = OTHER; note = 2'-fluoroadenosine-3'-phosphate
  modified_base 8: mod_base = OTHER; note = 2'-O-methylguanosine-3'-phosphate
  modified_base 9: mod_base = OTHER; note = 2'-fluorocytidine-3'-phosphate
  modified_base 10: mod_base = OTHER; note = 2'-O-methyluridine-3'-phosphate
  modified_base 11: mod_base = OTHER; note = 2'-O-methyluridine-3'-phosphate
  modified_base 12: mod_base = OTHER; note = 2'-O-methyluridine-3'-phosphate
  modified_base 13: mod_base = OTHER; note = 2'-O-methyladenosine-3'-phosphate
  modified_base 14: mod_base = OTHER; note = 2'-O-methyladenosine-3'-phosphate
  modified_base 15: mod_base = OTHER; note = 2'-O-methyladenosine-3'-phosphate
  modified_base 16: mod_base = OTHER; note = 2'-O-methyladenosine-3'-phosphate
  modified_base 17: mod_base = OTHER; note = 2'-O-methyluridine-3'-phosphate
  modified_base 18: mod_base = OTHER; note = 2'-O-methylguanosine-3'-phosphate
  modified_base 19: mod_base = OTHER; note = 2'-O-methylguanosine-3'-phosphate
  modified_base 20: mod_base = OTHER; note = 2'-O-methyluridine-3'-phosphate
  modified_base 21: mod_base = OTHER; note = 2'-O-methyluridine
gggctgagctttaaaatggtt

SEQ ID NO: 2218 - RNA, 21 nt, synthetic construct
  source 1..21: mol_type = other RNA
  modified_base 1: mod_base = OTHER; note = 2'-O-methylguanosine-3'-phosphorothioate
  modified_base 2: mod_base = OTHER; note = 2'-fluoroguanosine-3'-phosphorothioate
  modified_base 3: mod_base = OTHER; note = 2'-O-methyladenosine-3'-phosphate
  modified_base 4: mod_base = OTHER; note = 2'-fluoroadenosine-3'-phosphate
  modified_base 5: mod_base = OTHER; note = 2'-fluorocytidine-3'-phosphate
  modified_base 6: mod_base = OTHER; note = 2'-fluorocytidine-3'-phosphate
  modified_base 7: mod_base = OTHER; note = 2'-O-methyladenosine-3'-phosphate
  modified_base 8: mod_base = OTHER; note = 2'-fluorouridine-3'-phosphate
  modified_base 9: mod_base = OTHER; note = 2'-O-methyluridine-3'-phosphate
  modified_base 10: mod_base = OTHER; note = 2'-fluorouridine-3'-phosphate
  modified_base 11: mod_base = OTHER; note = 2'-O-methyluridine-3'-phosphate
  modified_base 12: mod_base = OTHER; note = 2'-fluoroadenosine-3'-phosphate
  modified_base 13: mod_base = OTHER; note = 2'-O-methyladenosine-3'-phosphate
  modified_base 14: mod_base = OTHER; note = 2'-fluoroadenosine-3'-phosphate
  modified_base 15: mod_base = OTHER; note = 2'-O-methylguanosine-3'-phosphate
  modified_base 16: mod_base = OTHER; note = 2'-fluorocytidine-3'-phosphate
  modified_base 17: mod_base = OTHER; note = 2'-O-methyluridine-3'-phosphate
  modified_base 18: mod_base = OTHER; note = 2'-fluorocytidine-3'-phosphate
  modified_base 19: mod_base = OTHER; note = 2'-O-methyladenosine-3'-phosphorothioate
  modified_base 20: mod_base = OTHER; note = 2'-O-methylguanosine-3'-phosphorothioate
  modified_base 21: mod_base = OTHER; note = 2'-O-methylcytidine
ggaaccattttaaagctcagc

SEQ ID NO: 2219 - RNA, 21 nt, synthetic construct
  source 1..21: mol_type = other RNA
  modified_base 1: mod_base = OTHER; note = 2'-O-methylguanosine-3'-phosphorothioate
  modified_base 2: mod_base = OTHER; note = 2'-O-methylguanosine-3'-phosphorothioate
  modified_base 3: mod_base = OTHER; note = 2'-O-methylcytidine-3'-phosphate
  modified_base 4: mod_base = OTHER; note = 2'-O-methyladenosine-3'-phosphate
  modified_base 5: mod_base = OTHER; note = 2'-O-methyluridine-3'-phosphate
  modified_base 6: mod_base = OTHER; note = 2'-O-methyluridine-3'-phosphate
  modified_base 7: mod_base = OTHER; note = 2'-fluorouridine-3'-phosphate
  modified_base 8: mod_base = OTHER; note = 2'-O-methylcytidine-3'-phosphate
  modified_base 9: mod_base = OTHER; note = 2'-fluoroadenosine-3'-phosphate
  modified_base 10: mod_base = OTHER; note = 2'-O-methylcytidine-3'-phosphate
  modified_base 11: mod_base = OTHER; note = 2'-O-methylcytidine-3'-phosphate
  modified_base 12: mod_base = OTHER; note = 2'-O-methyladenosine-3'-phosphate
  modified_base 13: mod_base = OTHER; note = 2'-O-methyluridine-3'-phosphate
  modified_base 14: mod_base = OTHER; note = 2'-O-methyluridine-3'-phosphate
  modified_base 15: mod_base = OTHER; note = 2'-O-methylcytidine-3'-phosphate
  modified_base 16: mod_base = OTHER; note = 2'-O-methyladenosine-3'-phosphate
  modified_base 17: mod_base = OTHER; note = 2'-O-methyladenosine-3'-phosphate
  modified_base 18: mod_base = OTHER; note = 2'-O-methyladenosine-3'-phosphate
  modified_base 19: mod_base = OTHER; note = 2'-O-methylcytidine-3'-phosphate
  modified_base 20: mod_base = OTHER; note = 2'-O-methyladenosine-3'-phosphate
  modified_base 21: mod_base = OTHER; note = 2'-O-methylguanosine
ggcatttcaccattcaaacag

SEQ ID NO: 2220 - RNA, 21 nt, synthetic construct
  source 1..21: mol_type = other RNA
  modified_base 1: mod_base = OTHER; note = 2'-O-methyladenosine-3'-phosphorothioate
  modified_base 2: mod_base = OTHER; note = 2'-fluorocytidine-3'-phosphorothioate
  modified_base 3: mod_base = OTHER; note = 2'-O-methylcytidine-3'-phosphate
  modified_base 4: mod_base = OTHER; note = 2'-fluorouridine-3'-phosphate
  modified_base 5: mod_base = OTHER; note = 2'-fluoroguanosine-3'-phosphate
  modified_base 6: mod_base = OTHER; note = 2'-fluorouridine-3'-phosphate
  modified_base 7: mod_base = OTHER; note = 2'-O-methyluridine-3'-phosphate
  modified_base 8: mod_base = OTHER; note = 2'-fluorouridine-3'-phosphate
  modified_base 9: mod_base = OTHER; note = 2'-O-methylguanosine-3'-phosphate
  modified_base 10: mod_base = OTHER; note = 2'-fluoroadenosine-3'-phosphate
  modified_base 11: mod_base = OTHER; note = 2'-O-methyladenosine-3'-phosphate
  modified_base 12: mod_base = OTHER; note = 2'-fluorouridine-3'-phosphate
  modified_base 13: mod_base = OTHER; note = 2'-O-methylguanosine-3'-phosphate
  modified_base 14: mod_base = OTHER; note = 2'-fluoroguanosine-3'-phosphate
  modified_base 15: mod_base = OTHER; note = 2'-O-methyluridine-3'-phosphate
  modified_base 16: mod_base = OTHER; note = 2'-fluoroguanosine-3'-phosphate
  modified_base 17: mod_base = OTHER; note = 2'-O-methyladenosine-3'-phosphate
  modified_base 18: mod_base = OTHER; note = 2'-fluoroadenosine-3'-phosphate
  modified_base 19: mod_base = OTHER; note = 2'-O-methyladenosine-3'-phosphorothioate
  modified_base 20: mod_base = OTHER; note = 2'-O-methyluridine-3'-phosphorothioate
  modified_base 21: mod_base = OTHER; note = 2'-O-methylguanosine
acctgtttgaatggtgaaatg

SEQ ID NO: 2221 - RNA, 21 nt, synthetic construct
  source 1..21: mol_type = other RNA
  modified_base 1: mod_base = OTHER; note = 2'-O-methylcytidine-3'-phosphorothioate
  modified_base 2: mod_base = OTHER; note = 2'-O-methyladenosine-3'-phosphorothioate
  modified_base 3: mod_base = OTHER; note = 2'-O-methyluridine-3'-phosphate
  modified_base 4: mod_base = OTHER; note = 2'-O-methyluridine-3'-phosphate
  modified_base 5: mod_base = OTHER; note = 2'-O-methyluridine-3'-phosphate
  modified_base 6: mod_base = OTHER; note = 2'-O-methylcytidine-3'-phosphate
  modified_base 7: mod_base = OTHER; note = 2'-fluoroadenosine-3'-phosphate
  modified_base 8: mod_base = OTHER; note = 2'-O-methylcytidine-3'-phosphate
  modified_base 9: mod_base = OTHER; note = 2'-fluorocytidine-3'-phosphate
  modified_base 10: mod_base = OTHER; note = 2'-O-methyladenosine-3'-phosphate
  modified_base 11: mod_base = OTHER; note = 2'-O-methyluridine-3'-phosphate
  modified_base 12: mod_base = OTHER; note = 2'-O-methyluridine-3'-phosphate
  modified_base 13: mod_base = OTHER; note = 2'-O-methylcytidine-3'-phosphate
  modified_base 14: mod_base = OTHER; note = 2'-O-methyladenosine-3'-phosphate
  modified_base 15: mod_base = OTHER; note = 2'-O-methyladenosine-3'-phosphate
  modified_base 16: mod_base = OTHER; note = 2'-O-methyladenosine-3'-phosphate
  modified_base 17: mod_base = OTHER; note = 2'-O-methylcytidine-3'-phosphate
  modified_base 18: mod_base = OTHER; note = 2'-O-methyladenosine-3'-phosphate
  modified_base 19: mod_base = OTHER; note = 2'-O-methylguanosine-3'-phosphate
  modified_base 20: mod_base = OTHER; note = 2'-O-methylguanosine-3'-phosphate
  modified_base 21: mod_base = OTHER; note = 2'-O-methyluridine
catttcaccattcaaacaggt

SEQ ID NO: 2222 - RNA, 21 nt, synthetic construct
  source 1..21: mol_type = other RNA
  modified_base 1: mod_base = OTHER; note = 2'-O-methylcytidine-3'-phosphorothioate
  modified_base 2: mod_base = OTHER; note = 2'-fluoroguanosine-3'-phosphorothioate
  modified_base 3: mod_base = OTHER; note = 2'-O-methyladenosine-3'-phosphate
  modified_base 4: mod_base = OTHER; note = 2'-fluorocytidine-3'-phosphate
  modified_base 5: mod_base = OTHER; note = 2'-fluorocytidine-3'-phosphate
  modified_base 6: mod_base = OTHER; note = 2'-fluorouridine-3'-phosphate
  modified_base 7: mod_base = OTHER; note = 2'-O-methylguanosine-3'-phosphate
  modified_base 8: mod_base = OTHER; note = 2'-fluorouridine-3'-phosphate
  modified_base 9: mod_base = OTHER; note = 2'-O-methyluridine-3'-phosphate
  modified_base 10: mod_base = OTHER; note = 2'-fluorouridine-3'-phosphate
  modified_base 11: mod_base = OTHER; note = 2'-O-methylguanosine-3'-phosphate
  modified_base 12: mod_base = OTHER; note = 2'-fluoroadenosine-3'-phosphate
  modified_base 13: mod_base = OTHER; note = 2'-O-methyladenosine-3'-phosphate
  modified_base 14: mod_base = OTHER; note = 2'-fluorouridine-3'-phosphate
  modified_base 15: mod_base = OTHER; note = 2'-O-methylguanosine-3'-phosphate
  modified_base 16: mod_base = OTHER; note = 2'-fluoroguanosine-3'-phosphate
  modified_base 17: mod_base = OTHER; note = 2'-O-methyluridine-3'-phosphate
  modified_base 18: mod_base = OTHER; note = 2'-fluoroguanosine-3'-phosphate
  modified_base 19: mod_base = OTHER; note = 2'-O-methyladenosine-3'-phosphorothioate
  modified_base 20: mod_base = OTHER; note = 2'-O-methyladenosine-3'-phosphorothioate
  modified_base 21: mod_base = OTHER; note = 2'-O-methyladenosine
cgacctgtttgaatggtgaaa

SEQ ID NO: 2223 - RNA, 21 nt, synthetic construct
  source 1..21: mol_type = other RNA
  modified_base 1: mod_base = OTHER; note = 2'-fluoroguanosine-3'-phosphorothioate
  modified_base 2: mod_base = OTHER; note = 2'-O-methylcytidine-3'-phosphorothioate
  modified_base 3: mod_base = OTHER; note = 2'-fluoroadenosine-3'-phosphate
  modified_base 4: mod_base = OTHER; note = 2'-O-methyluridine-3'-phosphate
  modified_base 5: mod_base = OTHER; note = 2'-fluorouridine-3'-phosphate
  modified_base 6: mod_base = OTHER; note = 2'-O-methyluridine-3'-phosphate
  modified_base 7: mod_base = OTHER; note = 2'-fluorocytidine-3'-phosphate
  modified_base 8: mod_base = OTHER; note = 2'-O-methyladenosine-3'-phosphate
  modified_base 9: mod_base = OTHER; note = 2'-fluorocytidine-3'-phosphate
  modified_base 10: mod_base = OTHER; note = 2'-fluorocytidine-3'-phosphate
  modified_base 11: mod_base = OTHER; note = Adenine locked nucleotide-3'-phosphate
  modified_base 12: mod_base = OTHER; note = 2'-O-methyluridine-3'-phosphate
  modified_base 13: mod_base = OTHER; note = 2'-fluorouridine-3'-phosphate
  modified_base 14: mod_base = OTHER; note = 2'-O-methylcytidine-3'-phosphate
  modified_base 15: mod_base = OTHER; note = 2'-fluoroadenosine-3'-phosphate
  modified_base 16: mod_base = OTHER; note = 2'-O-methyladenosine-3'-phosphate
  modified_base 17: mod_base = OTHER; note = 2'-fluoroadenosine-3'-phosphate
  modified_base 18: mod_base = OTHER; note = 2'-O-methylcytidine-3'-phosphate
  modified_base 19: mod_base = OTHER; note = 2'-fluoroadenosine-3'-phosphate
  modified_base 20: mod_base = OTHER; note = 2'-O-methylguanosine-3'-phosphate
  modified_base 21: mod_base = OTHER; note = 2'-fluoroguanosine
gcatttcaccattcaaacagg

SEQ ID NO: 2224 - RNA, 23 nt, synthetic construct
  source 1..23: mol_type = other RNA
  modified_base 1: mod_base = OTHER; note = 2'-O-methylcytidine-3'-phosphorothioate
  modified_base 2: mod_base = OTHER; note = 2'-fluorocytidine-3'-phosphorothioate
  modified_base 3: mod_base = OTHER; note = 2'-O-methyluridine-3'-phosphate
  modified_base 4: mod_base = OTHER; note = 2'-fluoroguanosine-3'-phosphate
  modified_base 5: mod_base = OTHER; note = 2'-O-methyluridine-3'-phosphate
  modified_base 6: mod_base = OTHER; note = 2'-fluorouridine-3'-phosphate
  modified_base 7: mod_base = OTHER; note = 2'-O-methyluridine-3'-phosphate
  modified_base 8: mod_base = OTHER; note = 2'-fluoroguanosine-3'-phosphate
  modified_base 9: mod_base = OTHER; note = 2'-O-methyladenosine-3'-phosphate
  modified_base 10: mod_base = OTHER; note = 2'-fluoroadenosine-3'-phosphate
  modified_base 11: mod_base = OTHER; note = 2'-O-methyluridine-3'-phosphate
  modified_base 12: mod_base = OTHER; note = 2'-O-methylguanosine-3'-phosphate
  modified_base 13: mod_base = OTHER; note = 2'-O-methylguanosine-3'-phosphate
  modified_base 14: mod_base = OTHER; note = 2'-fluorouridine-3'-phosphate
  modified_base 15: mod_base = OTHER; note = 2'-O-methylguanosine-3'-phosphate
  modified_base 16: mod_base = OTHER; note = 2'-fluoroadenosine-3'-phosphate
  modified_base 17: mod_base = OTHER; note = 2'-O-methyladenosine-3'-phosphate
  modified_base 18: mod_base = OTHER; note = 2'-fluoroadenosine-3'-phosphate
  modified_base 19: mod_base = OTHER; note = 2'-O-methyluridine-3'-phosphate
  modified_base 20: mod_base = OTHER; note = 2'-fluoroguanosine-3'-phosphate
  modified_base 21: mod_base = OTHER; note = 2'-O-methylcytidine-3'-phosphorothioate
  modified_base 22: mod_base = OTHER; note = 2'-fluorocytidine-3'-phosphorothioate
  modified_base 23: mod_base = OTHER; note = 2'-O-methylcytidine
cctgtttgaatggtgaaatgccc

SEQ ID NO: 2225 - RNA, 21 nt, synthetic construct
  source 1..21: mol_type = other RNA
  modified_base 1: mod_base = OTHER; note = 2'-fluoroguanosine-3'-phosphorothioate
  modified_base 2: mod_base = OTHER; note = 2'-O-methylcytidine-3'-phosphorothioate
  modified_base 3: mod_base = OTHER; note = 2'-fluoroadenosine-3'-phosphate
  modified_base 4: mod_base = OTHER; note = 2'-O-methyluridine-3'-phosphate
  modified_base 5: mod_base = OTHER; note = 2'-fluorouridine-3'-phosphate
  modified_base 6: mod_base = OTHER; note = 2'-O-methyluridine-3'-phosphate
  modified_base 7: mod_base = OTHER; note = 2'-fluorocytidine-3'-phosphate
  modified_base 8: mod_base = OTHER; note = 2'-O-methyladenosine-3'-phosphate
  modified_base 9: mod_base = OTHER; note = 2'-fluorocytidine-3'-phosphate
  modified_base 10: mod_base = OTHER; note = 2'-fluorocytidine-3'-phosphate
  modified_base 11: mod_base = OTHER; note = 2'-fluoroadenosine-3'-phosphate
  modified_base 12: mod_base = OTHER; note = 2'-O-methyluridine-3'-phosphate
  modified_base 13: mod_base = OTHER; note = 2'-fluorouridine-3'-phosphate
  modified_base 14: mod_base = OTHER; note = 2'-O-methylcytidine-3'-phosphate
  modified_base 15: mod_base = OTHER; note = 2'-fluoroadenosine-3'-phosphate
  modified_base 16: mod_base = OTHER; note = 2'-O-methyladenosine-3'-phosphate
  modified_base 17: mod_base = OTHER; note = 2'-fluoroadenosine-3'-phosphate
  modified_base 18: mod_base = OTHER; note = 2'-O-methylcytidine-3'-phosphate
  modified_base 19: mod_base = OTHER; note = 2'-fluoroadenosine-3'-phosphate
  modified_base 20: mod_base = OTHER; note = 2'-O-methylguanosine-3'-phosphate
  modified_base 21: mod_base = OTHER; note = 2'-fluoroguanosine
gcatttcaccattcaaacagg

SEQ ID NO: 2226 - RNA, 23 nt, synthetic construct
  source 1..23: mol_type = other RNA
  modified_base 1: mod_base = OTHER; note = 2'-O-methylcytidine-3'-phosphorothioate
  modified_base 2: mod_base = OTHER; note = 2'-fluorocytidine-3'-phosphorothioate
  modified_base 3: mod_base = OTHER; note = 2'-O-methyluridine-3'-phosphate
  modified_base 4: mod_base = OTHER; note = 2'-fluoroguanosine-3'-phosphate
  modified_base 5: mod_base = OTHER; note = 2'-O-methyluridine-3'-phosphate
  modified_base 6: mod_base = OTHER; note = 2'-fluorouridine-3'-phosphate
  modified_base 7: mod_base = OTHER; note = 2'-O-methyluridine-3'-phosphate
  modified_base 8: mod_base = OTHER; note = 2'-fluoroguanosine-3'-phosphate
  modified_base 9: mod_base = OTHER; note = 2'-O-methyladenosine-3'-phosphate
  modified_base 10: mod_base = OTHER; note = 2'-fluoroadenosine-3'-phosphate
  modified_base 11: mod_base = OTHER; note = 2'-O-methyluridine-3'-phosphate
  modified_base 12: mod_base = OTHER; note = 2'-O-methylguanosine-3'-phosphate
  modified_base 13: mod_base = OTHER; note = 2'-O-methylguanosine-3'-phosphate
  modified_base 14: mod_base = OTHER; note = 2'-fluorouridine-3'-phosphate
  modified_base 15: mod_base = OTHER; note = 2'-O-methylguanosine-3'-phosphate
  modified_base 16: mod_base = OTHER; note = 2'-fluoroadenosine-3'-phosphate
  modified_base 17: mod_base = OTHER; note = 2'-O-methyladenosine-3'-phosphate
  modified_base 18: mod_base = OTHER; note = 2'-fluoroadenosine-3'-phosphate
  modified_base 19: mod_base = OTHER; note = 2'-O-methyluridine-3'-phosphate
  modified_base 20: mod_base = OTHER; note = 2'-fluoroguanosine-3'-phosphate
  modified_base 21: mod_base = OTHER; note = 2'-O-methylcytidine-3'-phosphorothioate
  modified_base 22: mod_base = OTHER; note = 2'-O-methylcytidine-3'-phosphorothioate
  modified_base 23: mod_base = OTHER; note = 2'-O-methylcytidine
cctgtttgaatggtgaaatgccc

SEQ ID NO: 2227 - RNA, 21 nt, synthetic construct
  source 1..21: mol_type = other RNA
  modified_base 1: mod_base = OTHER; note = 2'-fluoroadenosine-3'-phosphorothioate
  modified_base 2: mod_base = OTHER; note = 2'-O-methyladenosine-3'-phosphorothioate
  modified_base 3: mod_base = OTHER; note = 2'-fluorouridine-3'-phosphate
  modified_base 4: mod_base = OTHER; note = 2'-O-methylguanosine-3'-phosphate
  modified_base 5: mod_base = OTHER; note = 2'-fluoroadenosine-3'-phosphate
  modified_base 6: mod_base = OTHER; note = 2'-O-methylcytidine-3'-phosphate
  modified_base 7: mod_base = OTHER; note = 2'-fluorouridine-3'-phosphate
  modified_base 8: mod_base = OTHER; note = 2'-O-methyluridine-3'-phosphate
  modified_base 9: mod_base = OTHER; note = 2'-fluorouridine-3'-phosphate
  modified_base 10: mod_base = OTHER; note = 2'-fluorouridine-3'-phosphate
  modified_base 11: mod_base = OTHER; note = Adenine locked nucleotide-3'-phosphate
  modified_base 12: mod_base = OTHER; note = 2'-O-methyluridine-3'-phosphate
  modified_base 13: mod_base = OTHER; note = 2'-fluorouridine-3'-phosphate
  modified_base 14: mod_base = OTHER; note = 2'-O-methylguanosine-3'-phosphate
  modified_base 15: mod_base = OTHER; note = 2'-fluoroadenosine-3'-phosphate
  modified_base 16: mod_base = OTHER; note = 2'-O-methylguanosine-3'-phosphate
  modified_base 17: mod_base = OTHER; note = 2'-fluorocytidine-3'-phosphate
  modified_base 18: mod_base = OTHER; note = 2'-O-methyluridine-3'-phosphate
  modified_base 19: mod_base = OTHER; note = 2'-fluorocytidine-3'-phosphate
  modified_base 20: mod_base = OTHER; note = 2'-O-methyluridine-3'-phosphate
  modified_base 21: mod_base = OTHER; note = 2'-fluorouridine
aatgacttttattgagctctt

SEQ ID NO: 2228 - RNA, 23 nt, synthetic construct
  source 1..23: mol_type = other RNA
  modified_base 1: mod_base = OTHER; note = 2'-O-methyladenosine-3'-phosphorothioate
  modified_base 2: mod_base = OTHER; note = 2'-fluoroadenosine-3'-phosphorothioate
  modified_base 3: mod_base = OTHER; note = 2'-O-methylguanosine-3'-phosphate
  modified_base 4: mod_base = OTHER; note = 2'-fluoroadenosine-3'-phosphate
  modified_base 5: mod_base = OTHER; note = 2'-O-methylguanosine-3'-phosphate
  modified_base 6: mod_base = OTHER; note = 2'-fluorocytidine-3'-phosphate
  modified_base 7: mod_base = OTHER; note = 2'-O-methyluridine-3'-phosphate
  modified_base 8: mod_base = OTHER; note = 2'-fluorocytidine-3'-phosphate
  modified_base 9: mod_base = OTHER; note = 2'-O-methyladenosine-3'-phosphate
  modified_base 10: mod_base = OTHER; note = 2'-fluoroadenosine-3'-phosphate
  modified_base 11: mod_base = OTHER; note = 2'-O-methyluridine-3'-phosphate
  modified_base 12: mod_base = OTHER; note = 2'-O-methyladenosine-3'-phosphate
  modified_base 13: mod_base = OTHER; note = 2'-O-methyladenosine-3'-phosphate
  modified_base 14: mod_base = OTHER; note = 2'-fluoroadenosine-3'-phosphate
  modified_base 15: mod_base = OTHER; note = 2'-O-methyladenosine-3'-phosphate
  modified_base 16: mod_base = OTHER; note = 2'-fluoroguanosine-3'-phosphate
  modified_base 17: mod_base = OTHER; note = 2'-O-methyluridine-3'-phosphate
  modified_base 18: mod_base = OTHER; note = 2'-fluorocytidine-3'-phosphate
  modified_base 19: mod_base = OTHER; note = 2'-O-methyladenosine-3'-phosphate
  modified_base 20: mod_base = OTHER; note = 2'-fluorouridine-3'-phosphate
  modified_base 21: mod_base = OTHER; note = 2'-O-methyluridine-3'-phosphorothioate
  modified_base 22: mod_base = OTHER; note = 2'-fluorocytidine-3'-phosphorothioate
  modified_base 23: mod_base = OTHER; note = 2'-O-methyluridine
aagagctcaataaaagtcattct

SEQ ID NO: 2229 - RNA, 21 nt, synthetic construct
  source 1..21: mol_type = other RNA
  modified_base 1: mod_base = OTHER; note = 2'-fluoroadenosine-3'-phosphorothioate
  modified_base 2: mod_base = OTHER; note = 2'-O-methyladenosine-3'-phosphorothioate
  modified_base 3: mod_base = OTHER; note = 2'-fluorouridine-3'-phosphate
  modified_base 4: mod_base = OTHER; note = 2'-O-methylguanosine-3'-phosphate
  modified_base 5: mod_base = OTHER; note = 2'-fluoroadenosine-3'-phosphate
  modified_base 6: mod_base = OTHER; note = 2'-O-methylcytidine-3'-phosphate
  modified_base 7: mod_base = OTHER; note = 2'-fluorouridine-3'-phosphate
  modified_base 8: mod_base = OTHER; note = 2'-O-methyluridine-3'-phosphate
  modified_base 9: mod_base = OTHER; note = 2'-fluorouridine-3'-phosphate
  modified_base 10: mod_base = OTHER; note = 2'-fluorouridine-3'-phosphate
  modified_base 11: mod_base = OTHER; note = 2'-fluoroadenosine-3'-phosphate
  modified_base 12: mod_base = OTHER; note = 2'-O-methyluridine-3'-phosphate
  modified_base 13: mod_base = OTHER; note = 2'-fluorouridine-3'-phosphate
  modified_base 14: mod_base = OTHER; note = 2'-O-methylguanosine-3'-phosphate
  modified_base 15: mod_base = OTHER; note = 2'-fluoroadenosine-3'-phosphate
  modified_base 16: mod_base = OTHER; note = 2'-O-methylguanosine-3'-phosphate
  modified_base 17: mod_base = OTHER; note = 2'-fluorocytidine-3'-phosphate
  modified_base 18: mod_base = OTHER; note = 2'-O-methyluridine-3'-phosphate
  modified_base 19: mod_base = OTHER; note = 2'-fluorocytidine-3'-phosphate
  modified_base 20: mod_base = OTHER; note = 2'-O-methyluridine-3'-phosphate
  modified_base 21: mod_base = OTHER; note = 2'-fluorouridine
aatgacttttattgagctctt

SEQ ID NO: 2230 - RNA, 23 nt, synthetic construct
  source 1..23: mol_type = other RNA
  modified_base 1: mod_base = OTHER; note = 2'-O-methyladenosine-3'-phosphorothioate
  modified_base 2: mod_base = OTHER; note = 2'-fluoroadenosine-3'-phosphorothioate
  modified_base 3: mod_base = OTHER; note = 2'-O-methylguanosine-3'-phosphate
  modified_base 4: mod_base = OTHER; note = 2'-fluoroadenosine-3'-phosphate
  modified_base 5: mod_base = OTHER; note = 2'-O-methylguanosine-3'-phosphate
  modified_base 6: mod_base = OTHER; note = 2'-fluorocytidine-3'-phosphate
  modified_base 7: mod_base = OTHER; note = 2'-O-methyluridine-3'-phosphate
  modified_base 8: mod_base = OTHER; note = 2'-fluorocytidine-3'-phosphate
  modified_base 9: mod_base = OTHER; note = 2'-O-methyladenosine-3'-phosphate
  modified_base 10: mod_base = OTHER; note = 2'-fluoroadenosine-3'-phosphate
  modified_base 11: mod_base = OTHER; note = 2'-O-methyluridine-3'-phosphate
  modified_base 12: mod_base = OTHER; note = 2'-O-methyladenosine-3'-phosphate
  modified_base 13: mod_base = OTHER; note = 2'-O-methyladenosine-3'-phosphate
  modified_base 14: mod_base = OTHER; note = 2'-fluoroadenosine-3'-phosphate
  modified_base 15: mod_base = OTHER; note = 2'-O-methyladenosine-3'-phosphate
  modified_base 16: mod_base = OTHER; note = 2'-fluoroguanosine-3'-phosphate
  modified_base 17: mod_base = OTHER; note = 2'-O-methyluridine-3'-phosphate
  modified_base 18: mod_base = OTHER; note = 2'-fluorocytidine-3'-phosphate
  modified_base 19: mod_base = OTHER; note = 2'-O-methyladenosine-3'-phosphate
  modified_base 20: mod_base = OTHER; note = 2'-fluorouridine-3'-phosphate
  modified_base 21: mod_base = OTHER; note = 2'-O-methyluridine-3'-phosphorothioate
  modified_base 22: mod_base = OTHER; note = 2'-O-methylcytidine-3'-phosphorothioate
  modified_base 23: mod_base = OTHER; note = 2'-O-methyluridine
aagagctcaataaaagtcattct

SEQ ID NO: 2231 - RNA, 14 nt, synthetic construct
  source 1..14: mol_type = other RNA
  modified_base 1: mod_base = OTHER; note = 2'-O-methyluridine-3'-phosphorothioate
  modified_base 2: mod_base = OTHER; note = 2'-fluorouridine-3'-phosphorothioate
  modified_base 3: mod_base = OTHER; note = 2'-fluoroguanosine-3'-phosphate
  modified_base 4: mod_base = OTHER; note = 2'-fluorouridine-3'-phosphate
  modified_base 5: mod_base = OTHER; note = 2'-O-methyladenosine-3'-phosphate
  modified_base 6: mod_base = OTHER; note = 2'-O-methyladenosine-3'-phosphate
  modified_base 7: mod_base = OTHER; note = 2'-O-methylcytidine-3'-phosphate
  modified_base 8: mod_base = OTHER; note = 2'-O-methyluridine-3'-phosphate
  modified_base 9: mod_base = OTHER; note = 2'-O-methyluridine-3'-phosphate
  modified_base 10: mod_base = OTHER; note = 2'-O-methylguanosine-3'-phosphate
  modified_base 11: mod_base = OTHER; note = 2'-O-methyladenosine-3'-phosphate
  modified_base 12: mod_base = OTHER; note = 2'-O-methyladenosine-3'-phosphorothioate
  modified_base 13: mod_base = OTHER; note = 2'-O-methylguanosine-3'-phosphorothioate
  modified_base 14: mod_base = OTHER; note = 2'-O-methyladenosine
ttgtaacttgaaga

SEQ ID NO: 2232 - RNA, 14 nt, synthetic construct
  source 1..14: mol_type = other RNA
  modified_base 1: mod_base = OTHER; note = 2'-O-methylcytidine-3'-phosphorothioate
  modified_base 2: mod_base = OTHER; note = 2'-fluorouridine-3'-phosphorothioate
  modified_base 3: mod_base = OTHER; note = 2'-fluoroguanosine-3'-phosphate
  modified_base 4: mod_base = OTHER; note = 2'-fluorouridine-3'-phosphate
  modified_base 5: mod_base = OTHER; note = 2'-O-methyluridine-3'-phosphate
  modified_base 6: mod_base = OTHER; note = 2'-O-methyluridine-3'-phosphate
  modified_base 7: mod_base = OTHER; note = 2'-O-methyluridine-3'-phosphate
  modified_base 8: mod_base = OTHER; note = 2'-O-methylguanosine-3'-phosphate
  modified_base 9: mod_base = OTHER; note = 2'-O-methylcytidine-3'-phosphate
  modified_base 10: mod_base = OTHER; note = 2'-O-methyluridine-3'-phosphate
  modified_base 11: mod_base = OTHER; note = 2'-O-methyluridine-3'-phosphate
  modified_base 12: mod_base = OTHER; note = 2'-O-methyluridine-3'-phosphorothioate
  modified_base 13: mod_base = OTHER; note = 2'-O-methyluridine-3'-phosphorothioate
  modified_base 14: mod_base = OTHER; note = 2'-O-methyladenosine
ctgttttgctttta

SEQ ID NO: 2233 - RNA, 14 nt, synthetic construct
  source 1..14: mol_type = other RNA
  modified_base 1: mod_base = OTHER; note = 2'-O-methylguanosine-3'-phosphorothioate
  modified_base 2: mod_base = OTHER; note = 2'-fluorouridine-3'-phosphorothioate
  modified_base 3: mod_base = OTHER; note = 2'-fluorouridine-3'-phosphate
  modified_base 4: mod_base = OTHER; note = 2'-fluorouridine-3'-phosphate
  modified_base 5: mod_base = OTHER; note = 2'-O-methyluridine-3'-phosphate
  modified_base 6: mod_base = OTHER; note = 2'-O-methylguanosine-3'-phosphate
  modified_base 7: mod_base = OTHER; note = 2'-O-methylcytidine-3'-phosphate
  modified_base 8: mod_base = OTHER; note = 2'-O-methyluridine-3'-phosphate
  modified_base 9: mod_base = OTHER; note = 2'-O-methyluridine-3'-phosphate
  modified_base 10: mod_base = OTHER; note = 2'-O-methyluridine-3'-phosphate
  modified_base 11: mod_base = OTHER; note = 2'-O-methyluridine-3'-phosphate
  modified_base 12: mod_base = OTHER; note = 2'-O-methylguanosine-3'-phosphorothioate
  modified_base 13: mod_base = OTHER; note = 2'-O-methyluridine-3'-phosphorothioate
  modified_base 14: mod_base = OTHER; note = 2'-O-methyladenosine
gttttgcttttgta

SEQ ID NO: 2234 - RNA, 14 nt, synthetic construct
  source 1..14: mol_type = other RNA
  modified_base 1: mod_base = OTHER; note = 2'-O-methyladenosine-3'-phosphorothioate
  modified_base 2: mod_base = OTHER; note = 2'-fluoroguanosine-3'-phosphorothioate
  modified_base 3: mod_base = OTHER; note = 2'-fluoroadenosine-3'-phosphate
  modified_base 4: mod_base = OTHER; note = 2'-fluorocytidine-3'-phosphate
  modified_base 5: mod_base = OTHER; note = 2'-O-methylcytidine-3'-phosphate
  modified_base 6: mod_base = OTHER; note = 2'-O-methyluridine-3'-phosphate
  modified_base 7: mod_base = OTHER; note = 2'-O-methylguanosine-3'-phosphate
  modified_base 8: mod_base = OTHER; note = 2'-O-methyluridine-3'-phosphate
  modified_base 9: mod_base = OTHER; note = 2'-O-methyluridine-3'-phosphate
  modified_base 10: mod_base = OTHER; note = 2'-O-methyluridine-3'-phosphate
  modified_base 11: mod_base = OTHER; note = 2'-O-methyluridine-3'-phosphate
  modified_base 12: mod_base = OTHER; note = 2'-O-methylguanosine-3'-phosphorothioate
  modified_base 13: mod_base = OTHER; note = 2'-O-methylcytidine-3'-phosphorothioate
  modified_base 14: mod_base = OTHER; note = 2'-O-methyladenosine
agacctgttttgca

SEQ ID NO: 2235 - RNA, 14 nt, synthetic construct
  source 1..14: mol_type = other RNA
  modified_base 1: mod_base = OTHER; note = 2'-O-methyluridine-3'-phosphorothioate
  modified_base 2: mod_base = OTHER; note = 2'-fluoroguanosine-3'-phosphorothioate
  modified_base 3: mod_base = OTHER; note = 2'-fluorouridine-3'-phosphate
  modified_base 4: mod_base = OTHER; note = 2'-fluorouridine-3'-phosphate
  modified_base 5: mod_base = OTHER; note = 2'-O-methyluridine-3'-phosphate
  modified_base 6: mod_base = OTHER; note = 2'-O-methyluridine-3'-phosphate
  modified_base 7: mod_base = OTHER; note = 2'-O-methylguanosine-3'-phosphate
  modified_base 8: mod_base = OTHER; note = 2'-O-methylcytidine-3'-phosphate
  modified_base 9: mod_base = OTHER; note = 2'-O-methyluridine-3'-phosphate
  modified_base 10: mod_base = OTHER; note = 2'-O-methyluridine-3'-phosphate
  modified_base 11: mod_base = OTHER; note = 2'-O-methyluridine-3'-phosphate
  modified_base 12: mod_base = OTHER; note = 2'-O-methyluridine-3'-phosphorothioate
  modified_base 13: mod_base = OTHER; note = 2'-O-methylguanosine-3'-phosphorothioate
  modified_base 14: mod_base = OTHER; note = 2'-O-methyladenosine
tgttttgcttttga

SEQ ID NO: 2236 - RNA, 14 nt, synthetic construct
  source 1..14: mol_type = other RNA
  modified_base 1: mod_base = OTHER; note = 2'-O-methyladenosine-3'-phosphorothioate
  modified_base 2: mod_base = OTHER; note = 2'-fluoroguanosine-3'-phosphorothioate
  modified_base 3: mod_base = OTHER; note = 2'-fluoroadenosine-3'-phosphate
  modified_base 4: mod_base = OTHER; note = 2'-fluorouridine-3'-phosphate
  modified_base 5: mod_base = OTHER; note = 2'-O-methyladenosine-3'-phosphate
  modified_base 6: mod_base = OTHER; note = 2'-O-methyluridine-3'-phosphate
  modified_base 7: mod_base = OTHER; note = 2'-O-methyluridine-3'-phosphate
  modified_base 8: mod_base = OTHER; note = 2'-O-methyluridine-3'-phosphate
  modified_base 9: mod_base = OTHER; note = 2'-O-methyladenosine-3'-phosphate
  modified_base 10: mod_base = OTHER; note = 2'-O-methyluridine-3'-phosphate
  modified_base 11: mod_base = OTHER; note = 2'-O-methyluridine-3'-phosphate
  modified_base 12: mod_base = OTHER; note = 2'-O-methylcytidine-3'-phosphorothioate
  modified_base 13: mod_base = OTHER; note = 2'-O-methyluridine-3'-phosphorothioate
  modified_base 14: mod_base = OTHER; note = 2'-O-methyladenosine
agatatttattcta

SEQ ID NO: 2237 - RNA, 14 nt, synthetic construct
  source 1..14: mol_type = other RNA
  modified_base 1: mod_base = OTHER; note = 2'-O-methylcytidine-3'-phosphorothioate
  modified_base 2: mod_base = OTHER; note = 2'-fluorocytidine-3'-phosphorothioate
  modified_base 3: mod_base = OTHER; note = 2'-fluorouridine-3'-phosphate
  modified_base 4: mod_base = OTHER; note = 2'-fluoroguanosine-3'-phosphate
  modified_base 5: mod_base = OTHER; note = 2'-O-methyluridine-3'-phosphate
  modified_base 6: mod_base = OTHER; note = 2'-O-methyluridine-3'-phosphate
  modified_base 7: mod_base = OTHER; note = 2'-O-methyluridine-3'-phosphate
  modified_base 8: mod_base = OTHER; note = 2'-O-methyluridine-3'-phosphate
  modified_base 9: mod_base = OTHER; note = 2'-O-methylguanosine-3'-phosphate
  modified_base 10: mod_base = OTHER; note = 2'-O-methylcytidine-3'-phosphate
  modified_base 11: mod_base = OTHER; note = 2'-O-methyluridine-3'-phosphate
  modified_base 12: mod_base = OTHER; note = 2'-O-methyluridine-3'-phosphorothioate
  modified_base 13: mod_base = OTHER; note = 2'-O-methyluridine-3'-phosphorothioate
  modified_base 14: mod_base = OTHER; note = 2'-O-methyladenosine
cctgttttgcttta

SEQ ID NO: 2238 - RNA, 14 nt, synthetic construct
  source 1..14: mol_type = other RNA
  modified_base 1: mod_base = OTHER; note = 2'-O-methyluridine-3'-phosphorothioate
  modified_base 2: mod_base = OTHER; note = 2'-fluoroguanosine-3'-phosphorothioate
  modified_base 3: mod_base = OTHER; note = 2'-fluorouridine-3'-phosphate
  modified_base 4: mod_base = OTHER; note = 2'-fluoroadenosine-3'-phosphate
  modified_base 5: mod_base = OTHER; note = 2'-O-methyladenosine-3'-phosphate
  modified_base 6: mod_base = OTHER; note = 2'-O-methylcytidine-3'-phosphate
  modified_base 7: mod_base = OTHER; note = 2'-O-methyluridine-3'-phosphate
  modified_base 8: mod_base = OTHER; note = 2'-O-methyluridine-3'-phosphate
  modified_base 9: mod_base = OTHER; note = 2'-O-methylguanosine-3'-phosphate
  modified_base 10: mod_base = OTHER; note = 2'-O-methyladenosine-3'-phosphate
  modified_base 11: mod_base = OTHER; note = 2'-O-methyladenosine-3'-phosphate
  modified_base 12: mod_base = OTHER; note = 2'-O-methylguanosine-3'-phosphorothioate
  modified_base 13: mod_base = OTHER; note = 2'-O-methyladenosine-3'-phosphorothioate
  modified_base 14: mod_base = OTHER; note = 2'-O-methyladenosine
tgtaacttgaagaa

SEQ ID NO: 2239 - RNA, 14 nt, synthetic construct
  source 1..14: mol_type = other RNA
  modified_base 1: mod_base = OTHER; note = 2'-O-methylcytidine-3'-phosphorothioate
  modified_base 2: mod_base = OTHER; note = 2'-fluorouridine-3'-phosphorothioate
  modified_base 3: mod_base = OTHER; note = 2'-fluorouridine-3'-phosphate
  modified_base 4: mod_base = OTHER; note = 2'-fluorouridine-3'-phosphate
  modified_base 5: mod_base = OTHER; note = 2'-O-methyluridine-3'-phosphate
  modified_base 6: mod_base = OTHER; note = 2'-O-methylguanosine-3'-phosphate
  modified_base 7: mod_base = OTHER; note = 2'-O-methyluridine-3'-phosphate
  modified_base 8: mod_base = OTHER; note = 2'-O-methyladenosine-3'-phosphate
  modified_base 9: mod_base = OTHER; note = 2'-O-methyladenosine-3'-phosphate
  modified_base 10: mod_base = OTHER; note = 2'-O-methylcytidine-3'-phosphate
  modified_base 11: mod_base = OTHER; note = 2'-O-methyluridine-3'-phosphate
  modified_base 12: mod_base = OTHER; note = 2'-O-methyluridine-3'-phosphorothioate
  modified_base 13: mod_base = OTHER; note = 2'-O-methylguanosine-3'-phosphorothioate
  modified_base 14: mod_base = OTHER; note = 2'-O-methyladenosine
cttttgtaacttga

SEQ ID NO: 2240 - RNA, 14 nt, synthetic construct
  source 1..14: mol_type = other RNA
  modified_base 1: mod_base = OTHER; note = 2'-O-methyluridine-3'-phosphorothioate
  modified_base 2: mod_base = OTHER; note = 2'-fluoroadenosine-3'-phosphorothioate
  modified_base 3: mod_base = OTHER; note = 2'-fluoroguanosine-3'-phosphate
  modified_base 4: mod_base = OTHER; note = 2'-fluoroadenosine-3'-phosphate
  modified_base 5: mod_base = OTHER; note = 2'-O-methylcytidine-3'-phosphate
  modified_base 6: mod_base = OTHER; note = 2'-O-methylcytidine-3'-phosphate
  modified_base 7: mod_base = OTHER; note = 2'-O-methyluridine-3'-phosphate
  modified_base 8: mod_base = OTHER; note = 2'-O-methylguanosine-3'-phosphate
  modified_base 9: mod_base = OTHER; note = 2'-O-methyluridine-3'-phosphate
  modified_base 10: mod_base = OTHER; note = 2'-O-methyluridine-3'-phosphate
  modified_base 11: mod_base = OTHER; note = 2'-O-methyluridine-3'-phosphate
  modified_base 12: mod_base = OTHER; note = 2'-O-methyluridine-3'-phosphorothioate
  modified_base 13: mod_base = OTHER; note = 2'-O-methylguanosine-3'-phosphorothioate
  modified_base 14: mod_base = OTHER; note = 2'-O-methyladenosine
tagacctgttttga

SEQ ID NO: 2241 - RNA, 14 nt, synthetic construct
  source 1..14: mol_type = other RNA
  modified_base 1: mod_base = OTHER; note = 2'-O-methyluridine-3'-phosphorothioate
  modified_base 2: mod_base = OTHER; note = 2'-fluoroguanosine-3'-phosphorothioate
  modified_base 3: mod_base = OTHER; note = 2'-fluoroadenosine-3'-phosphate
  modified_base 4: mod_base = OTHER; note = 2'-fluoroadenosine-3'-phosphate
  modified_base 5: mod_base = OTHER; note = 2'-O-methylguanosine-3'-phosphate
  modified_base 6: mod_base = OTHER; note = 2'-O-methyladenosine-3'-phosphate
  modified_base 7: mod_base = OTHER; note = 2'-O-methyluridine-3'-phosphate
  modified_base 8: mod_base = OTHER; note = 2'-O-methyladenosine-3'-phosphate
  modified_base 9: mod_base = OTHER; note = 2'-O-methyluridine-3'-phosphate
  modified_base 10: mod_base = OTHER; note = 2'-O-methyluridine-3'-phosphate
  modified_base 11: mod_base = OTHER; note = 2'-O-methyluridine-3'-phosphate
  modified_base 12: mod_base = OTHER; note = 2'-O-methyladenosine-3'-phosphorothioate
  modified_base 13: mod_base = OTHER; note = 2'-O-methyluridine-3'-phosphorothioate
  modified_base 14: mod_base = OTHER; note = 2'-O-methyladenosine
tgaagatatttata

SEQ ID NO: 2242 - RNA, 14 nt, synthetic construct
  source 1..14: mol_type = other RNA
  modified_base 1: mod_base = OTHER; note = 2'-O-methyluridine-3'-phosphorothioate
  modified_base 2: mod_base = OTHER; note = 2'-fluorouridine-3'-phosphorothioate
  modified_base 3: mod_base = OTHER; note = 2'-fluorouridine-3'-phosphate
  modified_base 4: mod_base = OTHER; note = 2'-fluoroguanosine-3'-phosphate
  modified_base 5: mod_base = OTHER; note = 2'-O-methylcytidine-3'-phosphate
  modified_base 6: mod_base = OTHER; note = 2'-O-methyluridine-3'-phosphate
  modified_base 7: mod_base = OTHER; note = 2'-O-methyluridine-3'-phosphate
  modified_base 8: mod_base = OTHER; note = 2'-O-methyluridine-3'-phosphate
  modified_base 9: mod_base = OTHER; note = 2'-O-methyluridine-3'-phosphate
  modified_base 10: mod_base = OTHER; note = 2'-O-methylguanosine-3'-phosphate
  modified_base 11: mod_base = OTHER; note = 2'-O-methyluridine-3'-phosphate
  modified_base 12: mod_base = OTHER; note = 2'-O-methyladenosine-3'-phosphorothioate
  modified_base 13: mod_base = OTHER; note = 2'-O-methyladenosine-3'-phosphorothioate
  modified_base 14: mod_base = OTHER; note = 2'-O-methyladenosine
tttgcttttgtaaa

SEQ ID NO: 2243 - RNA, 14 nt, synthetic construct
  source 1..14: mol_type = other RNA
  modified_base 1: mod_base = OTHER; note = 2'-O-methyluridine-3'-phosphorothioate
  modified_base 2: mod_base = OTHER; note = 2'-fluoroguanosine-3'-phosphorothioate
  modified_base 3: mod_base = OTHER; note = 2'-fluorocytidine-3'-phosphate
  modified_base 4: mod_base = OTHER; note = 2'-fluorouridine-3'-phosphate
  modified_base 5: mod_base = OTHER; note = 2'-O-methyluridine-3'-phosphate
  modified_base 6: mod_base = OTHER; note = 2'-O-methyluridine-3'-phosphate
  modified_base 7: mod_base = OTHER; note = 2'-O-methylguanosine-3'-phosphate
  modified_base 8: mod_base = OTHER; note = 2'-O-methyluridine-3'-phosphate
  modified_base 9: mod_base = OTHER; note = 2'-O-methylguanosine-3'-phosphate
  modified_base 10: mod_base = OTHER; note = 2'-O-methyluridine-3'-phosphate
  modified_base 11: mod_base = OTHER; note = 2'-O-methylcytidine-3'-phosphate
  modified_base 12: mod_base = OTHER; note = 2'-O-methyladenosine-3'-phosphorothioate
  modified_base 13: mod_base = OTHER; note = 2'-O-methylcytidine-3'-phosphorothioate
  modified_base 14: mod_base = OTHER; note = 2'-O-methyladenosine
tgctttgtgtcaca

SEQ ID NO: 2244 - RNA, 14 nt, synthetic construct
  source 1..14: mol_type = other RNA
  modified_base 1: mod_base = OTHER; note = 2'-O-methyluridine-3'-phosphorothioate
  modified_base 2: mod_base = OTHER; note = 2'-fluorouridine-3'-phosphorothioate
  modified_base 3: mod_base = OTHER; note = 2'-fluorouridine-3'-phosphate
  modified_base 4: mod_base = OTHER; note = 2'-fluoroguanosine-3'-phosphate
  modified_base 5: mod_base = OTHER; note = 2'-O-methyluridine-3'-phosphate
  modified_base 6: mod_base = OTHER; note = 2'-O-methyladenosine-3'-phosphate
  modified_base 7: mod_base = OTHER; note = 2'-O-methyladenosine-3'-phosphate
  modified_base 8: mod_base = OTHER; note = 2'-O-methylcytidine-3'-phosphate
  modified_base 9: mod_base = OTHER; note = 2'-O-methyluridine-3'-phosphate
  modified_base 10: mod_base = OTHER; note = 2'-O-methyluridine-3'-phosphate
  modified_base 11: mod_base = OTHER; note = 2'-O-methylguanosine-3'-phosphate
  modified_base 12: mod_base = OTHER; note = 2'-O-methyladenosine-3'-phosphorothioate
  modified_base 13: mod_base = OTHER; note = 2'-O-methyladenosine-3'-phosphorothioate
  modified_base 14: mod_base = OTHER; note = 2'-O-methyladenosine
tttgtaacttgaaa

SEQ ID NO: 2245 - RNA, 14 nt, synthetic construct
  source 1..14: mol_type = other RNA
  modified_base 1: mod_base = OTHER; note = 2'-O-methylcytidine-3'-phosphorothioate
  modified_base 2: mod_base = OTHER; note = 2'-fluorouridine-3'-phosphorothioate
  modified_base 3: mod_base = OTHER; note = 2'-fluorouridine-3'-phosphate
  modified_base 4: mod_base = OTHER; note = 2'-fluoroguanosine-3'-phosphate
  modified_base 5: mod_base = OTHER; note = 2'-O-methyladenosine-3'-phosphate
  modified_base 6: mod_base = OTHER; note = 2'-O-methyladenosine-3'-phosphate
  modified_base 7: mod_base = OTHER; note = 2'-O-methylguanosine-3'-phosphate
  modified_base 8: mod_base = OTHER; note = 2'-O-methyladenosine-3'-phosphate
  modified_base 9: mod_base = OTHER; note = 2'-O-methyluridine-3'-phosphate
  modified_base 10: mod_base = OTHER; note = 2'-O-methyladenosine-3'-phosphate
  modified_base 11: mod_base = OTHER; note = 2'-O-methyluridine-3'-phosphate
  modified_base 12: mod_base = OTHER; note = 2'-O-methyluridine-3'-phosphorothioate
  modified_base 13: mod_base = OTHER; note = 2'-O-methyluridine-3'-phosphorothioate
  modified_base 14: mod_base = OTHER; note = 2'-O-methyladenosine
cttgaagatattta

SEQ ID NO: 2246 - RNA, 14 nt, synthetic construct
  source 1..14: mol_type = other RNA
  modified_base 1: mod_base = OTHER; note = 2'-O-methyladenosine-3'-phosphorothioate
  modified_base 2: mod_base = OTHER; note = 2'-fluoroguanosine-3'-phosphorothioate
  modified_base 3: mod_base = OTHER; note = 2'-fluorocytidine-3'-phosphate
  modified_base 4: mod_base = OTHER; note = 2'-fluoroadenosine-3'-phosphate
  modified_base 5: mod_base = OTHER; note = 2'-O-methylguanosine-3'-phosphate
  modified_base 6: mod_base = OTHER; note = 2'-O-methyladenosine-3'-phosphate
  modified_base 7: mod_base = OTHER; note = 2'-O-methylcytidine-3'-phosphate
  modified_base 8: mod_base = OTHER; note = 2'-O-methyladenosine-3'-phosphate
  modified_base 9: mod_base = OTHER; note = 2'-O-methyluridine-3'-phosphate
  modified_base 10: mod_base = OTHER; note = 2'-O-methyluridine-3'-phosphate
  modified_base 11: mod_base = OTHER; note = 2'-O-methyluridine-3'-phosphate
  modified_base 12: mod_base = OTHER; note = 2'-O-methyladenosine-3'-phosphorothioate
  modified_base 13: mod_base = OTHER; note = 2'-O-methyluridine-3'-phosphorothioate
  modified_base 14: mod_base = OTHER; note = 2'-O-methyladenosine
agcagacatttata

SEQ ID NO: 2247 - RNA, 14 nt, synthetic construct
  source 1..14: mol_type = other RNA
  modified_base 1: mod_base = OTHER; note = 2'-O-methylguanosine-3'-phosphorothioate
  modified_base 2: mod_base = OTHER; note = 2'-fluoroguanosine-3'-phosphorothioate
  modified_base 3: mod_base = OTHER; note = 2'-fluoroadenosine-3'-phosphate
  modified_base 4: mod_base = OTHER; note = 2'-fluoroguanosine-3'-phosphate
  modified_base 5: mod_base = OTHER; note = 2'-O-methyluridine-3'-phosphate
  modified_base 6: mod_base = OTHER; note = 2'-O-methyluridine-3'-phosphate
  modified_base 7: mod_base = OTHER; note = 2'-O-methyluridine-3'-phosphate
  modified_base 8: mod_base = OTHER; note = 2'-O-methyladenosine-3'-phosphate
  modified_base 9: mod_base = OTHER; note = 2'-O-methyluridine-3'-phosphate
  modified_base 10: mod_base = OTHER; note = 2'-O-methyluridine-3'-phosphate
  modified_base 11: mod_base = OTHER; note = 2'-O-methylcytidine-3'-phosphate
  modified_base 12: mod_base = OTHER; note = 2'-O-methylguanosine-3'-phosphorothioate
  modified_base 13: mod_base = OTHER; note = 2'-O-methylguanosine-3'-phosphorothioate
  modified_base 14: mod_base = OTHER; note = 2'-O-methyladenosine
ggagtttattcgga

SEQ ID NO: 2248 - RNA, 14 nt, synthetic construct
  source 1..14: mol_type = other RNA
  modified_base 1: mod_base = OTHER; note = 2'-O-methyluridine-3'-phosphorothioate
  modified_base 2: mod_base = OTHER; note = 2'-fluorouridine-3'-phosphorothioate
  modified_base 3: mod_base = OTHER; note = 2'-fluoroadenosine-3'-phosphate
  modified_base 4: mod_base = OTHER; note = 2'-fluoroadenosine-3'-phosphate
  modified_base 5: mod_base = OTHER; note = 2'-O-methyladenosine-3'-phosphate
  modified_base 6: mod_base = OTHER; note = 2'-O-methyladenosine-3'-phosphate
  modified_base 7: mod_base = OTHER; note = 2'-O-methyluridine-3'-phosphate
  modified_base 8: mod_base = OTHER; note = 2'-O-methylguanosine-3'-phosphate
  modified_base 9: mod_base = OTHER; note = 2'-O-methylguanosine-3'-phosphate
  modified_base 10: mod_base = OTHER; note = 2'-O-methyluridine-3'-phosphate
  modified_base 11: mod_base = OTHER; note = 2'-O-methyluridine-3'-phosphate
  modified_base 12: mod_base = OTHER; note = 2'-O-methylcytidine-3'-phosphorothioate
  modified_base 13: mod_base = OTHER; note = 2'-O-methylcytidine-3'-phosphorothioate
  modified_base 14: mod_base = OTHER; note = 2'-O-methyladenosine
ttaaaatggttcca

SEQ ID NO: 2249 - RNA, 14 nt, synthetic construct
  source 1..14: mol_type = other RNA
  modified_base 1: mod_base = OTHER; note = 2'-O-methyladenosine-3'-phosphorothioate
  modified_base 2: mod_base = OTHER; note = 2'-fluorouridine-3'-phosphorothioate
  modified_base 3: mod_base = OTHER; note = 2'-fluoroadenosine-3'-phosphate
  modified_base 4: mod_base = OTHER; note = 2'-fluorouridine-3'-phosphate
  modified_base 5: mod_base = OTHER; note = 2'-O-methyluridine-3'-phosphate
  modified_base 6: mod_base = OTHER; note = 2'-O-methyluridine-3'-phosphate
  modified_base 7: mod_base = OTHER; note = 2'-O-methyladenosine-3'-phosphate
  modified_base 8: mod_base = OTHER; note = 2'-O-methyluridine-3'-phosphate
  modified_base 9: mod_base = OTHER; note = 2'-O-methyluridine-3'-phosphate
  modified_base 10: mod_base = OTHER; note = 2'-O-methylcytidine-3'-phosphate
  modified_base 11: mod_base = OTHER; note = 2'-O-methyluridine-3'-phosphate
  modified_base 12: mod_base = OTHER; note = 2'-O-methylguanosine-3'-phosphorothioate
  modified_base 13: mod_base = OTHER; note = 2'-O-methylguanosine-3'-phosphorothioate
  modified_base 14: mod_base = OTHER; note = 2'-O-methyladenosine
atatttattctgga

SEQ ID NO: 2250 - RNA, 14 nt, synthetic construct
  source 1..14: mol_type = other RNA
  modified_base 1: mod_base = OTHER; note = 2'-O-methyladenosine-3'-phosphorothioate
  modified_base 2: mod_base = OTHER; note = 2'-fluoroadenosine-3'-phosphorothioate
  modified_base 3: mod_base = OTHER; note = 2'-fluorocytidine-3'-phosphate
  modified_base 4: mod_base = OTHER; note = 2'-fluorouridine-3'-phosphate
  modified_base 5: mod_base = OTHER; note = 2'-O-methyluridine-3'-phosphate
  modified_base 6: mod_base = OTHER; note = 2'-O-methylguanosine-3'-phosphate
  modified_base 7: mod_base = OTHER; note = 2'-O-methyladenosine-3'-phosphate
  modified_base 8: mod_base = OTHER; note = 2'-O-methyladenosine-3'-phosphate
  modified_base 9: mod_base = OTHER; note = 2'-O-methylguanosine-3'-phosphate
  modified_base 10: mod_base = OTHER; note = 2'-O-methyladenosine-3'-phosphate
  modified_base 11: mod_base = OTHER; note = 2'-O-methyluridine-3'-phosphate
  modified_base 12: mod_base = OTHER; note = 2'-O-methyladenosine-3'-phosphorothioate
  modified_base 13: mod_base = OTHER; note = 2'-O-methyluridine-3'-phosphorothioate
  modified_base 14: mod_base = OTHER; note = 2'-O-methyladenosine
aacttgaagatata

SEQ ID NO: 2251 - RNA, 14 nt, synthetic construct
  source 1..14: mol_type = other RNA
  modified_base 1: mod_base = OTHER; note = 2'-O-methyladenosine-3'-phosphorothioate
  modified_base 2: mod_base = OTHER; note = 2'-fluoroguanosine-3'-phosphorothioate
  modified_base 3: mod_base = OTHER; note = 2'-fluorocytidine-3'-phosphate
  modified_base 4: mod_base = OTHER; note = 2'-fluoroadenosine-3'-phosphate
  modified_base 5: mod_base = OTHER; note = 2'-O-methylguanosine-3'-phosphate
  modified_base 6: mod_base = OTHER; note = 2'-O-methylguanosine-3'-phosphate
  modified_base 7: mod_base = OTHER; note = 2'-O-methyladenosine-3'-phosphate
  modified_base 8: mod_base = OTHER; note = 2'-O-methyladenosine-3'-phosphate
  modified_base 9: mod_base = OTHER; note = 2'-O-methylcytidine-3'-phosphate
  modified_base 10: mod_base = OTHER; note = 2'-O-methyluridine-3'-phosphate
  modified_base 11: mod_base = OTHER; note = 2'-O-methylguanosine-3'-phosphate
  modified_base 12: mod_base = OTHER; note = 2'-O-methyladenosine-3'-phosphorothioate
  modified_base 13: mod_base = OTHER; note = 2'-O-methylguanosine-3'-phosphorothioate
  modified_base 14: mod_base = OTHER; note = 2'-O-methyladenosine
agcaggaactgaga

SEQ ID NO: 2252 - RNA, 14 nt, synthetic construct
  source 1..14: mol_type = other RNA
  modified_base 1: mod_base = OTHER; note = 2'-O-methylcytidine-3'-phosphorothioate
  modified_base 2: mod_base = OTHER; note = 2'-fluorouridine-3'-phosphorothioate
  modified_base 3: mod_base = OTHER; note = 2'-fluoroguanosine-3'-phosphate
  modified_base 4: mod_base = OTHER; note = 2'-fluoroguanosine-3'-phosphate
  modified_base 5: mod_base = OTHER; note = 2'-O-methylguanosine-3'-phosphate
  modified_base 6: mod_base = OTHER; note = 2'-O-methyluridine-3'-phosphate
  modified_base 7: mod_base = OTHER; note = 2'-O-methyluridine-3'-phosphate
  modified_base 8: mod_base = OTHER; note = 2'-O-methyluridine-3'-phosphate
  modified_base 9: mod_base = OTHER; note = 2'-O-methyluridine-3'-phosphate
  modified_base 10: mod_base = OTHER; note = 2'-O-methylguanosine-3'-phosphate
  modified_base 11: mod_base = OTHER; note = 2'-O-methyluridine-3'-phosphate
  modified_base 12: mod_base = OTHER; note = 2'-O-methyladenosine-3'-phosphorothioate
  modified_base 13: mod_base = OTHER; note = 2'-O-methylguanosine-3'-phosphorothioate
  modified_base 14: mod_base = OTHER; note = 2'-O-methyladenosine
ctgggttttgtaga

SEQ ID NO: 2253 - RNA, 14 nt, synthetic construct
  source 1..14: mol_type = other RNA
  modified_base 1: mod_base = OTHER; note = 2'-O-methylcytidine-3'-phosphorothioate
  modified_base 2: mod_base = OTHER; note = 2'-fluoroadenosine-3'-phosphorothioate
  modified_base 3: mod_base = OTHER; note = 2'-fluorouridine-3'-phosphate
  modified_base 4: mod_base = OTHER; note = 2'-fluorouridine-3'-phosphate
  modified_base 5: mod_base = OTHER; note = 2'-O-methyluridine-3'-phosphate
  modified_base 6: mod_base = OTHER; note = 2'-O-methyladenosine-3'-phosphate
  modified_base 7: mod_base = OTHER; note = 2'-O-methyluridine-3'-phosphate
  modified_base 8: mod_base = OTHER; note = 2'-O-methylcytidine-3'-phosphate
  modified_base 9: mod_base = OTHER; note = 2'-O-methyluridine-3'-phosphate
  modified_base 10: mod_base = OTHER; note = 2'-O-methyluridine-3'-phosphate
  modified_base 11: mod_base = OTHER; note = 2'-O-methyluridine-3'-phosphate
  modified_base 12: mod_base = OTHER; note = 2'-O-methyluridine-3'-phosphorothioate
  modified_base 13: mod_base = OTHER; note = 2'-O-methylguanosine-3'-phosphorothioate
  modified_base 14: mod_base = OTHER; note = 2'-O-methyladenosine
catttatcttttga

SEQ ID NO: 2254 - RNA, 14 nt, synthetic construct
  source 1..14: mol_type = other RNA
  modified_base 1: mod_base = OTHER; note = 2'-O-methyladenosine-3'-phosphorothioate
  modified_base 2: mod_base = OTHER; note = 2'-fluoroguanosine-3'-phosphorothioate
  modified_base 3: mod_base = OTHER; note = 2'-fluorouridine-3'-phosphate
  modified_base 4: mod_base = OTHER; note = 2'-fluorouridine-3'-phosphate
  modified_base 5: mod_base = OTHER; note = 2'-O-methyluridine-3'-phosphate
  modified_base 6: mod_base = OTHER; note = 2'-O-methyladenosine-3'-phosphate
  modified_base 7: mod_base = OTHER; note = 2'-O-methyluridine-3'-phosphate
  modified_base 8: mod_base = OTHER; note = 2'-O-methyluridine-3'-phosphate
  modified_base 9: mod_base = OTHER; note = 2'-O-methylcytidine-3'-phosphate
  modified_base 10: mod_base = OTHER; note = 2'-O-methylguanosine-3'-phosphate
  modified_base 11: mod_base = OTHER; note = 2'-O-methylguanosine-3'-phosphate
  modified_base 12: mod_base = OTHER; note = 2'-O-methyladenosine-3'-phosphorothioate
  modified_base 13: mod_base = OTHER; note = 2'-O-methyladenosine-3'-phosphorothioate
  modified_base 14: mod_base = OTHER; note = 2'-O-methyladenosine
agtttattcggaaa

SEQ ID NO: 2255 - RNA, 14 nt, synthetic construct
  source 1..14: mol_type = other RNA
  modified_base 1: mod_base = OTHER; note = 2'-O-methylguanosine-3'-phosphorothioate
  modified_base 2: mod_base = OTHER; note = 2'-fluoroguanosine-3'-phosphorothioate
  modified_base 3: mod_base = OTHER; note = 2'-fluoroadenosine-3'-phosphate
  modified_base 4: mod_base = OTHER; note = 2'-fluoroadenosine-3'-phosphate
  modified_base 5: mod_base = OTHER; note = 2'-O-methylcytidine-3'-phosphate
  modified_base 6: mod_base = OTHER; note = 2'-O-methyluridine-3'-phosphate
  modified_base 7: mod_base = OTHER; note = 2'-O-methylguanosine-3'-phosphate
  modified_base 8: mod_base = OTHER; note = 2'-O-methyladenosine-3'-phosphate
  modified_base 9: mod_base = OTHER; note = 2'-O-methylguanosine-3'-phosphate
  modified_base 10: mod_base = OTHER; note = 2'-O-methylcytidine-3'-phosphate
  modified_base 11: mod_base = OTHER; note = 2'-O-methylcytidine-3'-phosphate
  modified_base 12: mod_base = OTHER; note = 2'-O-methyladenosine-3'-phosphorothioate
  modified_base 13: mod_base = OTHER; note = 2'-O-methylguanosine-3'-phosphorothioate
  modified_base 14: mod_base = OTHER; note = 2'-O-methyladenosine
ggaactgagccaga

SEQ ID NO: 2256 - RNA, 14 nt, synthetic construct
  source 1..14: mol_type = other RNA
  modified_base 1: mod_base = OTHER; note = 2'-O-methyladenosine-3'-phosphorothioate
  modified_base 2: mod_base = OTHER; note = 2'-fluorouridine-3'-phosphorothioate
  modified_base 3: mod_base = OTHER; note = 2'-fluoroguanosine-3'-phosphate
  modified_base 4: mod_base = OTHER; note = 2'-fluoroadenosine-3'-phosphate
  modified_base 5: mod_base = OTHER; note = 2'-O-methyluridine-3'-phosphate
  modified_base 6: mod_base = OTHER; note = 2'-O-methylguanosine-3'-phosphate
  modified_base 7: mod_base = OTHER; note = 2'-O-methylcytidine-3'-phosphate
  modified_base 8: mod_base = OTHER; note = 2'-O-methyluridine-3'-phosphate
  modified_base 9: mod_base = OTHER; note = 2'-O-methylguanosine-3'-phosphate
  modified_base 10: mod_base = OTHER; note = 2'-O-methyluridine-3'-phosphate
  modified_base 11: mod_base = OTHER; note = 2'-O-methylcytidine-3'-phosphate
  modified_base 12: mod_base = OTHER; note = 2'-O-methyluridine-3'-phosphorothioate
  modified_base 13: mod_base = OTHER; note = 2'-O-methylguanosine-3'-phosphorothioate
  modified_base 14: mod_base = OTHER; note = 2'-O-methyladenosine
atgatgctgtctga

SEQ ID NO: 2257 - RNA, 14 nt, synthetic construct
  source 1..14: mol_type = other RNA
  modified_base 1: mod_base = OTHER; note = 2'-O-methyladenosine-3'-phosphorothioate
  modified_base 2: mod_base = OTHER; note = 2'-fluoroguanosine-3'-phosphorothioate
  modified_base 3: mod_base = OTHER; note = 2'-fluorocytidine-3'-phosphate
  modified_base 4: mod_base = OTHER; note = 2'-fluoroadenosine-3'-phosphate
  modified_base 5: mod_base = OTHER; note = 2'-O-methyluridine-3'-phosphate
  modified_base 6: mod_base = OTHER; note = 2'-O-methylguanosine-3'-phosphate
  modified_base 7: mod_base = OTHER; note = 2'-O-methylguanosine-3'-phosphate
  modified_base 8: mod_base = OTHER; note = 2'-O-methyladenosine-3'-phosphate
  modified_base 9: mod_base = OTHER; note = 2'-O-methyladenosine-3'-phosphate
  modified_base 10: mod_base = OTHER; note = 2'-O-methyluridine-3'-phosphate
  modified_base 11: mod_base = OTHER; note = 2'-O-methylcytidine-3'-phosphate
  modified_base 12: mod_base = OTHER; note = 2'-O-methylcytidine-3'-phosphorothioate
  modified_base 13: mod_base = OTHER; note = 2'-O-methylcytidine-3'-phosphorothioate
  modified_base 14: mod_base = OTHER; note = 2'-O-methyladenosine
agcatggaatccca

SEQ ID NO: 2258 - RNA, 19 nt, synthetic construct
  source 1..19: mol_type = other RNA
  modified_base 1: mod_base = OTHER; note = 2'-O-methyluridine-3'-phosphorothioate
  modified_base 2: mod_base = OTHER; note = 2'-O-methylcytidine-3'-phosphorothioate
  modified_base 3: mod_base = OTHER; note = 2'-O-methyluridine-3'-phosphate
  modified_base 4: mod_base = OTHER; note = 2'-O-methyluridine-3'-phosphate
  modified_base 5: mod_base = OTHER; note = 2'-O-methylcytidine-3'-phosphate
  modified_base 6: mod_base = OTHER; note = 2'-O-methyladenosine-3'-phosphate
  modified_base 7: mod_base = OTHER; note = 2'-O-methyladenosine-3'-phosphate
  modified_base 8: mod_base = OTHER; note = 2'-O-methylguanosine-3'-phosphate
  modified_base 9: mod_base = OTHER; note = 2'-O-methyluridine-3'-phosphate
  modified_base 10: mod_base = OTHER; note = 2'-O-methyluridine-3'-phosphate
  modified_base 11: mod_base = OTHER; note = 2'-O-methyladenosine-3'-phosphate
  modified_base 12: mod_base = OTHER; note = 2'-O-methylcytidine-3'-phosphate
  modified_base 13: mod_base = OTHER; note = 2'-O-methyladenosine-3'-phosphate
  modified_base 14: mod_base = OTHER; note = 2'-fluoroadenosine-3'-phosphorothioate
  modified_base 15: mod_base = OTHER; note = 2'-O-methyladenosine-3'-phosphorothioate
  modified_base 16: mod_base = OTHER; note = 2'-O-methyladenosine-3'-phosphorothioate
  modified_base 17: mod_base = OTHER; note = 2'-O-methylguanosine-3'-phosphorothioate
  modified_base 18: mod_base = OTHER; note = 2'-O-methylcytidine-3'-phosphorothioate
tcttcaagttacaaaagca

SEQ ID NO: 2259 - RNA, 19 nt, synthetic construct
  source 1..19: mol_type = other RNA
  modified_base 1: mod_base = OTHER; note = 2'-O-methyluridine-3'-phosphorothioate
  modified_base 2: mod_base = OTHER; note = 2'-O-methyladenosine-3'-phosphorothioate
  modified_base 3: mod_base = OTHER; note = 2'-O-methyladenosine-3'-phosphate
  modified_base 4: mod_base = OTHER; note = 2'-O-methyladenosine-3'-phosphate
  modified_base 5: mod_base = OTHER; note = 2'-O-methyladenosine-3'-phosphate
  modified_base 6: mod_base = OTHER; note = 2'-O-methylguanosine-3'-phosphate
  modified_base 7: mod_base = OTHER; note = 2'-O-methylcytidine-3'-phosphate
  modified_base 8: mod_base = OTHER; note = 2'-O-methyladenosine-3'-phosphate
  modified_base 9: mod_base = OTHER; note = 2'-O-methyladenosine-3'-phosphate
  modified_base 10: mod_base = OTHER; note = 2'-O-methyladenosine-3'-phosphate
  modified_base 11: mod_base = OTHER; note = 2'-O-methyladenosine-3'-phosphate
  modified_base 12: mod_base = OTHER; note = 2'-O-methylcytidine-3'-phosphate
  modified_base 13: mod_base = OTHER; note = 2'-O-methyladenosine-3'-phosphate
  modified_base 14: mod_base = OTHER; note = 2'-fluoroguanosine-3'-phosphorothioate
  modified_base 15: mod_base = OTHER; note = 2'-O-methylguanosine-3'-phosphorothioate
  modified_base 16: mod_base = OTHER; note = 2'-O-methyluridine-3'-phosphorothioate
  modified_base 17: mod_base = OTHER; note = 2'-O-methylcytidine-3'-phosphorothioate
  modified_base 18: mod_base = OTHER; note = 2'-O-methyluridine-3'-phosphorothioate
taaaagcaaaacaggtcta

SEQ ID NO: 2260 - RNA, 19 nt, synthetic construct
  source 1..19: mol_type = other RNA
  modified_base 1: mod_base = OTHER; note = 2'-O-methyluridine-3'-phosphorothioate
  modified_base 2: mod_base = OTHER; note = 2'-O-methyladenosine-3'-phosphorothioate
  modified_base 3: mod_base = OTHER; note = 2'-O-methylcytidine-3'-phosphate
  modified_base 4: mod_base = OTHER; note = 2'-O-methyladenosine-3'-phosphate
  modified_base 5: mod_base = OTHER; note = 2'-O-methyladenosine-3'-phosphate
  modified_base 6: mod_base = OTHER; note = 2'-O-methyladenosine-3'-phosphate
  modified_base 7: mod_base = OTHER; note = 2'-O-methyladenosine-3'-phosphate
  modified_base 8: mod_base = OTHER; note = 2'-O-methylguanosine-3'-phosphate
  modified_base 9: mod_base = OTHER; note = 2'-O-methylcytidine-3'-phosphate
  modified_base 10: mod_base = OTHER; note = 2'-O-methyladenosine-3'-phosphate
  modified_base 11: mod_base = OTHER; note = 2'-O-methyladenosine-3'-phosphate
  modified_base 12: mod_base = OTHER; note = 2'-O-methyladenosine-3'-phosphate
  modified_base 13: mod_base = OTHER; note = 2'-O-methyladenosine-3'-phosphate
  modified_base 14: mod_base = OTHER; note = 2'-fluorocytidine-3'-phosphorothioate
  modified_base 15: mod_base = OTHER; note = 2'-O-methyladenosine-3'-phosphorothioate
  modified_base 16: mod_base = OTHER; note = 2'-O-methylguanosine-3'-phosphorothioate
  modified_base 17: mod_base = OTHER; note = 2'-O-methylguanosine-3'-phosphorothioate
  modified_base 18: mod_base = OTHER; note = 2'-O-methyluridine-3'-phosphorothioate
tacaaaagcaaaacaggtc

SEQ ID NO: 2261 - RNA, 19 nt, synthetic construct
  source 1..19: mol_type = other RNA
  modified_base 1: mod_base = OTHER; note = 2'-O-methyluridine-3'-phosphorothioate
  modified_base 2: mod_base = OTHER; note = 2'-O-methylguanosine-3'-phosphorothioate
  modified_base 3: mod_base = OTHER; note = 2'-O-methylcytidine-3'-phosphate
  modified_base 4: mod_base = OTHER; note = 2'-O-methyladenosine-3'-phosphate
  modified_base 5: mod_base = OTHER; note = 2'-O-methyladenosine-3'-phosphate
  modified_base 6: mod_base = OTHER; note = 2'-O-methyladenosine-3'-phosphate
  modified_base 7: mod_base = OTHER; note = 2'-O-methyladenosine-3'-phosphate
  modified_base 8: mod_base = OTHER; note = 2'-O-methylcytidine-3'-phosphate
  modified_base 9: mod_base = OTHER; note = 2'-O-methyladenosine-3'-phosphate
  modified_base 10: mod_base = OTHER; note = 2'-O-methylguanosine-3'-phosphate
  modified_base 11: mod_base = OTHER; note = 2'-O-methylguanosine-3'-phosphate
  modified_base 12: mod_base = OTHER; note = 2'-O-methyluridine-3'-phosphate
  modified_base 13: mod_base = OTHER; note = 2'-O-methylcytidine-3'-phosphate
  modified_base 14: mod_base = OTHER; note = 2'-fluorouridine-3'-phosphorothioate
  modified_base 15: mod_base = OTHER; note = 2'-O-methyladenosine-3'-phosphorothioate
  modified_base 16: mod_base = OTHER; note = 2'-O-methylguanosine-3'-phosphorothioate
  modified_base 17: mod_base = OTHER; note = 2'-O-methyladenosine-3'-phosphorothioate
  modified_base 18: mod_base = OTHER; note = 2'-O-methyladenosine-3'-phosphorothioate
tgcaaaacaggtctagaaa

SEQ ID NO: 2262 - RNA, 19 nt, synthetic construct
  source 1..19: mol_type = other RNA
  modified_base 1: mod_base = OTHER; note = 2'-O-methyluridine-3'-phosphorothioate
  modified_base 2: mod_base = OTHER; note = 2'-O-methylcytidine-3'-phosphorothioate
  modified_base 3: mod_base = OTHER; note = 2'-O-methyladenosine-3'-phosphate
  modified_base 4: mod_base = OTHER; note = 2'-O-methyladenosine-3'-phosphate
  modified_base 5: mod_base = OTHER; note = 2'-O-methyladenosine-3'-phosphate
  modified_base 6: mod_base = OTHER; note = 2'-O-methyladenosine-3'-phosphate
  modified_base 7: mod_base = OTHER; note = 2'-O-methylguanosine-3'-phosphate
  modified_base 8: mod_base = OTHER; note = 2'-O-methylcytidine-3'-phosphate
  modified_base 9: mod_base = OTHER; note = 2'-O-methyladenosine-3'-phosphate
  modified_base 10: mod_base = OTHER; note = 2'-O-methyladenosine-3'-phosphate
  modified_base 11: mod_base = OTHER; note = 2'-O-methyladenosine-3'-phosphate
  modified_base 12: mod_base = OTHER; note = 2'-O-methyladenosine-3'-phosphate
  modified_base 13: mod_base = OTHER; note = 2'-O-methylcytidine-3'-phosphate
  modified_base 14: mod_base = OTHER; note = 2'-fluoroadenosine-3'-phosphorothioate
  modified_base 15: mod_base = OTHER; note = 2'-O-methylguanosine-3'-phosphorothioate
  modified_base 16: mod_base = OTHER; note = 2'-O-methylguanosine-3'-phosphorothioate
  modified_base 17: mod_base = OTHER; note = 2'-O-methyluridine-3'-phosphorothioate
  modified_base 18: mod_base = OTHER; note = 2'-O-methylcytidine-3'-phosphorothioate
tcaaaagcaaaacaggtct

SEQ ID NO: 2263 - RNA, 19 nt, synthetic construct
  source 1..19: mol_type = other RNA
  modified_base 1: mod_base = OTHER; note = 2'-O-methyluridine-3'-phosphorothioate
  modified_base 2: mod_base = OTHER; note = 2'-O-methyladenosine-3'-phosphorothioate
  modified_base 3: mod_base = OTHER; note = 2'-O-methylguanosine-3'-phosphate
  modified_base 4: mod_base = OTHER; note = 2'-O-methyladenosine-3'-phosphate
  modified_base 5: mod_base = OTHER; note = 2'-O-methyladenosine-3'-phosphate
  modified_base 6: mod_base = OTHER; note = 2'-O-methyluridine-3'-phosphate
  modified_base 7: mod_base = OTHER; note = 2'-O-methyladenosine-3'-phosphate
  modified_base 8: mod_base = OTHER; note = 2'-O-methyladenosine-3'-phosphate
  modified_base 9: mod_base = OTHER; note = 2'-O-methyladenosine-3'-phosphate
  modified_base 10: mod_base = OTHER; note = 2'-O-methyluridine-3'-phosphate
  modified_base 11: mod_base = OTHER; note = 2'-O-methyladenosine-3'-phosphate
  modified_base 12: mod_base = OTHER; note = 2'-O-methyluridine-3'-phosphate
  modified_base 13: mod_base = OTHER; note = 2'-O-methylcytidine-3'-phosphate
  modified_base 14: mod_base = OTHER; note = 2'-fluorouridine-3'-phosphorothioate
  modified_base 15: mod_base = OTHER; note = 2'-O-methyluridine-3'-phosphorothioate
  modified_base 16: mod_base = OTHER; note = 2'-O-methylcytidine-3'-phosphorothioate
  modified_base 17: mod_base = OTHER; note = 2'-O-methyladenosine-3'-phosphorothioate
  modified_base 18: mod_base = OTHER; note = 2'-O-methyladenosine-3'-phosphorothioate
tagaataaatatcttcaag

SEQ ID NO: 2264 - RNA, 19 nt, synthetic construct
  source 1..19: mol_type = other RNA
  modified_base 1: mod_base = OTHER; note = 2'-O-methyluridine-3'-phosphorothioate
  modified_base 2: mod_base = OTHER; note = 2'-O-methyladenosine-3'-phosphorothioate
  modified_base 3: mod_base = OTHER; note = 2'-O-methyladenosine-3'-phosphate
  modified_base 4: mod_base = OTHER; note = 2'-O-methyladenosine-3'-phosphate
  modified_base 5: mod_base = OTHER; note = 2'-O-methylguanosine-3'-phosphate
  modified_base 6: mod_base = OTHER; note = 2'-O-methylcytidine-3'-phosphate
  modified_base 7: mod_base = OTHER; note = 2'-O-methyladenosine-3'-phosphate
  modified_base 8: mod_base = OTHER; note = 2'-O-methyladenosine-3'-phosphate
  modified_base 9: mod_base = OTHER; note = 2'-O-methyladenosine-3'-phosphate
  modified_base 10: mod_base = OTHER; note = 2'-O-methyladenosine-3'-phosphate
  modified_base 11: mod_base = OTHER; note = 2'-O-methylcytidine-3'-phosphate
  modified_base 12: mod_base = OTHER; note = 2'-O-methyladenosine-3'-phosphate
  modified_base 13: mod_base = OTHER; note = 2'-O-methylguanosine-3'-phosphate
  modified_base 14: mod_base = OTHER; note = 2'-fluoroguanosine-3'-phosphorothioate
  modified_base 15: mod_base = OTHER; note = 2'-O-methyluridine-3'-phosphorothioate
  modified_base 16: mod_base = OTHER; note = 2'-O-methylcytidine-3'-phosphorothioate
  modified_base 17: mod_base = OTHER; note = 2'-O-methyluridine-3'-phosphorothioate
  modified_base 18: mod_base = OTHER; note = 2'-O-methyladenosine-3'-phosphorothioate
taaagcaaaacaggtctag

SEQ ID NO: 2265 - RNA, 19 nt, synthetic construct
  source 1..19: mol_type = other RNA
  modified_base 1: mod_base = OTHER; note = 2'-O-methyluridine-3'-phosphorothioate
  modified_base 2: mod_base = OTHER; note = 2'-O-methyluridine-3'-phosphorothioate
  modified_base 3: mod_base = OTHER; note = 2'-O-methylcytidine-3'-phosphate
  modified_base 4: mod_base = OTHER; note = 2'-O-methyluridine-3'-phosphate
  modified_base 5: mod_base = OTHER; note = 2'-O-methyluridine-3'-phosphate
  modified_base 6: mod_base = OTHER; note = 2'-O-methylcytidine-3'-phosphate
  modified_base 7: mod_base = OTHER; note = 2'-O-methyladenosine-3'-phosphate
  modified_base 8: mod_base = OTHER; note = 2'-O-methyladenosine-3'-phosphate
  modified_base 9: mod_base = OTHER; note = 2'-O-methylguanosine-3'-phosphate
  modified_base 10: mod_base = OTHER; note = 2'-O-methyluridine-3'-phosphate
  modified_base 11: mod_base = OTHER; note = 2'-O-methyluridine-3'-phosphate
  modified_base 12: mod_base = OTHER; note = 2'-O-methyladenosine-3'-phosphate
  modified_base 13: mod_base = OTHER; note = 2'-O-methylcytidine-3'-phosphate
  modified_base 14: mod_base = OTHER; note = 2'-fluoroadenosine-3'-phosphorothioate
  modified_base 15: mod_base = OTHER; note = 2'-O-methyladenosine-3'-phosphorothioate
  modified_base 16: mod_base = OTHER; note = 2'-O-methyladenosine-3'-phosphorothioate
  modified_base 17: mod_base = OTHER; note = 2'-O-methyladenosine-3'-phosphorothioate
  modified_base 18: mod_base = OTHER; note = 2'-O-methylguanosine-3'-phosphorothioate
ttcttcaagttacaaaagc

SEQ ID NO: 2266 - RNA, 19 nt, synthetic construct
  source 1..19: mol_type = other RNA
  modified_base 1: mod_base = OTHER; note = 2'-O-methyluridine-3'-phosphorothioate
  modified_base 2: mod_base = OTHER; note = 2'-O-methylcytidine-3'-phosphorothioate
  modified_base 3: mod_base = OTHER; note = 2'-O-methyladenosine-3'-phosphate
  modified_base 4: mod_base = OTHER; note = 2'-O-methyladenosine-3'-phosphate
  modified_base 5: mod_base = OTHER; note = 2'-O-methylguanosine-3'-phosphate
  modified_base 6: mod_base = OTHER; note = 2'-O-methyluridine-3'-phosphate
  modified_base 7: mod_base = OTHER; note = 2'-O-methyluridine-3'-phosphate
  modified_base 8: mod_base = OTHER; note = 2'-O-methyladenosine-3'-phosphate
  modified_base 9: mod_base = OTHER; note = 2'-O-methylcytidine-3'-phosphate
  modified_base 10: mod_base = OTHER; note = 2'-O-methyladenosine-3'-phosphate
  modified_base 11: mod_base = OTHER; note = 2'-O-methyladenosine-3'-phosphate
  modified_base 12: mod_base = OTHER; note = 2'-O-methyladenosine-3'-phosphate
  modified_base 13: mod_base = OTHER; note = 2'-O-methyladenosine-3'-phosphate
  modified_base 14: mod_base = OTHER; note = 2'-fluoroguanosine-3'-phosphorothioate
  modified_base 15: mod_base = OTHER; note = 2'-O-methylcytidine-3'-phosphorothioate
  modified_base 16: mod_base = OTHER; note = 2'-O-methyladenosine-3'-phosphorothioate
  modified_base 17: mod_base = OTHER; note = 2'-O-methyladenosine-3'-phosphorothioate
  modified_base 18: mod_base = OTHER; note = 2'-O-methyladenosine-3'-phosphorothioate
tcaagttacaaaagcaaaa

SEQ ID NO: 2267 - RNA, 19 nt, synthetic construct
  source 1..19: mol_type = other RNA
  modified_base 1: mod_base = OTHER; note = 2'-O-methyluridine-3'-phosphorothioate
  modified_base 2: mod_base = OTHER; note = 2'-O-methylcytidine-3'-phosphorothioate
  modified_base 3: mod_base = OTHER; note = 2'-O-methyladenosine-3'-phosphate
  modified_base 4: mod_base = OTHER; note = 2'-O-methyladenosine-3'-phosphate
  modified_base 5: mod_base = OTHER; note = 2'-O-methyladenosine-3'-phosphate
  modified_base 6: mod_base = OTHER; note = 2'-O-methyladenosine-3'-phosphate
  modified_base 7: mod_base = OTHER; note = 2'-O-methylcytidine-3'-phosphate
  modified_base 8: mod_base = OTHER; note = 2'-O-methyladenosine-3'-phosphate
  modified_base 9: mod_base = OTHER; note = 2'-O-methylguanosine-3'-phosphate
  modified_base 10: mod_base = OTHER; note = 2'-O-methylguanosine-3'-phosphate
  modified_base 11: mod_base = OTHER; note = 2'-O-methyluridine-3'-phosphate
  modified_base 12: mod_base = OTHER; note = 2'-O-methylcytidine-3'-phosphate
  modified_base 13: mod_base = OTHER; note = 2'-O-methyluridine-3'-phosphate
  modified_base 14: mod_base = OTHER; note = 2'-fluoroadenosine-3'-phosphorothioate
  modified_base 15: mod_base = OTHER; note = 2'-O-methylguanosine-3'-phosphorothioate
  modified_base 16: mod_base = OTHER; note = 2'-O-methyladenosine-3'-phosphorothioate
  modified_base 17: mod_base = OTHER; note = 2'-O-methyladenosine-3'-phosphorothioate
  modified_base 18: mod_base = OTHER; note = 2'-O-methyladenosine-3'-phosphorothioate
tcaaaacaggtctagaaaa

SEQ ID NO: 2268 - RNA, 19 nt, synthetic construct
  source 1..19: mol_type = other RNA
  modified_base 1: mod_base = OTHER; note = 2'-O-methyluridine-3'-phosphorothioate
  modified_base 2: mod_base = OTHER; note = 2'-O-methyladenosine-3'-phosphorothioate
  modified_base 3: mod_base = OTHER; note = 2'-O-methyluridine-3'-phosphate
  modified_base 4: mod_base = OTHER; note = 2'-O-methyladenosine-3'-phosphate
  modified_base 5: mod_base = OTHER; note = 2'-O-methyladenosine-3'-phosphate
  modified_base 6: mod_base = OTHER; note = 2'-O-methyladenosine-3'-phosphate
  modified_base 7: mod_base = OTHER; note = 2'-O-methyluridine-3'-phosphate
  modified_base 8: mod_base = OTHER; note = 2'-O-methyladenosine-3'-phosphate
  modified_base 9: mod_base = OTHER; note = 2'-O-methyluridine-3'-phosphate
  modified_base 10: mod_base = OTHER; note = 2'-O-methylcytidine-3'-phosphate
  modified_base 11: mod_base = OTHER; note = 2'-O-methyluridine-3'-phosphate
  modified_base 12: mod_base = OTHER; note = 2'-O-methyluridine-3'-phosphate
  modified_base 13: mod_base = OTHER; note = 2'-O-methylcytidine-3'-phosphate
  modified_base 14: mod_base = OTHER; note = 2'-fluoroadenosine-3'-phosphorothioate
  modified_base 15: mod_base = OTHER; note = 2'-O-methyladenosine-3'-phosphorothioate
  modified_base 16: mod_base = OTHER; note = 2'-O-methylguanosine-3'-phosphorothioate
  modified_base 17: mod_base = OTHER; note = 2'-O-methyluridine-3'-phosphorothioate
  modified_base 18: mod_base = OTHER; note = 2'-O-methyluridine-3'-phosphorothioate
tataaatatcttcaagtta

SEQ ID NO: 2269 - RNA, 19 nt, synthetic construct
  source 1..19: mol_type = other RNA
  modified_base 1: mod_base = OTHER; note = 2'-O-methyluridine-3'-phosphorothioate
  modified_base 2: mod_base = OTHER; note = 2'-O-methyluridine-3'-phosphorothioate
  modified_base 3: mod_base = OTHER; note = 2'-O-methyluridine-3'-phosphate
  modified_base 4: mod_base = OTHER; note = 2'-O-methyladenosine-3'-phosphate
  modified_base 5: mod_base = OTHER; note = 2'-O-methylcytidine-3'-phosphate
  modified_base 6: mod_base = OTHER; note = 2'-O-methyladenosine-3'-phosphate
  modified_base 7: mod_base = OTHER; note = 2'-O-methyladenosine-3'-phosphate
  modified_base 8: mod_base = OTHER; note = 2'-O-methyladenosine-3'-phosphate
  modified_base 9: mod_base = OTHER; note = 2'-O-methyladenosine-3'-phosphate
  modified_base 10: mod_base = OTHER; note = 2'-O-methylguanosine-3'-phosphate
  modified_base 11: mod_base = OTHER; note = 2'-O-methylcytidine-3'-phosphate
  modified_base 12: mod_base = OTHER; note = 2'-O-methyladenosine-3'-phosphate
  modified_base 13: mod_base = OTHER; note = 2'-O-methyladenosine-3'-phosphate
  modified_base 14: mod_base = OTHER; note = 2'-fluoroadenosine-3'-phosphorothioate
  modified_base 15: mod_base = OTHER; note = 2'-O-methyladenosine-3'-phosphorothioate
  modified_base 16: mod_base = OTHER; note = 2'-O-methylcytidine-3'-phosphorothioate
  modified_base 17: mod_base = OTHER; note = 2'-O-methyladenosine-3'-phosphorothioate
  modified_base 18: mod_base = OTHER; note = 2'-O-methylguanosine-3'-phosphorothioate
tttacaaaagcaaaacagg

SEQ ID NO: 2270 - RNA, 19 nt, synthetic construct
  source 1..19: mol_type = other RNA
  modified_base 1: mod_base = OTHER; note = 2'-O-methyluridine-3'-phosphorothioate
  modified_base 2: mod_base = OTHER; note = 2'-O-methylguanosine-3'-phosphorothioate
  modified_base 3: mod_base = OTHER; note = 2'-O-methyluridine-3'-phosphate
  modified_base 4: mod_base = OTHER; note = 2'-O-methylguanosine-3'-phosphate
  modified_base 5: mod_base = OTHER; note = 2'-O-methyladenosine-3'-phosphate
  modified_base 6: mod_base = OTHER; note = 2'-O-methylcytidine-3'-phosphate
  modified_base 7: mod_base = OTHER; note = 2'-O-methyladenosine-3'-phosphate
  modified_base 8: mod_base = OTHER; note = 2'-O-methylcytidine-3'-phosphate
  modified_base 9: mod_base = OTHER; note = 2'-O-methyladenosine-3'-phosphate
  modified_base 10: mod_base = OTHER; note = 2'-O-methyladenosine-3'-phosphate
  modified_base 11: mod_base = OTHER; note = 2'-O-methyladenosine-3'-phosphate
  modified_base 12: mod_base = OTHER; note = 2'-O-methylguanosine-3'-phosphate
  modified_base 13: mod_base = OTHER; note = 2'-O-methylcytidine-3'-phosphate
  modified_base 14: mod_base = OTHER; note = 2'-fluoroadenosine-3'-phosphorothioate
  modified_base 15: mod_base = OTHER; note = 2'-O-methylguanosine-3'-phosphorothioate
  modified_base 16: mod_base = OTHER; note = 2'-O-methylguanosine-3'-phosphorothioate
  modified_base 17: mod_base = OTHER; note = 2'-O-methyluridine-3'-phosphorothioate
  modified_base 18: mod_base = OTHER; note = 2'-O-methylguanosine-3'-phosphorothioate
tgtgacacaaagcaggtgc

SEQ ID NO: 2271 - RNA, 19 nt, synthetic construct
  source 1..19: mol_type = other RNA
  modified_base 1: mod_base = OTHER; note = 2'-O-methyluridine-3'-phosphorothioate
  modified_base 2: mod_base = OTHER; note = 2'-O-methyluridine-3'-phosphorothioate
  modified_base 3: mod_base = OTHER; note = 2'-O-methyluridine-3'-phosphate
  modified_base 4: mod_base = OTHER; note = 2'-O-methylcytidine-3'-phosphate
  modified_base 5: mod_base = OTHER; note = 2'-O-methyladenosine-3'-phosphate
  modified_base 6: mod_base = OTHER; note = 2'-O-methyladenosine-3'-phosphate
  modified_base 7: mod_base = OTHER; note = 2'-O-methylguanosine-3'-phosphate
  modified_base 8: mod_base = OTHER; note = 2'-O-methyluridine-3'-phosphate
  modified_base 9: mod_base = OTHER; note = 2'-O-methyluridine-3'-phosphate
  modified_base 10: mod_base = OTHER; note = 2'-O-methyladenosine-3'-phosphate
  modified_base 11: mod_base = OTHER; note = 2'-O-methylcytidine-3'-phosphate
  modified_base 12: mod_base = OTHER; note = 2'-O-methyladenosine-3'-phosphate
  modified_base 13: mod_base = OTHER; note = 2'-O-methyladenosine-3'-phosphate
  modified_base 14: mod_base = OTHER; note = 2'-fluoroadenosine-3'-phosphorothioate
  modified_base 15: mod_base = OTHER; note = 2'-O-methyladenosine-3'-phosphorothioate
  modified_base 16: mod_base = OTHER; note = 2'-O-methylguanosine-3'-phosphorothioate
  modified_base 17: mod_base = OTHER; note = 2'-O-methylcytidine-3'-phosphorothioate
  modified_base 18: mod_base = OTHER; note = 2'-O-methyladenosine-3'-phosphorothioate
tttcaagttacaaaagcaa

SEQ ID NO: 2272 - RNA, 19 nt, synthetic construct
  source 1..19: mol_type = other RNA
  modified_base 1: mod_base = OTHER; note = 2'-O-methyluridine-3'-phosphorothioate
  modified_base 2: mod_base = OTHER; note = 2'-O-methyladenosine-3'-phosphorothioate
  modified_base 3: mod_base = OTHER; note = 2'-O-methyladenosine-3'-phosphate
  modified_base 4: mod_base = OTHER; note = 2'-O-methyladenosine-3'-phosphate
  modified_base 5: mod_base = OTHER; note = 2'-O-methyluridine-3'-phosphate
  modified_base 6: mod_base = OTHER; note = 2'-O-methyladenosine-3'-phosphate
  modified_base 7: mod_base = OTHER; note = 2'-O-methyluridine-3'-phosphate
  modified_base 8: mod_base = OTHER; note = 2'-O-methylcytidine-3'-phosphate
  modified_base 9: mod_base = OTHER; note = 2'-O-methyluridine-3'-phosphate
  modified_base 10: mod_base = OTHER; note = 2'-O-methyluridine-3'-phosphate
  modified_base 11: mod_base = OTHER; note = 2'-O-methylcytidine-3'-phosphate
  modified_base 12: mod_base = OTHER; note = 2'-O-methyladenosine-3'-phosphate
  modified_base 13: mod_base = OTHER; note = 2'-O-methyladenosine-3'-phosphate
  modified_base 14: mod_base = OTHER; note = 2'-fluoroguanosine-3'-phosphorothioate
  modified_base 15: mod_base = OTHER; note = 2'-O-methyluridine-3'-phosphorothioate
  modified_base 16: mod_base = OTHER; note = 2'-O-methyluridine-3'-phosphorothioate
  modified_base 17: mod_base = OTHER; note = 2'-O-methyladenosine-3'-phosphorothioate
  modified_base 18: mod_base = OTHER; note = 2'-O-methylcytidine-3'-phosphorothioate
taaatatcttcaagttaca

SEQ ID NO: 2273 - RNA, 19 nt, synthetic construct
  source 1..19: mol_type = other RNA
  modified_base 1: mod_base = OTHER; note = 2'-O-methyluridine-3'-phosphorothioate
  modified_base 2: mod_base = OTHER; note = 2'-O-methyladenosine-3'-phosphorothioate
  modified_base 3: mod_base = OTHER; note = 2'-O-methyluridine-3'-phosphate
  modified_base 4: mod_base = OTHER; note = 2'-O-methyladenosine-3'-phosphate
  modified_base 5: mod_base = OTHER; note = 2'-O-methyladenosine-3'-phosphate
  modified_base 6: mod_base = OTHER; note = 2'-O-methyladenosine-3'-phosphate
  modified_base 7: mod_base = OTHER; note = 2'-O-methyluridine-3'-phosphate
  modified_base 8: mod_base = OTHER; note = 2'-O-methylguanosine-3'-phosphate
  modified_base 9: mod_base = OTHER; note = 2'-O-methyluridine-3'-phosphate
  modified_base 10: mod_base = OTHER; note = 2'-O-methylcytidine-3'-phosphate
  modified_base 11: mod_base = OTHER; note = 2'-O-methyluridine-3'-phosphate
  modified_base 12: mod_base = OTHER; note = 2'-O-methylguanosine-3'-phosphate
  modified_base 13: mod_base = OTHER; note = 2'-O-methylcytidine-3'-phosphate
  modified_base 14: mod_base = OTHER; note = 2'-fluorouridine-3'-phosphorothioate
  modified_base 15: mod_base = OTHER; note = 2'-O-methyluridine-3'-phosphorothioate
  modified_base 16: mod_base = OTHER; note = 2'-O-methylguanosine-3'-phosphorothioate
  modified_base 17: mod_base = OTHER; note = 2'-O-methylcytidine-3'-phosphorothioate
  modified_base 18: mod_base = OTHER; note = 2'-O-methyluridine-3'-phosphorothioate
tataaatgtctgcttgctt

SEQ ID NO: 2274 - RNA, 19 nt, synthetic construct
  source 1..19: mol_type = other RNA
  modified_base 1: mod_base = OTHER; note = 2'-O-methyluridine-3'-phosphorothioate
  modified_base 2: mod_base = OTHER; note = 2'-O-methylcytidine-3'-phosphorothioate
  modified_base 3: mod_base = OTHER; note = 2'-O-methylcytidine-3'-phosphate
  modified_base 4: mod_base = OTHER; note = 2'-O-methylguanosine-3'-phosphate
  modified_base 5: mod_base = OTHER; note = 2'-O-methyladenosine-3'-phosphate
  modified_base 6: mod_base = OTHER; note = 2'-O-methyladenosine-3'-phosphate
  modified_base 7: mod_base = OTHER; note = 2'-O-methyluridine-3'-phosphate
  modified_base 8: mod_base = OTHER; note = 2'-O-methyladenosine-3'-phosphate
  modified_base 9: mod_base = OTHER; note = 2'-O-methyladenosine-3'-phosphate
  modified_base 10: mod_base = OTHER; note = 2'-O-methyladenosine-3'-phosphate
  modified_base 11: mod_base = OTHER; note = 2'-O-methylcytidine-3'-phosphate
  modified_base 12: mod_base = OTHER; note = 2'-O-methyluridine-3'-phosphate
  modified_base 13: mod_base = OTHER; note = 2'-O-methylcytidine-3'-phosphate
  modified_base 14: mod_base = OTHER; note = 2'-fluorocytidine-3'-phosphorothioate
  modified_base 15: mod_base = OTHER; note = 2'-O-methyladenosine-3'-phosphorothioate
  modified_base 16: mod_base = OTHER; note = 2'-O-methylguanosine-3'-phosphorothioate
  modified_base 17: mod_base = OTHER; note = 2'-O-methylguanosine-3'-phosphorothioate
  modified_base 18: mod_base = OTHER; note = 2'-O-methylcytidine-3'-phosphorothioate
tccgaataaactccaggcc

SEQ ID NO: 2275 - RNA, 19 nt, synthetic construct
  source 1..19: mol_type = other RNA
  modified_base 1: mod_base = OTHER; note = 2'-O-methyluridine-3'-phosphorothioate
  modified_base 2: mod_base = OTHER; note = 2'-O-methylguanosine-3'-phosphorothioate
  modified_base 3: mod_base = OTHER; note = 2'-O-methylguanosine-3'-phosphate
  modified_base 4: mod_base = OTHER; note = 2'-O-methyladenosine-3'-phosphate
  modified_base 5: mod_base = OTHER; note = 2'-O-methyladenosine-3'-phosphate
  modified_base 6: mod_base = OTHER; note = 2'-O-methylcytidine-3'-phosphate
  modified_base 7: mod_base = OTHER; note = 2'-O-methylcytidine-3'-phosphate
  modified_base 8: mod_base = OTHER; note = 2'-O-methyladenosine-3'-phosphate
  modified_base 9: mod_base = OTHER; note = 2'-O-methyluridine-3'-phosphate
  modified_base 10: mod_base = OTHER; note = 2'-O-methyluridine-3'-phosphate
  modified_base 11: mod_base = OTHER; note = 2'-O-methyluridine-3'-phosphate
  modified_base 12: mod_base = OTHER; note = 2'-O-methyluridine-3'-phosphate
  modified_base 13: mod_base = OTHER; note = 2'-O-methyladenosine-3'-phosphate
  modified_base 14: mod_base = OTHER; note = 2'-fluoroadenosine-3'-phosphorothioate
  modified_base 15: mod_base = OTHER; note = 2'-O-methyladenosine-3'-phosphorothioate
  modified_base 16: mod_base = OTHER; note = 2'-O-methylguanosine-3'-phosphorothioate
  modified_base 17: mod_base = OTHER; note = 2'-O-methylcytidine-3'-phosphorothioate
  modified_base 18: mod_base = OTHER; note = 2'-O-methyluridine-3'-phosphorothioate
tggaaccattttaaagctc

SEQ ID NO: 2276 - RNA, 19 nt, synthetic construct
  source 1..19: mol_type = other RNA
  modified_base 1: mod_base = OTHER; note = 2'-O-methyluridine-3'-phosphorothioate
  modified_base 2: mod_base = OTHER; note = 2'-O-methylcytidine-3'-phosphorothioate
  modified_base 3: mod_base = OTHER; note = 2'-O-methylcytidine-3'-phosphate
  modified_base 4: mod_base = OTHER; note = 2'-O-methyladenosine-3'-phosphate
  modified_base 5: mod_base = OTHER; note = 2'-O-methylguanosine-3'-phosphate
  modified_base 6: mod_base = OTHER; note = 2'-O-methyladenosine-3'-phosphate
  modified_base 7: mod_base = OTHER; note = 2'-O-methyladenosine-3'-phosphate
  modified_base 8: mod_base = OTHER; note = 2'-O-methyluridine-3'-phosphate
  modified_base 9: mod_base = OTHER; note = 2'-O-methyladenosine-3'-phosphate
  modified_base 10: mod_base = OTHER; note = 2'-O-methyladenosine-3'-phosphate
  modified_base 11: mod_base = OTHER; note = 2'-O-methyladenosine-3'-phosphate
  modified_base 12: mod_base = OTHER; note = 2'-O-methyluridine-3'-phosphate
  modified_base 13: mod_base = OTHER; note = 2'-O-methyladenosine-3'-phosphate
  modified_base 14: mod_base = OTHER; note = 2'-fluorouridine-3'-phosphorothioate
  modified_base 15: mod_base = OTHER; note = 2'-O-methylcytidine-3'-phosphorothioate
  modified_base 16: mod_base = OTHER; note = 2'-O-methyluridine-3'-phosphorothioate
  modified_base 17: mod_base = OTHER; note = 2'-O-methyluridine-3'-phosphorothioate
  modified_base 18: mod_base = OTHER; note = 2'-O-methylcytidine-3'-phosphorothioate
tccagaataaatatcttca

SEQ ID NO: 2277 - RNA, 19 nt, synthetic construct
  source 1..19: mol_type = other RNA
  modified_base 1: mod_base = OTHER; note = 2'-O-methyluridine-3'-phosphorothioate
  modified_base 2: mod_base = OTHER; note = 2'-O-methyladenosine-3'-phosphorothioate
  modified_base 3: mod_base = OTHER; note = 2'-O-methyluridine-3'-phosphate
  modified_base 4: mod_base = OTHER; note = 2'-O-methyladenosine-3'-phosphate
  modified_base 5: mod_base = OTHER; note = 2'-O-methyluridine-3'-phosphate
  modified_base 6: mod_base = OTHER; note = 2'-O-methylcytidine-3'-phosphate
  modified_base 7: mod_base = OTHER; note = 2'-O-methyluridine-3'-phosphate
  modified_base 8: mod_base = OTHER; note = 2'-O-methyluridine-3'-phosphate
  modified_base 9: mod_base = OTHER; note = 2'-O-methylcytidine-3'-phosphate
  modified_base 10: mod_base = OTHER; note = 2'-O-methyladenosine-3'-phosphate
  modified_base 11: mod_base = OTHER; note = 2'-O-methyladenosine-3'-phosphate
  modified_base 12: mod_base = OTHER; note = 2'-O-methylguanosine-3'-phosphate
  modified_base 13: mod_base = OTHER; note = 2'-O-methyluridine-3'-phosphate
  modified_base 14: mod_base = OTHER; note = 2'-fluorouridine-3'-phosphorothioate
  modified_base 15: mod_base = OTHER; note = 2'-O-methyladenosine-3'-phosphorothioate
  modified_base 16: mod_base = OTHER; note = 2'-O-methylcytidine-3'-phosphorothioate
  modified_base 17: mod_base = OTHER; note = 2'-O-methyladenosine-3'-phosphorothioate
  modified_base 18: mod_base = OTHER; note = 2'-O-methyladenosine-3'-phosphorothioate
tatatcttcaagttacaaa

SEQ ID NO: 2278 - RNA, 19 nt, synthetic construct
  source 1..19: mol_type = other RNA
  modified_base 1: mod_base = OTHER; note = 2'-O-methyluridine-3'-phosphorothioate
  modified_base 2: mod_base = OTHER; note = 2'-O-methylcytidine-3'-phosphorothioate
  modified_base 3: mod_base = OTHER; note = 2'-O-methyluridine-3'-phosphate
  modified_base 4: mod_base = OTHER; note = 2'-O-methylcytidine-3'-phosphate
  modified_base 5: mod_base = OTHER; note = 2'-O-methyladenosine-3'-phosphate
  modified_base 6: mod_base = OTHER; note = 2'-O-methylguanosine-3'-phosphate
  modified_base 7: mod_base = OTHER; note = 2'-O-methyluridine-3'-phosphate
  modified_base 8: mod_base = OTHER; note = 2'-O-methyluridine-3'-phosphate
  modified_base 9: mod_base = OTHER; note = 2'-O-methylcytidine-3'-phosphate
  modified_base 10: mod_base = OTHER; note = 2'-O-methylcytidine-3'-phosphate
  modified_base 11: mod_base = OTHER; note = 2'-O-methyluridine-3'-phosphate
  modified_base 12: mod_base = OTHER; note = 2'-O-methylguanosine-3'-phosphate
  modified_base 13: mod_base = OTHER; note = 2'-O-methylcytidine-3'-phosphate
  modified_base 14: mod_base = OTHER; note = 2'-fluorouridine-3'-phosphorothioate
  modified_base 15: mod_base = OTHER; note = 2'-O-methylguanosine-3'-phosphorothioate
  modified_base 16: mod_base = OTHER; note = 2'-O-methyluridine-3'-phosphorothioate
  modified_base 17: mod_base = OTHER; note = 2'-O-methylguanosine-3'-phosphorothioate
  modified_base 18: mod_base = OTHER; note = 2'-O-methyluridine-3'-phosphorothioate
tctcagttcctgctgtgtg

SEQ ID NO: 2279 - RNA, 19 nt, synthetic construct
  source 1..19: mol_type = other RNA
  modified_base 1: mod_base = OTHER; note = 2'-O-methyluridine-3'-phosphorothioate
  modified_base 2: mod_base = OTHER; note = 2'-O-methylcytidine-3'-phosphorothioate
  modified_base 3: mod_base = OTHER; note = 2'-O-methyluridine-3'-phosphate
  modified_base 4: mod_base = OTHER; note = 2'-O-methyladenosine-3'-phosphate
  modified_base 5: mod_base = OTHER; note = 2'-O-methylcytidine-3'-phosphate
  modified_base 6: mod_base = OTHER; note = 2'-O-methyladenosine-3'-phosphate
  modified_base 7: mod_base = OTHER; note = 2'-O-methyladenosine-3'-phosphate
  modified_base 8: mod_base = OTHER; note = 2'-O-methyladenosine-3'-phosphate
  modified_base 9: mod_base = OTHER; note = 2'-O-methyladenosine-3'-phosphate
  modified_base 10: mod_base = OTHER; note = 2'-O-methylcytidine-3'-phosphate
  modified_base 11: mod_base = OTHER; note = 2'-O-methylcytidine-3'-phosphate
  modified_base 12: mod_base = OTHER; note = 2'-O-methylcytidine-3'-phosphate
  modified_base 13: mod_base = OTHER; note = 2'-O-methyladenosine-3'-phosphate
  modified_base 14: mod_base = OTHER; note = 2'-fluoroguanosine-3'-phosphorothioate
  modified_base 15: mod_base = OTHER; note = 2'-O-methyladenosine-3'-phosphorothioate
  modified_base 16: mod_base = OTHER; note = 2'-O-methyladenosine-3'-phosphorothioate
  modified_base 17: mod_base = OTHER; note = 2'-O-methyluridine-3'-phosphorothioate
  modified_base 18: mod_base = OTHER; note = 2'-O-methyladenosine-3'-phosphorothioate
tctacaaaacccagaataa

SEQ ID NO: 2280 - RNA, 19 nt, synthetic construct
  source 1..19: mol_type = other RNA
  modified_base 1: mod_base = OTHER; note = 2'-O-methyluridine-3'-phosphorothioate
  modified_base 2: mod_base = OTHER; note = 2'-O-methylcytidine-3'-phosphorothioate
  modified_base 3: mod_base = OTHER; note = 2'-O-methyladenosine-3'-phosphate
  modified_base 4: mod_base = OTHER; note = 2'-O-methyladenosine-3'-phosphate
  modified_base 5: mod_base = OTHER; note = 2'-O-methyladenosine-3'-phosphate
  modified_base 6: mod_base = OTHER; note = 2'-O-methyladenosine-3'-phosphate
  modified_base 7: mod_base = OTHER; note = 2'-O-methylguanosine-3'-phosphate
  modified_base 8: mod_base = OTHER; note = 2'-O-methyladenosine-3'-phosphate
  modified_base 9: mod_base = OTHER; note = 2'-O-methyluridine-3'-phosphate
  modified_base 10: mod_base = OTHER; note = 2'-O-methyladenosine-3'-phosphate
  modified_base 11: mod_base = OTHER; note = 2'-O-methyladenosine-3'-phosphate
  modified_base 12: mod_base = OTHER; note = 2'-O-methyladenosine-3'-phosphate
  modified_base 13: mod_base = OTHER; note = 2'-O-methyluridine-3'-phosphate
  modified_base 14: mod_base = OTHER; note = 2'-fluoroguanosine-3'-phosphorothioate
  modified_base 15: mod_base = OTHER; note = 2'-O-methyluridine-3'-phosphorothioate
  modified_base 16: mod_base = OTHER; note = 2'-O-methylcytidine-3'-phosphorothioate
  modified_base 17: mod_base = OTHER; note = 2'-O-methyluridine-3'-phosphorothioate
  modified_base 18: mod_base = OTHER; note = 2'-O-methylguanosine-3'-phosphorothioate
tcaaaagataaatgtctgc

SEQ ID NO: 2281 - RNA, 19 nt, synthetic construct
  source 1..19: mol_type = other RNA
  modified_base 1: mod_base = OTHER; note = 2'-O-methyluridine-3'-phosphorothioate
  modified_base 2: mod_base = OTHER; note = 2'-O-methyluridine-3'-phosphorothioate
  modified_base 3: mod_base = OTHER; note = 2'-O-methyluridine-3'-phosphate
  modified_base 4: mod_base = OTHER; note = 2'-O-methylcytidine-3'-phosphate
  modified_base 5: mod_base = OTHER; note = 2'-O-methylcytidine-3'-phosphate
  modified_base 6: mod_base = OTHER; note = 2'-O-methylguanosine-3'-phosphate
  modified_base 7: mod_base = OTHER; note = 2'-O-methyladenosine-3'-phosphate
  modified_base 8: mod_base = OTHER; note = 2'-O-methyladenosine-3'-phosphate
  modified_base 9: mod_base = OTHER; note = 2'-O-methyluridine-3'-phosphate
  modified_base 10: mod_base = OTHER; note = 2'-O-methyladenosine-3'-phosphate
  modified_base 11: mod_base = OTHER; note = 2'-O-methyladenosine-3'-phosphate
  modified_base 12: mod_base = OTHER; note = 2'-O-methyladenosine-3'-phosphate
  modified_base 13: mod_base = OTHER; note = 2'-O-methylcytidine-3'-phosphate
  modified_base 14: mod_base = OTHER; note = 2'-fluorouridine-3'-phosphorothioate
  modified_base 15: mod_base = OTHER; note = 2'-O-methylcytidine-3'-phosphorothioate
  modified_base 16: mod_base = OTHER; note = 2'-O-methylcytidine-3'-phosphorothioate
  modified_base 17: mod_base = OTHER; note = 2'-O-methyladenosine-3'-phosphorothioate
  modified_base 18: mod_base = OTHER; note = 2'-O-methylguanosine-3'-phosphorothioate
tttccgaataaactccagg

SEQ ID NO: 2282 - RNA, 19 nt, synthetic construct
  source 1..19: mol_type = other RNA
  modified_base 1: mod_base = OTHER; note = 2'-O-methyluridine-3'-phosphorothioate
  modified_base 2: mod_base = OTHER; note = 2'-O-methylcytidine-3'-phosphorothioate
  modified_base 3: mod_base = OTHER; note = 2'-O-methyluridine-3'-phosphate
  modified_base 4: mod_base = OTHER; note = 2'-O-methylguanosine-3'-phosphate
  modified_base 5: mod_base = OTHER; note = 2'-O-methylguanosine-3'-phosphate
  modified_base 6: mod_base = OTHER; note = 2'-O-methylcytidine-3'-phosphate
  modified_base 7: mod_base = OTHER; note = 2'-O-methyluridine-3'-phosphate
  modified_base 8: mod_base = OTHER; note = 2'-O-methylcytidine-3'-phosphate
  modified_base 9: mod_base = OTHER; note = 2'-O-methyladenosine-3'-phosphate
  modified_base 10: mod_base = OTHER; note = 2'-O-methylguanosine-3'-phosphate
  modified_base 11: mod_base = OTHER; note = 2'-O-methyluridine-3'-phosphate
  modified_base 12: mod_base = OTHER; note = 2'-O-methyluridine-3'-phosphate
  modified_base 13: mod_base = OTHER; note = 2'-O-methylcytidine-3'-phosphate
  modified_base 14: mod_base = OTHER; note = 2'-fluorocytidine-3'-phosphorothioate
  modified_base 15: mod_base = OTHER; note = 2'-O-methyluridine-3'-phosphorothioate
  modified_base 16: mod_base = OTHER; note = 2'-O-methylguanosine-3'-phosphorothioate
  modified_base 17: mod_base = OTHER; note = 2'-O-methylcytidine-3'-phosphorothioate
  modified_base 18: mod_base = OTHER; note = 2'-O-methyluridine-3'-phosphorothioate
tctggctcagttcctgctg

SEQ ID NO: 2283 - RNA, 19 nt, synthetic construct
  source 1..19: mol_type = other RNA
  modified_base 1: mod_base = OTHER; note = 2'-O-methyluridine-3'-phosphorothioate
  modified_base 2: mod_base = OTHER; note = 2'-O-methylcytidine-3'-phosphorothioate
  modified_base 3: mod_base = OTHER; note = 2'-O-methyladenosine-3'-phosphate
  modified_base 4: mod_base = OTHER; note = 2'-O-methylguanosine-3'-phosphate
  modified_base 5: mod_base = OTHER; note = 2'-O-methyladenosine-3'-phosphate
  modified_base 6: mod_base = OTHER; note = 2'-O-methylcytidine-3'-phosphate
  modified_base 7: mod_base = OTHER; note = 2'-O-methyladenosine-3'-phosphate
  modified_base 8: mod_base = OTHER; note = 2'-O-methylguanosine-3'-phosphate
  modified_base 9: mod_base = OTHER; note = 2'-O-methylcytidine-3'-phosphate
  modified_base 10: mod_base = OTHER; note = 2'-O-methyladenosine-3'-phosphate
  modified_base 11: mod_base = OTHER; note = 2'-O-methyluridine-3'-phosphate
  modified_base 12: mod_base = OTHER; note = 2'-O-methylcytidine-3'-phosphate
  modified_base 13: mod_base = OTHER; note = 2'-O-methyladenosine-3'-phosphate
  modified_base 14: mod_base = OTHER; note = 2'-fluorouridine-3'-phosphorothioate
  modified_base 15: mod_base = OTHER; note = 2'-O-methylguanosine-3'-phosphorothioate
  modified_base 16: mod_base = OTHER; note = 2'-O-methylguanosine-3'-phosphorothioate
  modified_base 17: mod_base = OTHER; note = 2'-O-methylcytidine-3'-phosphorothioate
  modified_base 18: mod_base = OTHER; note = 2'-O-methyluridine-3'-phosphorothioate
tcagacagcatcatggctg

SEQ ID NO: 2284 - RNA, 19 nt, synthetic construct
  source 1..19: mol_type = other RNA
  modified_base 1: mod_base = OTHER; note = 2'-O-methyluridine-3'-phosphorothioate
  modified_base 2: mod_base = OTHER; note = 2'-O-methylguanosine-3'-phosphorothioate
  modified_base 3: mod_base = OTHER; note = 2'-O-methylguanosine-3'-phosphate
  modified_base 4: mod_base = OTHER; note = 2'-O-methylguanosine-3'-phosphate
  modified_base 5: mod_base = OTHER; note = 2'-O-methyladenosine-3'-phosphate
  modified_base 6: mod_base = OTHER; note = 2'-O-methyluridine-3'-phosphate
  modified_base 7: mod_base = OTHER; note = 2'-O-methyluridine-3'-phosphate
  modified_base 8: mod_base = OTHER; note = 2'-O-methylcytidine-3'-phosphate
  modified_base 9: mod_base = OTHER; note = 2'-O-methylcytidine-3'-phosphate
  modified_base 10: mod_base = OTHER; note = 2'-O-methyladenosine-3'-phosphate
  modified_base 11: mod_base = OTHER; note = 2'-O-methyluridine-3'-phosphate
  modified_base 12: mod_base = OTHER; note = 2'-O-methylguanosine-3'-phosphate
  modified_base 13: mod_base = OTHER; note = 2'-O-methylcytidine-3'-phosphate
  modified_base 14: mod_base = OTHER; note = 2'-fluorouridine-3'-phosphorothioate
  modified_base 15: mod_base = OTHER; note = 2'-O-methylcytidine-3'-phosphorothioate
  modified_base 16: mod_base = OTHER; note = 2'-O-methylcytidine-3'-phosphorothioate
  modified_base 17: mod_base = OTHER; note = 2'-O-methyluridine-3'-phosphorothioate
  modified_base 18: mod_base = OTHER; note = 2'-O-methyluridine-3'-phosphorothioate
tgggattccatgctccttg

SEQ ID NO: 2285 - RNA, 14 nt, synthetic construct
  source 1..14: mol_type = other RNA
  modified_base 1: mod_base = OTHER; note = 2'-O-methyladenosine-3'-phosphorothioate
  modified_base 2: mod_base = OTHER; note = 2'-fluoroguanosine-3'-phosphorothioate
  modified_base 3: mod_base = OTHER; note = 2'-O-methyladenosine-3'-phosphate
  modified_base 4: mod_base = OTHER; note = 2'-fluorocytidine-3'-phosphate
  modified_base 5: mod_base = OTHER; note = 2'-O-methylcytidine-3'-phosphate
  modified_base 6: mod_base = OTHER; note = 2'-fluorouridine-3'-phosphate
  modified_base 7: mod_base = OTHER; note = 2'-O-methylguanosine-3'-phosphate
  modified_base 8: mod_base = OTHER; note = 2'-fluorouridine-3'-phosphate
  modified_base 9: mod_base = OTHER; note = 2'-O-methyluridine-3'-phosphate
  modified_base 10: mod_base = OTHER; note = 2'-fluorouridine-3'-phosphate
  modified_base 11: mod_base = OTHER; note = 2'-O-methyluridine-3'-phosphate
  modified_base 12: mod_base = OTHER; note = 2'-fluoroguanosine-3'-phosphorothioate
  modified_base 13: mod_base = OTHER; note = 2'-O-methylcytidine-3'-phosphorothioate
  modified_base 14: mod_base = OTHER; note = 2'-fluoroadenosine
agacctgttttgca

SEQ ID NO: 2286 - RNA, 19 nt, synthetic construct
  source 1..19: mol_type = other RNA
  modified_base 1: mod_base = OTHER; note = 2'-O-methyluridine-3'-phosphorothioate
  modified_base 2: mod_base = OTHER; note = 2'-fluoroguanosine-3'-phosphorothioate
  modified_base 3: mod_base = OTHER; note = 2'-O-methylcytidine-3'-phosphate
  modified_base 4: mod_base = OTHER; note = 2'-fluoroadenosine-3'-phosphate
  modified_base 5: mod_base = OTHER; note = 2'-O-methyladenosine-3'-phosphate
  modified_base 6: mod_base = OTHER; note = 2'-fluoroadenosine-3'-phosphate
  modified_base 7: mod_base = OTHER; note = 2'-O-methyladenosine-3'-phosphate
  modified_base 8: mod_base = OTHER; note = 2'-fluorocytidine-3'-phosphate
  modified_base 9: mod_base = OTHER; note = 2'-O-methyladenosine-3'-phosphate
  modified_base 10: mod_base = OTHER; note = 2'-fluoroguanosine-3'-phosphate
  modified_base 11: mod_base = OTHER; note = 2'-O-methylguanosine-3'-phosphate
  modified_base 12: mod_base = OTHER; note = 2'-fluorouridine-3'-phosphorothioate
  modified_base 13: mod_base = OTHER; note = 2'-O-methylcytidine-3'-phosphorothioate
  modified_base 14: mod_base = OTHER; note = 2'-fluorouridine-3'-phosphorothioate
  modified_base 15: mod_base = OTHER; note = 2'-O-methyladenosine-3'-phosphorothioate
  modified_base 16: mod_base = OTHER; note = 2'-fluoroguanosine-3'-phosphorothioate
  modified_base 17: mod_base = OTHER; note = 2'-O-methyladenosine-3'-phosphorothioate
  modified_base 18: mod_base = OTHER; note = 2'-fluoroadenosine-3'-phosphorothioate
tgcaaaacaggtctagaaa

SEQ ID NO: 2287 - RNA, 14 nt, synthetic construct
  source 1..14: mol_type = other RNA
  modified_base 1: mod_base = OTHER; note = 2'-O-methyluridine-3'-phosphorothioate
  modified_base 2: mod_base = OTHER; note = 2'-fluoroguanosine-3'-phosphorothioate
  modified_base 3: mod_base = OTHER; note = 2'-O-methyluridine-3'-phosphate
  modified_base 4: mod_base = OTHER; note = 2'-fluorouridine-3'-phosphate
  modified_base 5: mod_base = OTHER; note = 2'-O-methyluridine-3'-phosphate
  modified_base 6: mod_base = OTHER; note = 2'-fluorouridine-3'-phosphate
  modified_base 7: mod_base = OTHER; note = 2'-O-methylguanosine-3'-phosphate
  modified_base 8: mod_base = OTHER; note = 2'-fluorocytidine-3'-phosphate
  modified_base 9: mod_base = OTHER; note = 2'-O-methyluridine-3'-phosphate
  modified_base 10: mod_base = OTHER; note = 2'-fluorouridine-3'-phosphate
  modified_base 11: mod_base = OTHER; note = 2'-O-methyluridine-3'-phosphate
  modified_base 12: mod_base = OTHER; note = 2'-fluorouridine-3'-phosphorothioate
  modified_base 13: mod_base = OTHER; note = 2'-O-methylguanosine-3'-phosphorothioate
  modified_base 14: mod_base = OTHER; note = 2'-fluoroadenosine
tgttttgcttttga

SEQ ID NO: 2288 - RNA, 19 nt, synthetic construct
  source 1..19: mol_type = other RNA
  modified_base 1: mod_base = OTHER; note = 2'-O-methyluridine-3'-phosphorothioate
  modified_base 2: mod_base = OTHER; note = 2'-fluorocytidine-3'-phosphorothioate
  modified_base 3: mod_base = OTHER; note = 2'-O-methyladenosine-3'-phosphate
  modified_base 4: mod_base = OTHER; note = 2'-fluoroadenosine-3'-phosphate
  modified_base 5: mod_base = OTHER; note = 2'-O-methyladenosine-3'-phosphate
  modified_base 6: mod_base = OTHER; note = 2'-fluoroadenosine-3'-phosphate
  modified_base 7: mod_base = OTHER; note = 2'-O-methylguanosine-3'-phosphate
  modified_base 8: mod_base = OTHER; note = 2'-fluorocytidine-3'-phosphate
  modified_base 9: mod_base = OTHER; note = 2'-O-methyladenosine-3'-phosphate
  modified_base 10: mod_base = OTHER; note = 2'-fluoroadenosine-3'-phosphate
  modified_base 11: mod_base = OTHER; note = 2'-O-methyladenosine-3'-phosphate
  modified_base 12: mod_base = OTHER; note = 2'-fluoroadenosine-3'-phosphorothioate
  modified_base 13: mod_base = OTHER; note = 2'-O-methylcytidine-3'-phosphorothioate
  modified_base 14: mod_base = OTHER; note = 2'-fluoroadenosine-3'-phosphorothioate
  modified_base 15: mod_base = OTHER; note = 2'-O-methylguanosine-3'-phosphorothioate
  modified_base 16: mod_base = OTHER; note = 2'-fluoroguanosine-3'-phosphorothioate
  modified_base 17: mod_base = OTHER; note = 2'-O-methyluridine-3'-phosphorothioate
  modified_base 18: mod_base = OTHER; note = 2'-fluorocytidine-3'-phosphorothioate
tcaaaagcaaaacaggtct

SEQ ID NO: 2289 - RNA, 14 nt, synthetic construct
  source 1..14: mol_type = other RNA
  modified_base 1: mod_base = OTHER; note = 2'-O-methylguanosine-3'-phosphorothioate
  modified_base 2: mod_base = OTHER; note = 2'-fluorouridine-3'-phosphorothioate
  modified_base 3: mod_base = OTHER; note = 2'-O-methyluridine-3'-phosphate
  modified_base 4: mod_base = OTHER; note = 2'-fluorouridine-3'-phosphate
  modified_base 5: mod_base = OTHER; note = 2'-O-methyluridine-3'-phosphate
  modified_base 6: mod_base = OTHER; note = 2'-fluoroguanosine-3'-phosphate
  modified_base 7: mod_base = OTHER; note = 2'-O-methylcytidine-3'-phosphate
  modified_base 8: mod_base = OTHER; note = 2'-fluorouridine-3'-phosphate
  modified_base 9: mod_base = OTHER; note = 2'-O-methyluridine-3'-phosphate
  modified_base 10: mod_base = OTHER; note = 2'-fluorouridine-3'-phosphate
  modified_base 11: mod_base = OTHER; note = 2'-O-methyluridine-3'-phosphate
  modified_base 12: mod_base = OTHER; note = 2'-fluoroguanosine-3'-phosphorothioate
  modified_base 13: mod_base = OTHER; note = 2'-O-methyluridine-3'-phosphorothioate
  modified_base 14: mod_base = OTHER; note = 2'-fluoroadenosine
gttttgcttttgta

SEQ ID NO: 2290 - RNA, 19 nt, synthetic construct
  source 1..19: mol_type = other RNA
  modified_base 1: mod_base = OTHER; note = 2'-O-methyluridine-3'-phosphorothioate
  modified_base 2: mod_base = OTHER; note = 2'-fluoroadenosine-3'-phosphorothioate
  modified_base 3: mod_base = OTHER; note = 2'-O-methylcytidine-3'-phosphate
  modified_base 4: mod_base = OTHER; note = 2'-fluoroadenosine-3'-phosphate
  modified_base 5: mod_base = OTHER; note = 2'-O-methyladenosine-3'-phosphate
  modified_base 6: mod_base = OTHER; note = 2'-fluoroadenosine-3'-phosphate
  modified_base 7: mod_base = OTHER; note = 2'-O-methyladenosine-3'-phosphate
  modified_base 8: mod_base = OTHER; note = 2'-fluoroguanosine-3'-phosphate
  modified_base 9: mod_base = OTHER; note = 2'-O-methylcytidine-3'-phosphate
  modified_base 10: mod_base = OTHER; note = 2'-fluoroadenosine-3'-phosphate
  modified_base 11: mod_base = OTHER; note = 2'-O-methyladenosine-3'-phosphate
  modified_base 12: mod_base = OTHER; note = 2'-fluoroadenosine-3'-phosphorothioate
  modified_base 13: mod_base = OTHER; note = 2'-O-methyladenosine-3'-phosphorothioate
  modified_base 14: mod_base = OTHER; note = 2'-fluorocytidine-3'-phosphorothioate
  modified_base 15: mod_base = OTHER; note = 2'-O-methyladenosine-3'-phosphorothioate
  modified_base 16: mod_base = OTHER; note = 2'-fluoroguanosine-3'-phosphorothioate
  modified_base 17: mod_base = OTHER; note = 2'-O-methylguanosine-3'-phosphorothioate
  modified_base 18: mod_base = OTHER; note = 2'-fluorouridine-3'-phosphorothioate
tacaaaagcaaaacaggtc

SEQ ID NO: 2291 - RNA, 14 nt, synthetic construct
  source 1..14: mol_type = other RNA
  modified_base 1: mod_base = OTHER; note = 2'-O-methyluridine-3'-phosphorothioate
  modified_base 2: mod_base = OTHER; note = 2'-fluorouridine-3'-phosphorothioate
  modified_base 3: mod_base = OTHER; note = 2'-O-methylguanosine-3'-phosphate
  modified_base 4: mod_base = OTHER; note = 2'-fluorouridine-3'-phosphate
  modified_base 5: mod_base = OTHER; note = 2'-O-methyladenosine-3'-phosphate
  modified_base 6: mod_base = OTHER; note = 2'-fluoroadenosine-3'-phosphate
  modified_base 7: mod_base = OTHER; note = 2'-O-methylcytidine-3'-phosphate
  modified_base 8: mod_base = OTHER; note = 2'-fluorouridine-3'-phosphate
  modified_base 9: mod_base = OTHER; note = 2'-O-methyluridine-3'-phosphate
  modified_base 10: mod_base = OTHER; note = 2'-fluoroguanosine-3'-phosphate
  modified_base 11: mod_base = OTHER; note = 2'-O-methyladenosine-3'-phosphate
  modified_base 12: mod_base = OTHER; note = 2'-fluoroadenosine-3'-phosphorothioate
  modified_base 13: mod_base = OTHER; note = 2'-O-methylguanosine-3'-phosphorothioate
  modified_base 14: mod_base = OTHER; note = 2'-fluoroadenosine
ttgtaacttgaaga

SEQ ID NO: 2292 - RNA, 19 nt, synthetic construct
  source 1..19: mol_type = other RNA
  modified_base 1: mod_base = OTHER; note = 2'-O-methyluridine-3'-phosphorothioate
  modified_base 2: mod_base = OTHER; note = 2'-fluorocytidine-3'-phosphorothioate
  modified_base 3: mod_base = OTHER; note = 2'-O-methyluridine-3'-phosphate
  modified_base 4: mod_base = OTHER; note = 2'-fluorouridine-3'-phosphate
  modified_base 5: mod_base = OTHER; note = 2'-O-methylcytidine-3'-phosphate
  modified_base 6: mod_base = OTHER; note = 2'-fluoroadenosine-3'-phosphate
  modified_base 7: mod_base = OTHER; note = 2'-O-methyladenosine-3'-phosphate
  modified_base 8: mod_base = OTHER; note = 2'-fluoroguanosine-3'-phosphate
  modified_base 9: mod_base = OTHER; note = 2'-O-methyluridine-3'-phosphate
  modified_base 10: mod_base = OTHER; note = 2'-fluorouridine-3'-phosphate
  modified_base 11: mod_base = OTHER; note = 2'-O-methyladenosine-3'-phosphate
  modified_base 12: mod_base = OTHER; note = 2'-fluorocytidine-3'-phosphorothioate
  modified_base 13: mod_base = OTHER; note = 2'-O-methyladenosine-3'-phosphorothioate
  modified_base 14: mod_base = OTHER; note = 2'-fluoroadenosine-3'-phosphorothioate
  modified_base 15: mod_base = OTHER; note = 2'-O-methyladenosine-3'-phosphorothioate
  modified_base 16: mod_base = OTHER; note = 2'-fluoroadenosine-3'-phosphorothioate
  modified_base 17: mod_base = OTHER; note = 2'-O-methylguanosine-3'-phosphorothioate
  modified_base 18: mod_base = OTHER; note = 2'-fluorocytidine-3'-phosphorothioate
tcttcaagttacaaaagca

SEQ ID NO: 2293 - RNA, 15 nt, synthetic construct
  source 1..15: mol_type = other RNA
  modified_base 1: mod_base = OTHER; note = 2'-fluorouridine-3'-phosphorothioate
  modified_base 2: mod_base = OTHER; note = 2'-O-methyladenosine-3'-phosphorothioate
  modified_base 3: mod_base = OTHER; note = 2'-fluoroguanosine-3'-phosphate
  modified_base 4: mod_base = OTHER; note = 2'-O-methyladenosine-3'-phosphate
  modified_base 5: mod_base = OTHER; note = 2'-fluorocytidine-3'-phosphate
  modified_base 6: mod_base = OTHER; note = 2'-O-methylcytidine-3'-phosphate
  modified_base 7: mod_base = OTHER; note = 2'-fluorouridine-3'-phosphate
  modified_base 8: mod_base = OTHER; note = 2'-O-methylguanosine-3'-phosphate
  modified_base 9: mod_base = OTHER; note = 2'-fluorouridine-3'-phosphate
  modified_base 10: mod_base = OTHER; note = 2'-O-methyluridine-3'-phosphate
  modified_base 11: mod_base = OTHER; note = 2'-fluorouridine-3'-phosphate
  modified_base 12: mod_base = OTHER; note = 2'-O-methyluridine-3'-phosphate
  modified_base 13: mod_base = OTHER; note = 2'-O-methylguanosine-3'-phosphorothioate
  modified_base 14: mod_base = OTHER; note = 2'-O-methylcytidine-3'-phosphorothioate
  modified_base 15: mod_base = OTHER; note = 2'-O-methyladenosine
tagacctgttttgca

SEQ ID NO: 2294 - RNA, 19 nt, synthetic construct
  source 1..19: mol_type = other RNA
  modified_base 1: mod_base = OTHER; note = 2'-O-methyluridine-3'-phosphorothioate
  modified_base 2: mod_base = OTHER; note = 2'-fluoroguanosine-3'-phosphorothioate
  modified_base 3: mod_base = OTHER; note = 2'-O-methylcytidine-3'-phosphate
  modified_base 4: mod_base = OTHER; note = 2'-fluoroadenosine-3'-phosphate
  modified_base 5: mod_base = OTHER; note = 2'-O-methyladenosine-3'-phosphate
  modified_base 6: mod_base = OTHER; note = 2'-fluoroadenosine-3'-phosphate
  modified_base 7: mod_base = OTHER; note = 2'-O-methyladenosine-3'-phosphate
  modified_base 8: mod_base = OTHER; note = 2'-fluorocytidine-3'-phosphate
  modified_base 9: mod_base = OTHER; note = 2'-O-methyladenosine-3'-phosphate
  modified_base 10: mod_base = OTHER; note = 2'-fluoroguanosine-3'-phosphate
  modified_base 11: mod_base = OTHER; note = 2'-O-methylguanosine-3'-phosphate
  modified_base 12: mod_base = OTHER; note = 2'-fluorouridine-3'-phosphate
  modified_base 13: mod_base = OTHER; note = 2'-O-methylcytidine-3'-phosphate
  modified_base 14: mod_base = OTHER; note = 2'-fluorouridine-3'-phosphate
  modified_base 15: mod_base = OTHER; note = 2'-O-methyladenosine-3'-phosphorothioate
  modified_base 16: mod_base = OTHER; note = 2'-fluoroguanosine-3'-phosphorothioate
  modified_base 17: mod_base = OTHER; note = 2'-O-methyladenosine-3'-phosphorothioate
  modified_base 18: mod_base = OTHER; note = 2'-fluoroadenosine-3'-phosphorothioate
tgcaaaacaggtctagaaa

SEQ ID NO: 2295 - RNA, 23 nt, synthetic construct
  source 1..23: mol_type = other RNA
  modified_base 1: mod_base = OTHER; note = 2'-O-methyladenosine-3'-phosphorothioate
  modified_base 2: mod_base = OTHER; note = 2'-fluorouridine-3'-phosphorothioate
  modified_base 3: mod_base = OTHER; note = 2'-O-methylcytidine-3'-phosphate
  modified_base 4: mod_base = OTHER; note = 2'-fluorouridine-3'-phosphate
  modified_base 5: mod_base = OTHER; note = 2'-O-methyluridine-3'-phosphate
  modified_base 6: mod_base = OTHER; note = 2'-fluorocytidine-3'-phosphate
  modified_base 7: mod_base = OTHER; note = 2'-O-methyladenosine-3'-phosphate
  modified_base 8: mod_base = OTHER; note = 2'-fluoroadenosine-3'-phosphate
  modified_base 9: mod_base = OTHER; note = 2'-O-methylguanosine-3'-phosphate
  modified_base 10: mod_base = OTHER; note = 2'-fluorouridine-3'-phosphate
  modified_base 11: mod_base = OTHER; note = 2'-O-methyluridine-3'-phosphate
  modified_base 12: mod_base = OTHER; note = 2'-fluoroadenosine-3'-phosphate
  modified_base 13: mod_base = OTHER; note = 2'-O-methylcytidine-3'-phosphate
  modified_base 14: mod_base = OTHER; note = 2'-fluoroadenosine-3'-phosphate
  modified_base 15: mod_base = OTHER; note = 2'-O-methyladenosine-3'-phosphate
  modified_base 16: mod_base = OTHER; note = 2'-fluoroadenosine-3'-phosphate
  modified_base 17: mod_base = OTHER; note = 2'-O-methyladenosine-3'-phosphate
  modified_base 18: mod_base = OTHER; note = 2'-O-methylguanosine-3'-phosphate
  modified_base 19: mod_base = OTHER; note = 2'-O-methylcytidine-3'-phosphate
  modified_base 20: mod_base = OTHER; note = 2'-O-methyladenosine-3'-phosphate
  modified_base 21: mod_base = OTHER; note = 2'-O-methyladenosine-3'-phosphorothioate
  modified_base 22: mod_base = OTHER; note = 2'-O-methyluridine-3'-phosphorothioate
  modified_base 23: mod_base = OTHER; note = 2'-O-methyluridine
atcttcaagttacaaaagcaatt

SEQ ID NO: 2296 - RNA, 21 nt, synthetic construct
  source 1..21: mol_type = other RNA
  modified_base 1: mod_base = OTHER; note = 2'-O-methyluridine-3'-phosphorothioate
  modified_base 2: mod_base = OTHER; note = 2'-O-methyluridine-3'-phosphorothioate
  modified_base 3: mod_base = OTHER; note = 2'-O-methylguanosine-3'-phosphate
  modified_base 4: mod_base = OTHER; note = 2'-O-methylcytidine-3'-phosphate
  modified_base 5: mod_base = OTHER; note = 2'-O-methyluridine-3'-phosphate
  modified_base 6: mod_base = OTHER; note = 2'-O-methyluridine-3'-phosphate
  modified_base 7: mod_base = OTHER; note = 2'-fluorouridine-3'-phosphate
  modified_base 8: mod_base = OTHER; note = 2'-O-methyluridine-3'-phosphate
  modified_base 9: mod_base = OTHER; note = 2'-fluoroguanosine-3'-phosphate
  modified_base 10: mod_base = OTHER; note = 2'-fluorouridine-3'-phosphate
  modified_base 11: mod_base = OTHER; note = 2'-fluoroadenosine-3'-phosphate
  modified_base 12: mod_base = OTHER; note = 2'-O-methyladenosine-3'-phosphate
  modified_base 13: mod_base = OTHER; note = 2'-O-methylcytidine-3'-phosphate
  modified_base 14: mod_base = OTHER; note = 2'-O-methyluridine-3'-phosphate
  modified_base 15: mod_base = OTHER; note = 2'-O-methyluridine-3'-phosphate
  modified_base 16: mod_base = OTHER; note = 2'-O-methylguanosine-3'-phosphate
  modified_base 17: mod_base = OTHER; note = 2'-O-methyladenosine-3'-phosphate
  modified_base 18: mod_base = OTHER; note = 2'-O-methyladenosine-3'-phosphate
  modified_base 19: mod_base = OTHER; note = 2'-O-methylguanosine-3'-phosphate
  modified_base 20: mod_base = OTHER; note = 2'-O-methyladenosine-3'-phosphate
  modified_base 21: mod_base = OTHER; note = 2'-O-methylcytidine
ttgcttttgtaacttgaagac

SEQ ID NO: 2297 - RNA, 23 nt, synthetic construct
  source 1..23: mol_type = other RNA
  modified_base 1: mod_base = OTHER; note = 2'-O-methyladenosine-3'-phosphorothioate
  modified_base 2: mod_base = OTHER; note = 2'-fluorouridine-3'-phosphorothioate
  modified_base 3: mod_base = OTHER; note = 2'-O-methylcytidine-3'-phosphate
  modified_base 4: mod_base = OTHER; note = 2'-O-methyluridine-3'-phosphate
  modified_base 5: mod_base = OTHER; note = 2'-O-methyluridine-3'-phosphate
  modified_base 6: mod_base = OTHER; note = 2'-O-methylcytidine-3'-phosphate
  modified_base 7: mod_base = OTHER; note = 2'-O-methyladenosine-3'-phosphate
  modified_base 8: mod_base = OTHER; note = 2'-fluoroadenosine-3'-phosphate
  modified_base 9: mod_base = OTHER; note = 2'-O-methylguanosine-3'-phosphate
  modified_base 10: mod_base = OTHER; note = 2'-fluorouridine-3'-phosphate
  modified_base 11: mod_base = OTHER; note = 2'-O-methyluridine-3'-phosphate
  modified_base 12: mod_base = OTHER; note = 2'-fluoroadenosine-3'-phosphate
  modified_base 13: mod_base = OTHER; note = 2'-O-methylcytidine-3'-phosphate
  modified_base 14: mod_base = OTHER; note = 2'-fluoroadenosine-3'-phosphate
  modified_base 15: mod_base = OTHER; note = 2'-O-methyladenosine-3'-phosphate
  modified_base 16: mod_base = OTHER; note = 2'-fluoroadenosine-3'-phosphate
  modified_base 17: mod_base = OTHER; note = 2'-O-methyladenosine-3'-phosphate
  modified_base 18: mod_base = OTHER; note = 2'-O-methylguanosine-3'-phosphate
  modified_base 19: mod_base = OTHER; note = 2'-O-methylcytidine-3'-phosphate
  modified_base 20: mod_base = OTHER; note = 2'-O-methyladenosine-3'-phosphate
  modified_base 21: mod_base = OTHER; note = 2'-O-methyladenosine-3'-phosphorothioate
  modified_base 22: mod_base = OTHER; note = 2'-O-methyluridine-3'-phosphorothioate
  modified_base 23: mod_base = OTHER; note = 2'-O-methyluridine
atcttcaagttacaaaagcaatt

SEQ ID NO: 2298 - RNA, 21 nt, synthetic construct
  source 1..21: mol_type = other RNA
  modified_base 1: mod_base = OTHER; note = 2'-O-methyluridine-3'-phosphorothioate
  modified_base 2: mod_base = OTHER; note = 2'-O-methyluridine-3'-phosphorothioate
  modified_base 3: mod_base = OTHER; note = 2'-O-methylguanosine-3'-phosphate
  modified_base 4: mod_base = OTHER; note = 2'-O-methylcytidine-3'-phosphate
  modified_base 5: mod_base = OTHER; note = 2'-O-methyluridine-3'-phosphate
  modified_base 6: mod_base = OTHER; note = 2'-O-methyluridine-3'-phosphate
  modified_base 7: mod_base = OTHER; note = 2'-fluorouridine-3'-phosphate
  modified_base 8: mod_base = OTHER; note = 2'-O-methyluridine-3'-phosphate
  modified_base 9: mod_base = OTHER; note = 2'-fluoroguanosine-3'-phosphate
  modified_base 10: mod_base = OTHER; note = 2'-fluorouridine-3'-phosphate
  modified_base 11: mod_base = OTHER; note = 2'-fluoroadenosine-3'-phosphate
  modified_base 12: mod_base = OTHER; note = 2'-O-methyladenosine-3'-phosphate
  modified_base 13: mod_base = OTHER; note = 2'-O-methylcytidine-3'-phosphate
  modified_base 14: mod_base = OTHER; note = 2'-O-methyluridine-3'-phosphate
  modified_base 15: mod_base = OTHER; note = 2'-O-methyluridine-3'-phosphate
  modified_base 16: mod_base = OTHER; note = 2'-O-methylguanosine-3'-phosphate
  modified_base 17: mod_base = OTHER; note = 2'-O-methyladenosine-3'-phosphate
  modified_base 18: mod_base = OTHER; note = 2'-O-methyladenosine-3'-phosphate
  modified_base 19: mod_base = OTHER; note = 2'-O-methylguanosine-3'-phosphate
  modified_base 20: mod_base = OTHER; note = 2'-O-methyladenosine-3'-phosphate
  modified_base 21: mod_base = OTHER; note = 2'-O-methylcytidine
ttgcttttgtaacttgaagac

SEQ ID NO: 2299 - RNA, 23 nt, synthetic construct
  source 1..23: mol_type = other RNA
  modified_base 1: mod_base = OTHER; note = 2'-O-methyladenosine-3'-phosphorothioate
  modified_base 2: mod_base = OTHER; note = 2'-O-methyluridine-3'-phosphorothioate
  modified_base 3: mod_base = OTHER; note = 2'-O-methylcytidine-3'-phosphate
  modified_base 4: mod_base = OTHER; note = 2'-O-methyluridine-3'-phosphate
  modified_base 5: mod_base = OTHER; note = 2'-fluorouridine-3'-phosphate
  modified_base 6: mod_base = OTHER; note = 2'-O-methylcytidine-3'-phosphate
  modified_base 7: mod_base = OTHER; note = 2'-fluoroadenosine-3'-phosphate
  modified_base 8: mod_base = OTHER; note = 2'-O-methyladenosine-3'-phosphate
  modified_base 9: mod_base = OTHER; note = 2'-O-methylguanosine-3'-phosphate
  modified_base 10: mod_base = OTHER; note = 2'-fluorouridine-3'-phosphate
  modified_base 11: mod_base = OTHER; note = 2'-O-methyluridine-3'-phosphate
  modified_base 12: mod_base = OTHER; note = 2'-fluoroadenosine-3'-phosphate
  modified_base 13: mod_base = OTHER; note = 2'-O-methylcytidine-3'-phosphate
  modified_base 14: mod_base = OTHER; note = 2'-fluoroadenosine-3'-phosphate
  modified_base 15: mod_base = OTHER; note = 2'-O-methyladenosine-3'-phosphate
  modified_base 16: mod_base = OTHER; note = 2'-fluoroadenosine-3'-phosphate
  modified_base 17: mod_base = OTHER; note = 2'-O-methyladenosine-3'-phosphate
  modified_base 18: mod_base = OTHER; note = 2'-O-methylguanosine-3'-phosphate
  modified_base 19: mod_base = OTHER; note = 2'-O-methylcytidine-3'-phosphate
  modified_base 20: mod_base = OTHER; note = 2'-O-methyladenosine-3'-phosphate
  modified_base 21: mod_base = OTHER; note = 2'-O-methyladenosine-3'-phosphorothioate
  modified_base 22: mod_base = OTHER; note = 2'-O-methyluridine-3'-phosphorothioate
  modified_base 23: mod_base = OTHER; note = 2'-O-methyluridine
atcttcaagttacaaaagcaatt

SEQ ID NO: 2300 - RNA, 21 nt, synthetic construct
  source 1..21: mol_type = other RNA
  modified_base 1: mod_base = OTHER; note = 2'-O-methyluridine-3'-phosphorothioate
  modified_base 2: mod_base = OTHER; note = 2'-O-methyluridine-3'-phosphorothioate
  modified_base 3: mod_base = OTHER; note = 2'-O-methylguanosine-3'-phosphate
  modified_base 4: mod_base = OTHER; note = 2'-O-methylcytidine-3'-phosphate
  modified_base 5: mod_base = OTHER; note = 2'-O-methyluridine-3'-phosphate
  modified_base 6: mod_base = OTHER; note = 2'-O-methyluridine-3'-phosphate
  modified_base 7: mod_base = OTHER; note = 2'-fluorouridine-3'-phosphate
  modified_base 8: mod_base = OTHER; note = 2'-O-methyluridine-3'-phosphate
  modified_base 9: mod_base = OTHER; note = 2'-fluoroguanosine-3'-phosphate
  modified_base 10: mod_base = OTHER; note = 2'-fluorouridine-3'-phosphate
  modified_base 11: mod_base = OTHER; note = 2'-fluoroadenosine-3'-phosphate
  modified_base 12: mod_base = OTHER; note = 2'-O-methyladenosine
  modified_base 13: mod_base = OTHER; note = 2'-O-methylcytidine-3'-phosphate
  modified_base 14: mod_base = OTHER; note = 2'-O-methyluridine-3'-phosphate
  modified_base 15: mod_base = OTHER; note = 2'-O-methyluridine-3'-phosphate
  modified_base 16: mod_base = OTHER; note = 2'-O-methylguanosine-3'-phosphate
  modified_base 17: mod_base = OTHER; note = 2'-O-methyladenosine-3'-phosphate
  modified_base 18: mod_base = OTHER; note = 2'-O-methyladenosine-3'-phosphate
  modified_base 19: mod_base = OTHER; note = 2'-O-methylguanosine-3'-phosphate
  modified_base 20: mod_base = OTHER; note = 2'-O-methyladenosine-3'-phosphate
  modified_base 21: mod_base = OTHER; note = 2'-O-methyladenosine
ttgcttttgtaacttgaagaa

SEQ ID NO: 2301 - RNA, 23 nt, synthetic construct
  source 1..23: mol_type = other RNA
  modified_base 1: mod_base = OTHER; note = 2'-O-methyladenosine-3'-phosphorothioate
  modified_base 2: mod_base = OTHER; note = 2'-O-methyluridine-3'-phosphorothioate
  modified_base 3: mod_base = OTHER; note = 2'-O-methylcytidine-3'-phosphate
  modified_base 4: mod_base = OTHER; note = 2'-O-methyluridine-3'-phosphate
  modified_base 5: mod_base = OTHER; note = 2'-fluorouridine-3'-phosphate
  modified_base 6: mod_base = OTHER; note = 2'-O-methylcytidine-3'-phosphate
  modified_base 7: mod_base = OTHER; note = 2'-fluoroadenosine-3'-phosphate
  modified_base 8: mod_base = OTHER; note = 2'-O-methyladenosine-3'-phosphate
  modified_base 9: mod_base = OTHER; note = 2'-O-methylguanosine-3'-phosphate
  modified_base 10: mod_base = OTHER; note = 2'-fluorouridine-3'-phosphate
  modified_base 11: mod_base = OTHER; note = 2'-O-methyluridine-3'-phosphate
  modified_base 12: mod_base = OTHER; note = 2'-fluoroadenosine-3'-phosphate
  modified_base 13: mod_base = OTHER; note = 2'-O-methylcytidine-3'-phosphate
  modified_base 14: mod_base = OTHER; note = 2'-fluoroadenosine-3'-phosphate
  modified_base 15: mod_base = OTHER; note = 2'-O-methyladenosine-3'-phosphate
  modified_base 16: mod_base = OTHER; note = 2'-fluoroadenosine-3'-phosphate
  modified_base 17: mod_base = OTHER; note = 2'-O-methyladenosine-3'-phosphate
  modified_base 18: mod_base = OTHER; note = 2'-O-methylguanosine-3'-phosphate
  modified_base 19: mod_base = OTHER; note = 2'-O-methylcytidine-3'-phosphate
  modified_base 20: mod_base = OTHER; note = 2'-O-methyladenosine-3'-phosphate
  modified_base 21: mod_base = OTHER; note = 2'-O-methyladenosine-3'-phosphorothioate
  modified_base 22: mod_base = OTHER; note = 2'-O-methyluridine-3'-phosphorothioate
  modified_base 23: mod_base = OTHER; note = 2'-O-methyluridine
atcttcaagttacaaaagcaatt

SEQ ID NO: 2302 - RNA, 21 nt, synthetic construct
  source 1..21: mol_type = other RNA
  modified_base 1: mod_base = OTHER; note = 2'-O-methyluridine-3'-phosphorothioate
  modified_base 2: mod_base = OTHER; note = 2'-O-methyluridine-3'-phosphorothioate
  modified_base 3: mod_base = OTHER; note = 2'-O-methylguanosine-3'-phosphate
  modified_base 4: mod_base = OTHER; note = 2'-O-methylcytidine-3'-phosphate
  modified_base 5: mod_base = OTHER; note = 2'-O-methyluridine-3'-phosphate
  modified_base 6: mod_base = OTHER; note = 2'-O-methyluridine-3'-phosphate
  modified_base 7: mod_base = OTHER; note = 2'-fluorouridine-3'-phosphate
  modified_base 8: mod_base = OTHER; note = 2'-O-methyluridine-3'-phosphate
  modified_base 9: mod_base = OTHER; note = 2'-fluoroguanosine-3'-phosphate
  modified_base 10: mod_base = OTHER; note = 2'-fluorouridine-3'-phosphate
  modified_base 11: mod_base = OTHER; note = 2'-fluoroadenosine-3'-phosphate
  modified_base 12: mod_base = OTHER; note = 2'-O-methyladenosine-3'-phosphate
  modified_base 13: mod_base = OTHER; note = 2'-O-methylcytidine-3'-phosphate
  modified_base 14: mod_base = OTHER; note = 2'-O-methyluridine-3'-phosphate
  modified_base 15: mod_base = OTHER; note = 2'-O-methyluridine-3'-phosphate
  modified_base 16: mod_base = OTHER; note = 2'-O-methylguanosine-3'-phosphate
  modified_base 17: mod_base = OTHER; note = 2'-O-methyladenosine-3'-phosphate
  modified_base 18: mod_base = OTHER; note = 2'-O-methyladenosine-3'-phosphate
  modified_base 19: mod_base = OTHER; note = 2'-O-methylguanosine-3'-phosphate
  modified_base 20: mod_base = OTHER; note = 2'-O-methyladenosine-3'-phosphate
  modified_base 21: mod_base = OTHER; note = 2'-O-methylcytidine
ttgcttttgtaacttgaagac

SEQ ID NO: 2303 - RNA, 23 nt, synthetic construct
  source 1..23: mol_type = other RNA
  modified_base 1: mod_base = OTHER; note = 2'-O-methyluridine-3'-phosphorothioate
  modified_base 2: mod_base = OTHER; note = 2'-fluoroadenosine-3'-phosphorothioate
  modified_base 3: mod_base = OTHER; note = 2'-O-methyluridine-3'-phosphate
  modified_base 4: mod_base = OTHER; note = 2'-O-methylcytidine-3'-phosphate
  modified_base 5: mod_base = OTHER; note = 2'-O-methyluridine-3'-phosphate
  modified_base 6: mod_base = OTHER; note = 2'-fluorouridine-3'-phosphate
  modified_base 7: mod_base = OTHER; note = 2'-O-methylcytidine-3'-phosphate
  modified_base 8: mod_base = OTHER; note = 2'-fluoroadenosine-3'-phosphate
  modified_base 9: mod_base = OTHER; note = 2'-O-methyladenosine-3'-phosphate
  modified_base 10: mod_base = OTHER; note = 2'-fluoroguanosine-3'-phosphate
  modified_base 11: mod_base = OTHER; note = 2'-O-methyluridine-3'-phosphate
  modified_base 12: mod_base = OTHER; note = 2'-fluorouridine-3'-phosphate
  modified_base 13: mod_base = OTHER; note = 2'-O-methyladenosine-3'-phosphate
  modified_base 14: mod_base = OTHER; note = 2'-fluorocytidine-3'-phosphate
  modified_base 15: mod_base = OTHER; note = 2'-O-methyladenosine-3'-phosphate
  modified_base 16: mod_base = OTHER; note = 2'-fluoroadenosine-3'-phosphate
  modified_base 17: mod_base = OTHER; note = 2'-O-methyladenosine-3'-phosphate
  modified_base 18: mod_base = OTHER; note = 2'-O-methyladenosine-3'-phosphate
  modified_base 19: mod_base = OTHER; note = 2'-O-methylguanosine-3'-phosphate
  modified_base 20: mod_base = OTHER; note = 2'-O-methylcytidine-3'-phosphate
  modified_base 21: mod_base = OTHER; note = 2'-O-methyladenosine-3'-phosphorothioate
  modified_base 22: mod_base = OTHER; note = 2'-O-methyluridine-3'-phosphorothioate
  modified_base 23: mod_base = OTHER; note = 2'-O-methyluridine
tatcttcaagttacaaaagcatt

SEQ ID NO: 2304 - RNA, 21 nt, synthetic construct
  source 1..21: mol_type = other RNA
  modified_base 1: mod_base = OTHER; note = 2'-O-methyluridine-3'-phosphorothioate
  modified_base 2: mod_base = OTHER; note = 2'-O-methylguanosine-3'-phosphorothioate
  modified_base 3: mod_base = OTHER; note = 2'-O-methylcytidine-3'-phosphate
  modified_base 4: mod_base = OTHER; note = 2'-O-methyluridine-3'-phosphate
  modified_base 5: mod_base = OTHER; note = 2'-O-methyluridine-3'-phosphate
  modified_base 6: mod_base = OTHER; note = 2'-O-methyluridine-3'-phosphate
  modified_base 7: mod_base = OTHER; note = 2'-fluorouridine-3'-phosphate
  modified_base 8: mod_base = OTHER; note = 2'-O-methylguanosine-3'-phosphate
  modified_base 9: mod_base = OTHER; note = 2'-fluorouridine-3'-phosphate
  modified_base 10: mod_base = OTHER; note = 2'-fluoroadenosine-3'-phosphate
  modified_base 11: mod_base = OTHER; note = 2'-fluoroadenosine-3'-phosphate
  modified_base 12: mod_base = OTHER; note = 2'-O-methylcytidine-3'-phosphate
  modified_base 13: mod_base = OTHER; note = 2'-O-methyluridine-3'-phosphate
  modified_base 14: mod_base = OTHER; note = 2'-O-methyluridine-3'-phosphate
  modified_base 15: mod_base = OTHER; note = 2'-O-methylguanosine-3'-phosphate
  modified_base 16: mod_base = OTHER; note = 2'-O-methyladenosine-3'-phosphate
  modified_base 17: mod_base = OTHER; note = 2'-O-methyladenosine-3'-phosphate
  modified_base 18: mod_base = OTHER; note = 2'-O-methylguanosine-3'-phosphate
  modified_base 19: mod_base = OTHER; note = 2'-O-methyladenosine-3'-phosphate
  modified_base 20: mod_base = OTHER; note = 2'-O-methyluridine-3'-phosphate
  modified_base 21: mod_base = OTHER; note = 2'-O-methyladenosine
tgcttttgtaacttgaagata

SEQ ID NO: 2305 - RNA, 22 nt, synthetic construct
  source 1..22: mol_type = other RNA
  modified_base 1: mod_base = OTHER; note = 2'-O-methyluridine-3'-phosphorothioate
  modified_base 2: mod_base = OTHER; note = 2'-O-methyladenosine-3'-phosphorothioate
  modified_base 3: mod_base = OTHER; note = 2'-O-methyluridine-3'-phosphate
  modified_base 4: mod_base = OTHER; note = 2'-O-methylcytidine-3'-phosphate
  modified_base 5: mod_base = OTHER; note = 2'-fluorouridine-3'-phosphate
  modified_base 6: mod_base = OTHER; note = 2'-O-methyluridine-3'-phosphate
  modified_base 7: mod_base = OTHER; note = 2'-fluorocytidine-3'-phosphate
  modified_base 8: mod_base = OTHER; note = 2'-O-methyladenosine-3'-phosphate
  modified_base 9: mod_base = OTHER; note = 2'-O-methyladenosine-3'-phosphate
  modified_base 10: mod_base = OTHER; note = 2'-fluoroguanosine-3'-phosphate
  modified_base 11: mod_base = OTHER; note = 2'-O-methyluridine-3'-phosphate
  modified_base 12: mod_base = OTHER; note = 2'-fluorouridine-3'-phosphate
  modified_base 13: mod_base = OTHER; note = 2'-O-methyladenosine-3'-phosphate
  modified_base 14: mod_base = OTHER; note = 2'-fluorocytidine-3'-phosphate
  modified_base 15: mod_base = OTHER; note = 2'-O-methyladenosine-3'-phosphate
  modified_base 16: mod_base = OTHER; note = 2'-fluoroadenosine-3'-phosphate
  modified_base 17: mod_base = OTHER; note = 2'-O-methyladenosine-3'-phosphate
  modified_base 18: mod_base = OTHER; note = 2'-O-methyladenosine-3'-phosphate
  modified_base 19: mod_base = OTHER; note = 2'-O-methylguanosine-3'-phosphate
  modified_base 20: mod_base = OTHER; note = 2'-O-methylcytidine-3'-phosphate
  modified_base 21: mod_base = OTHER; note = 2'-O-methyladenosine-3'-phosphorothioate
  modified_base 22: mod_base = OTHER; note = 2'-O-methyluridine
tatcttcaagttacaaaagcat

SEQ ID NO: 2306 - RNA, 21 nt, synthetic construct
  source 1..21: mol_type = other RNA
  modified_base 1: mod_base = OTHER; note = 2'-O-methyluridine-3'-phosphorothioate
  modified_base 2: mod_base = OTHER; note = 2'-O-methylguanosine-3'-phosphorothioate
  modified_base 3: mod_base = OTHER; note = 2'-O-methylcytidine-3'-phosphate
  modified_base 4: mod_base = OTHER; note = 2'-O-methyluridine-3'-phosphate
  modified_base 5: mod_base = OTHER; note = 2'-O-methyluridine-3'-phosphate
  modified_base 6: mod_base = OTHER; note = 2'-O-methyluridine-3'-phosphate
  modified_base 7: mod_base = OTHER; note = 2'-fluorouridine-3'-phosphate
  modified_base 8: mod_base = OTHER; note = 2'-O-methylguanosine-3'-phosphate
  modified_base 9: mod_base = OTHER; note = 2'-fluorouridine-3'-phosphate
  modified_base 10: mod_base = OTHER; note = 2'-fluoroadenosine-3'-phosphate
  modified_base 11: mod_base = OTHER; note = 2'-fluoroadenosine-3'-phosphate
  modified_base 12: mod_base = OTHER; note = 2'-O-methylcytidine-3'-phosphate
  modified_base 13: mod_base = OTHER; note = 2'-O-methyluridine-3'-phosphate
  modified_base 14: mod_base = OTHER; note = 2'-O-methyluridine-3'-phosphate
  modified_base 15: mod_base = OTHER; note = 2'-O-methylguanosine-3'-phosphate
  modified_base 16: mod_base = OTHER; note = 2'-O-methyladenosine-3'-phosphate
  modified_base 17: mod_base = OTHER; note = 2'-O-methyladenosine-3'-phosphate
  modified_base 18: mod_base = OTHER; note = 2'-O-methylguanosine-3'-phosphate
  modified_base 19: mod_base = OTHER; note = 2'-O-methyladenosine-3'-phosphate
  modified_base 20: mod_base = OTHER; note = 2'-O-methyluridine-3'-phosphate
  modified_base 21: mod_base = OTHER; note = 2'-O-methyladenosine
tgcttttgtaacttgaagata

SEQ ID NO: 2307 - RNA, 23 nt, synthetic construct
  source 1..23: mol_type = other RNA
  modified_base 1: mod_base = OTHER; note = 2'-O-methyluridine-3'-phosphorothioate
  modified_base 2: mod_base = OTHER; note = 2'-fluoroadenosine-3'-phosphorothioate
  modified_base 3: mod_base = OTHER; note = 2'-O-methyluridine-3'-phosphate
  modified_base 4: mod_base = OTHER; note = 2'-O-methylcytidine-3'-phosphate
  modified_base 5: mod_base = OTHER; note = 2'-O-methyluridine-3'-phosphate
  modified_base 6: mod_base = OTHER; note = 2'-fluorouridine-3'-phosphate
  modified_base 7: mod_base = OTHER; note = 2'-O-methylcytidine-3'-phosphate
  modified_base 8: mod_base = OTHER; note = 2'-fluoroadenosine-3'-phosphate
  modified_base 9: mod_base = OTHER; note = 2'-O-methyladenosine-3'-phosphate
  modified_base 10: mod_base = OTHER; note = 2'-fluoroguanosine-3'-phosphate
  modified_base 11: mod_base = OTHER; note = 2'-O-methyluridine-3'-phosphate
  modified_base 12: mod_base = OTHER; note = 2'-fluorouridine-3'-phosphate
  modified_base 13: mod_base = OTHER; note = 2'-O-methyladenosine-3'-phosphate
  modified_base 14: mod_base = OTHER; note = 2'-fluorocytidine-3'-phosphate
  modified_base 15: mod_base = OTHER; note = 2'-O-methyladenosine-3'-phosphate
  modified_base 16: mod_base = OTHER; note = 2'-fluoroadenosine-3'-phosphate
  modified_base 17: mod_base = OTHER; note = 2'-O-methyladenosine-3'-phosphate
  modified_base 18: mod_base = OTHER; note = 2'-O-methyladenosine-3'-phosphate
  modified_base 19: mod_base = OTHER; note = 2'-O-methylguanosine-3'-phosphate
  modified_base 20: mod_base = OTHER; note = 2'-O-methylcytidine-3'-phosphate
  modified_base 21: mod_base = OTHER; note = 2'-O-methyladenosine-3'-phosphorothioate
  modified_base 22: mod_base = OTHER; note = 2'-O-methyluridine-3'-phosphorothioate
  modified_base 23: mod_base = OTHER; note = 2'-O-methyluridine
tatcttcaagttacaaaagcatt

SEQ ID NO: 2308 - DNA, 21 bp, synthetic construct
  source 1..21: mol_type = other DNA
  modified_base 1: mod_base = OTHER; note = 2'-O-methyluridine-3'-phosphorothioate
  modified_base 2: mod_base = OTHER; note = 2'-O-methylguanosine-3'-phosphorothioate
  modified_base 3: mod_base = OTHER; note = 2'-O-methylcytidine-3'-phosphate
  modified_base 4: mod_base = OTHER; note = 2'-O-methyluridine-3'-phosphate
  modified_base 5: mod_base = OTHER; note = 2'-O-methyluridine-3'-phosphate
  modified_base 6: mod_base = OTHER; note = 2'-O-methyluridine-3'-phosphate
  modified_base 7: mod_base = OTHER; note = 2'-fluorouridine-3'-phosphate
  modified_base 8: mod_base = OTHER; note = 2'-O-methylguanosine-3'-phosphate
  modified_base 9: mod_base = OTHER; note = 2'-fluorouridine-3'-phosphate
  modified_base 10: mod_base = OTHER; note = 2'-fluoroadenosine-3'-phosphate
  modified_base 12: mod_base = OTHER; note = 2'-O-methylcytidine-3'-phosphate
  modified_base 13: mod_base = OTHER; note = 2'-O-methyluridine-3'-phosphate
  modified_base 14: mod_base = OTHER; note = 2'-O-methyluridine-3'-phosphate
  modified_base 15: mod_base = OTHER; note = 2'-O-methylguanosine-3'-phosphate
  modified_base 16: mod_base = OTHER; note = 2'-O-methyladenosine-3'-phosphate
  modified_base 17: mod_base = OTHER; note = 2'-O-methyladenosine-3'-phosphate
  modified_base 18: mod_base = OTHER; note = 2'-O-methylguanosine-3'-phosphate
  modified_base 19: mod_base = OTHER; note = 2'-O-methyladenosine-3'-phosphate
  modified_base 20: mod_base = OTHER; note = 2'-O-methyluridine-3'-phosphate
  modified_base 21: mod_base = OTHER; note = 2'-O-methyladenosine
  misc_feature 1..10: note = RNA
  misc_feature 11: note = DNA
  misc_feature 12..21: note = RNA
tgcttttgtaacttgaagata

SEQ ID NO: 2309 - RNA, 23 nt, synthetic construct
  source 1..23: mol_type = other RNA
  modified_base 1: mod_base = OTHER; note = 2'-O-methyluridine-3'-phosphorothioate
  modified_base 2: mod_base = OTHER; note = 2'-fluoroadenosine-3'-phosphorothioate
  modified_base 3: mod_base = OTHER; note = 2'-O-methyluridine-3'-phosphate
  modified_base 4: mod_base = OTHER; note = 2'-O-methylcytidine-3'-phosphate
  modified_base 5: mod_base = OTHER; note = 2'-O-methyluridine-3'-phosphate
  modified_base 6: mod_base = OTHER; note = 2'-fluorouridine-3'-phosphate
  modified_base 7: mod_base = OTHER; note = 2'-O-methylcytidine-3'-phosphate
  modified_base 8: mod_base = OTHER; note = 2'-fluoroadenosine-3'-phosphate
  modified_base 9: mod_base = OTHER; note = 2'-O-methyladenosine-3'-phosphate
  modified_base 10: mod_base = OTHER; note = 2'-fluoroguanosine-3'-phosphate
  modified_base 11: mod_base = OTHER; note = 2'-O-methyluridine-3'-phosphate
  modified_base 12: mod_base = OTHER; note = 2'-fluorouridine-3'-phosphate
  modified_base 13: mod_base = OTHER; note = 2'-O-methyladenosine-3'-phosphate
  modified_base 14: mod_base = OTHER; note = 2'-fluorocytidine-3'-phosphate
  modified_base 15: mod_base = OTHER; note = 2'-O-methyladenosine-3'-phosphate
  modified_base 16: mod_base = OTHER; note = 2'-fluoroadenosine-3'-phosphate
  modified_base 17: mod_base = OTHER; note = 2'-O-methyladenosine-3'-phosphate
  modified_base 18: mod_base = OTHER; note = 2'-O-methyladenosine-3'-phosphate
  modified_base 19: mod_base = OTHER; note = 2'-O-methylguanosine-3'-phosphate
  modified_base 20: mod_base = OTHER; note = 2'-O-methylcytidine-3'-phosphate
  modified_base 21: mod_base = OTHER; note = 2'-O-methyladenosine-3'-phosphorothioate
  modified_base 22: mod_base = OTHER; note = 2'-O-methyluridine-3'-phosphorothioate
  modified_base 23: mod_base = OTHER; note = 2'-O-methyluridine
tatcttcaagttacaaaagcatt

SEQ ID NO: 2310 - DNA, 21 bp, synthetic construct
  source 1..21: mol_type = other DNA
  modified_base 1: mod_base = OTHER; note = 2'-O-methyluridine-3'-phosphorothioate
  modified_base 2: mod_base = OTHER; note = 2'-O-methylguanosine-3'-phosphorothioate
  modified_base 3: mod_base = OTHER; note = 2'-O-methylcytidine-3'-phosphate
  modified_base 4: mod_base = OTHER; note = 2'-O-methyluridine-3'-phosphate
  modified_base 5: mod_base = OTHER; note = 2'-O-methyluridine-3'-phosphate
  modified_base 6: mod_base = OTHER; note = 2'-O-methyluridine-3'-phosphate
  modified_base 7: mod_base = OTHER; note = 2'-fluorouridine-3'-phosphate
  modified_base 8: mod_base = OTHER; note = 2'-O-methylguanosine-3'-phosphate
  modified_base 9: mod_base = OTHER; note = 2'-fluorouridine-3'-phosphate
  modified_base 11: mod_base = OTHER; note = 2'-fluoroadenosine-3'-phosphate
  modified_base 12: mod_base = OTHER; note = 2'-O-methylcytidine-3'-phosphate
  modified_base 13: mod_base = OTHER; note = 2'-O-methyluridine-3'-phosphate
  modified_base 14: mod_base = OTHER; note = 2'-O-methyluridine-3'-phosphate
  modified_base 15: mod_base = OTHER; note = 2'-O-methylguanosine-3'-phosphate
  modified_base 16: mod_base = OTHER; note = 2'-O-methyladenosine-3'-phosphate
  modified_base 17: mod_base = OTHER; note = 2'-O-methyladenosine-3'-phosphate
  modified_base 18: mod_base = OTHER; note = 2'-O-methylguanosine-3'-phosphate
  modified_base 19: mod_base = OTHER; note = 2'-O-methyladenosine-3'-phosphate
  modified_base 20: mod_base = OTHER; note = 2'-O-methyluridine-3'-phosphate
  modified_base 21: mod_base = OTHER; note = 2'-O-methyladenosine
  misc_feature 1..9: note = RNA
  misc_feature 10: note = DNA
  misc_feature 11..21: note = RNA
tgcttttgtaacttgaagata

SEQ ID NO: 2311 - RNA, 23 nt, synthetic construct
  source 1..23: mol_type = other RNA
  modified_base 1: mod_base = OTHER; note = 2'-O-methyluridine-3'-phosphorothioate
  modified_base 2: mod_base = OTHER; note = 2'-fluoroadenosine-3'-phosphorothioate
  modified_base 3: mod_base = OTHER; note = 2'-O-methyluridine-3'-phosphate
  modified_base 4: mod_base = OTHER; note = 2'-O-methylcytidine-3'-phosphate
  modified_base 5: mod_base = OTHER; note = 2'-O-methyluridine-3'-phosphate
  modified_base 6: mod_base = OTHER; note = 2'-fluorouridine-3'-phosphate
  modified_base 7: mod_base = OTHER; note = 2'-O-methylcytidine-3'-phosphate
  modified_base 8: mod_base = OTHER; note = 2'-fluoroadenosine-3'-phosphate
  modified_base 9: mod_base = OTHER; note = 2'-O-methyladenosine-3'-phosphate
  modified_base 10: mod_base = OTHER; note = 2'-fluoroguanosine-3'-phosphate
  modified_base 11: mod_base = OTHER; note = 2'-O-methyluridine-3'-phosphate
  modified_base 12: mod_base = OTHER; note = 2'-fluorouridine-3'-phosphate
  modified_base 13: mod_base = OTHER; note = 2'-O-methyladenosine-3'-phosphate
  modified_base 14: mod_base = OTHER; note = 2'-fluorocytidine-3'-phosphate
  modified_base 15: mod_base = OTHER; note = 2'-O-methyladenosine-3'-phosphate
  modified_base 16: mod_base = OTHER; note = 2'-fluoroadenosine-3'-phosphate
  modified_base 17: mod_base = OTHER; note = 2'-O-methyladenosine-3'-phosphate
  modified_base 18: mod_base = OTHER; note = 2'-O-methyladenosine-3'-phosphate
  modified_base 19: mod_base = OTHER; note = 2'-O-methylguanosine-3'-phosphate
  modified_base 20: mod_base = OTHER; note = 2'-O-methylcytidine-3'-phosphate
  modified_base 21: mod_base = OTHER; note = 2'-O-methyladenosine-3'-phosphorothioate
  modified_base 22: mod_base = OTHER; note = 2'-O-methyluridine-3'-phosphorothioate
  modified_base 23: mod_base = OTHER; note = 2'-O-methyluridine
tatcttcaagttacaaaagcatt

SEQ ID NO: 2312 - DNA, 21 bp, synthetic construct
  source 1..21: mol_type = other DNA
  modified_base 1: mod_base = OTHER; note = 2'-O-methyluridine-3'-phosphorothioate
  modified_base 2: mod_base = OTHER; note = 2'-O-methylguanosine-3'-phosphorothioate
  modified_base 3: mod_base = OTHER; note = 2'-O-methylcytidine-3'-phosphate
  modified_base 4: mod_base = OTHER; note = 2'-O-methyluridine-3'-phosphate
  modified_base 5: mod_base = OTHER; note = 2'-O-methyluridine-3'-phosphate
  modified_base 6: mod_base = OTHER; note = 2'-O-methyluridine-3'-phosphate
  modified_base 7: mod_base = OTHER; note = 2'-fluorouridine-3'-phosphate
  modified_base 8: mod_base = OTHER; note = 2'-O-methylguanosine-3'-phosphate
  modified_base 10: mod_base = OTHER; note = 2'-fluoroadenosine-3'-phosphate
  modified_base 11: mod_base = OTHER; note = 2'-fluoroadenosine-3'-phosphate
  modified_base 12: mod_base = OTHER; note = 2'-O-methylcytidine-3'-phosphate
  modified_base 13: mod_base = OTHER; note = 2'-O-methyluridine-3'-phosphate
  modified_base 14: mod_base = OTHER; note = 2'-O-methyluridine-3'-phosphate
  modified_base 15: mod_base = OTHER; note = 2'-O-methylguanosine-3'-phosphate
  modified_base 16: mod_base = OTHER; note = 2'-O-methyladenosine-3'-phosphate
  modified_base 17: mod_base = OTHER; note = 2'-O-methyladenosine-3'-phosphate
  modified_base 18: mod_base = OTHER; note = 2'-O-methylguanosine-3'-phosphate
  modified_base 19: mod_base = OTHER; note = 2'-O-methyladenosine-3'-phosphate
  modified_base 20: mod_base = OTHER; note = 2'-O-methyluridine-3'-phosphate
  modified_base 21: mod_base = OTHER; note = 2'-O-methyladenosine
  misc_feature 1..8: note = RNA
  misc_feature 9: note = DNA
  misc_feature 10..21: note = RNA
tgcttttgtaacttgaagata

SEQ ID NO: 2313 - RNA, 23 nt, synthetic construct
  source 1..23: mol_type = other RNA
  modified_base 1: mod_base = OTHER; note = 2'-O-methyluridine-3'-phosphorothioate
  modified_base 2: mod_base = OTHER; note = 2'-fluoroadenosine-3'-phosphorothioate
  modified_base 3: mod_base = OTHER; note = 2'-O-methyluridine-3'-phosphate
  modified_base 4: mod_base = OTHER; note = 2'-O-methylcytidine-3'-phosphate
  modified_base 5: mod_base = OTHER; note = 2'-O-methyluridine-3'-phosphate
  modified_base 6: mod_base = OTHER; note = 2'-fluorouridine-3'-phosphate
  modified_base 7: mod_base = OTHER; note = 2'-O-methylcytidine-3'-phosphate
  modified_base 8: mod_base = OTHER; note = 2'-fluoroadenosine-3'-phosphate
  modified_base 9: mod_base = OTHER; note = 2'-O-methyladenosine-3'-phosphate
  modified_base 10: mod_base = OTHER; note = 2'-fluoroguanosine-3'-phosphate
  modified_base 11: mod_base = OTHER; note = 2'-O-methyluridine-3'-phosphate
  modified_base 12: mod_base = OTHER; note = 2'-fluorouridine-3'-phosphate
  modified_base 13: mod_base = OTHER; note = 2'-O-methyladenosine-3'-phosphate
  modified_base 14: mod_base = OTHER; note = 2'-fluorocytidine-3'-phosphate
  modified_base 15: mod_base = OTHER; note = 2'-O-methyladenosine-3'-phosphate
  modified_base 16: mod_base = OTHER; note = 2'-fluoroadenosine-3'-phosphate
  modified_base 17: mod_base = OTHER; note = 2'-O-methyladenosine-3'-phosphate
  modified_base 18: mod_base = OTHER; note = 2'-O-methyladenosine-3'-phosphate
  modified_base 19: mod_base = OTHER; note = 2'-O-methylguanosine-3'-phosphate
  modified_base 20: mod_base = OTHER; note = 2'-O-methylcytidine-3'-phosphate
  modified_base 21: mod_base = OTHER; note = 2'-O-methyladenosine-3'-phosphorothioate
  modified_base 22: mod_base = OTHER; note = 2'-O-methyluridine-3'-phosphorothioate
  modified_base 23: mod_base = OTHER; note = 2'-O-methyluridine
tatcttcaagttacaaaagcatt

SEQ ID NO: 2314 - RNA, 21 nt, synthetic construct
  source 1..21: mol_type = other RNA
  modified_base 1: mod_base = OTHER; note = 2'-O-methyluridine-3'-phosphorothioate
  modified_base 2: mod_base = OTHER; note = 2'-O-methylguanosine-3'-phosphorothioate
  modified_base 3: mod_base = OTHER; note = 2'-O-methylcytidine-3'-phosphate
  modified_base 4: mod_base = OTHER; note = 2'-O-methyluridine-3'-phosphate
  modified_base 5: mod_base = OTHER; note = 2'-O-methyluridine-3'-phosphate
  modified_base 6: mod_base = OTHER; note = 2'-O-methyluridine-3'-phosphate
  modified_base 7: mod_base = OTHER; note = 2'-fluorouridine-3'-phosphate
  modified_base 8: mod_base = OTHER; note = 2'-O-methylguanosine-3'-phosphate
  modified_base 9: mod_base = OTHER; note = 2'-fluorouridine-3'-phosphate
  modified_base 10: mod_base = OTHER; note = 2'-fluoroadenosine-3'-phosphate
  modified_base 11: mod_base = OTHER; note = 2'-fluorouridine-3'-phosphate
  modified_base 12: mod_base = OTHER; note = 2'-O-methylcytidine-3'-phosphate
  modified_base 13: mod_base = OTHER; note = 2'-O-methyluridine-3'-phosphate
  modified_base 14: mod_base = OTHER; note = 2'-O-methyluridine-3'-phosphate
  modified_base 15: mod_base = OTHER; note = 2'-O-methylguanosine-3'-phosphate
  modified_base 16: mod_base = OTHER; note = 2'-O-methyladenosine-3'-phosphate
  modified_base 17: mod_base = OTHER; note = 2'-O-methyladenosine-3'-phosphate
  modified_base 18: mod_base = OTHER; note = 2'-O-methylguanosine-3'-phosphate
  modified_base 19: mod_base = OTHER; note = 2'-O-methyladenosine-3'-phosphate
  modified_base 20: mod_base = OTHER; note = 2'-O-methyluridine-3'-phosphate
  modified_base 21: mod_base = OTHER; note = 2'-O-methyladenosine
tgcttttgtatcttgaagata

SEQ ID NO: 2315 - RNA, 23 nt, synthetic construct
  source 1..23: mol_type = other RNA
  modified_base 1: mod_base = OTHER; note = 2'-O-methyluridine-3'-phosphorothioate
  modified_base 2: mod_base = OTHER; note = 2'-fluoroadenosine-3'-phosphorothioate
  modified_base 3: mod_base = OTHER; note = 2'-O-methyluridine-3'-phosphate
  modified_base 4: mod_base = OTHER; note = 2'-O-methylcytidine-3'-phosphate
  modified_base 5: mod_base = OTHER; note = 2'-O-methyluridine-3'-phosphate
  modified_base 6: mod_base = OTHER; note = 2'-fluorouridine-3'-phosphate
  modified_base 7: mod_base = OTHER; note = 2'-O-methylcytidine-3'-phosphate
  modified_base 8: mod_base = OTHER; note = 2'-fluoroadenosine-3'-phosphate
  modified_base 9: mod_base = OTHER; note = 2'-O-methyladenosine-3'-phosphate
  modified_base 10: mod_base = OTHER; note = 2'-fluoroguanosine-3'-phosphate
  modified_base 11: mod_base = OTHER; note = 2'-O-methyluridine-3'-phosphate
  modified_base 12: mod_base = OTHER; note = 2'-fluorouridine-3'-phosphate
  modified_base 13: mod_base = OTHER; note = 2'-O-methyladenosine-3'-phosphate
  modified_base 14: mod_base = OTHER; note = 2'-fluorocytidine-3'-phosphate
  modified_base 15: mod_base = OTHER; note = 2'-O-methyladenosine-3'-phosphate
  modified_base 16: mod_base = OTHER; note = 2'-fluoroadenosine-3'-phosphate
  modified_base 17: mod_base = OTHER; note = 2'-O-methyladenosine-3'-phosphate
  modified_base 18: mod_base = OTHER; note = 2'-O-methyladenosine-3'-phosphate
  modified_base 19: mod_base = OTHER; note = 2'-O-methylguanosine-3'-phosphate
  modified_base 20: mod_base = OTHER; note = 2'-O-methylcytidine-3'-phosphate
  modified_base 21: mod_base = OTHER; note = 2'-O-methyladenosine-3'-phosphorothioate
  modified_base 22: mod_base = OTHER; note = 2'-O-methyluridine-3'-phosphorothioate
  modified_base 23: mod_base = OTHER; note = 2'-O-methyluridine
tatcttcaagttacaaaagcatt

SEQ ID NO: 2316 - RNA, 21 nt, synthetic construct
  source 1..21: mol_type = other RNA
  modified_base 1: mod_base = OTHER; note = 2'-O-methyluridine-3'-phosphorothioate
  modified_base 2: mod_base = OTHER; note = 2'-O-methylguanosine-3'-phosphorothioate
  modified_base 3: mod_base = OTHER; note = 2'-O-methylcytidine-3'-phosphate
  modified_base 4: mod_base = OTHER; note = 2'-O-methyluridine-3'-phosphate
  modified_base 5: mod_base = OTHER; note = 2'-O-methyluridine-3'-phosphate
  modified_base 6: mod_base = OTHER; note = 2'-O-methyluridine-3'-phosphate
  modified_base 7: mod_base = OTHER; note = 2'-fluorouridine-3'-phosphate
  modified_base 8: mod_base = OTHER; note = 2'-O-methylguanosine-3'-phosphate
  modified_base 9: mod_base = OTHER; note = 2'-fluorouridine-3'-phosphate
  modified_base 10: mod_base = OTHER; note = 2'-fluoroadenosine-3'-phosphate
  modified_base 11: mod_base = OTHER; note = 2'-fluorocytidine-3'-phosphate
  modified_base 12: mod_base = OTHER; note = 2'-O-methylcytidine-3'-phosphate
  modified_base 13: mod_base = OTHER; note = 2'-O-methyluridine-3'-phosphate
  modified_base 14: mod_base = OTHER; note = 2'-O-methyluridine-3'-phosphate
  modified_base 15: mod_base = OTHER; note = 2'-O-methylguanosine-3'-phosphate
  modified_base 16: mod_base = OTHER; note = 2'-O-methyladenosine-3'-phosphate
  modified_base 17: mod_base = OTHER; note = 2'-O-methyladenosine-3'-phosphate
  modified_base 18: mod_base = OTHER; note = 2'-O-methylguanosine-3'-phosphate
  modified_base 19: mod_base = OTHER; note = 2'-O-methyladenosine-3'-phosphate
  modified_base 20: mod_base = OTHER; note = 2'-O-methyluridine-3'-phosphate
  modified_base 21: mod_base = OTHER; note = 2'-O-methyladenosine
tgcttttgtaccttgaagata

SEQ ID NO: 2317 - RNA, 23 nt, synthetic construct
  source 1..23: mol_type = other RNA
  modified_base 1: mod_base = OTHER; note = 2'-O-methyluridine-3'-phosphorothioate
  modified_base 2: mod_base = OTHER; note = 2'-fluoroadenosine-3'-phosphorothioate
  modified_base 3: mod_base = OTHER; note = 2'-O-methyluridine-3'-phosphate
  modified_base 4: mod_base = OTHER; note = 2'-O-methylcytidine-3'-phosphate
  modified_base 5: mod_base = OTHER; note = 2'-O-methyluridine-3'-phosphate
  modified_base 6: mod_base = OTHER; note = 2'-fluorouridine-3'-phosphate
  modified_base 7: mod_base = OTHER; note = 2'-O-methylcytidine-3'-phosphate
  modified_base 8: mod_base = OTHER; note = 2'-fluoroadenosine-3'-phosphate
  modified_base 9: mod_base = OTHER; note = 2'-O-methyladenosine-3'-phosphate
  modified_base 10: mod_base = OTHER; note = 2'-fluoroguanosine-3'-phosphate
  modified_base 11: mod_base = OTHER; note = 2'-O-methyluridine-3'-phosphate
  modified_base 12: mod_base = OTHER; note = 2'-fluorouridine-3'-phosphate
  modified_base 13: mod_base = OTHER; note = 2'-O-methyladenosine-3'-phosphate
  modified_base 14: mod_base = OTHER; note = 2'-fluorocytidine-3'-phosphate
  modified_base 15: mod_base = OTHER; note = 2'-O-methyladenosine-3'-phosphate
  modified_base 16: mod_base = OTHER; note = 2'-fluoroadenosine-3'-phosphate
  modified_base 17: mod_base = OTHER; note = 2'-O-methyladenosine-3'-phosphate
  modified_base 18: mod_base = OTHER; note = 2'-O-methyladenosine-3'-phosphate
  modified_base 19: mod_base = OTHER; note = 2'-O-methylguanosine-3'-phosphate
  modified_base 20: mod_base = OTHER; note = 2'-O-methylcytidine-3'-phosphate
  modified_base 21: mod_base = OTHER; note = 2'-O-methyladenosine-3'-phosphorothioate
  modified_base 22: mod_base = OTHER; note = 2'-O-methyluridine-3'-phosphorothioate
  modified_base 23: mod_base = OTHER; note = 2'-O-methyluridine
tatcttcaagttacaaaagcatt

SEQ ID NO: 2318 - RNA, 21 nt, synthetic construct
  source 1..21: mol_type = other RNA
  modified_base 1: mod_base = OTHER; note = 2'-O-methyluridine-3'-phosphorothioate
  modified_base 2: mod_base = OTHER; note = 2'-O-methylguanosine-3'-phosphorothioate
  modified_base 3: mod_base = OTHER; note = 2'-O-methylcytidine-3'-phosphate
  modified_base 4: mod_base = OTHER; note = 2'-O-methyluridine-3'-phosphate
  modified_base 5: mod_base = OTHER; note = 2'-O-methyluridine-3'-phosphate
  modified_base 6: mod_base = OTHER; note = 2'-O-methyluridine-3'-phosphate
  modified_base 7: mod_base = OTHER; note = 2'-fluorouridine-3'-phosphate
  modified_base 8: mod_base = OTHER; note = 2'-O-methylguanosine-3'-phosphate
  modified_base 9: mod_base = OTHER; note = 2'-fluorouridine-3'-phosphate
  modified_base 10: mod_base = OTHER; note = 2'-fluoroadenosine-3'-phosphate
  modified_base 11: mod_base = OTHER; note = 2'-fluoroguanosine-3'-phosphate
  modified_base 12: mod_base = OTHER; note = 2'-O-methylcytidine-3'-phosphate
  modified_base 13: mod_base = OTHER; note = 2'-O-methyluridine-3'-phosphate
  modified_base 14: mod_base = OTHER; note = 2'-O-methyluridine-3'-phosphate
  modified_base 15: mod_base = OTHER; note = 2'-O-methylguanosine-3'-phosphate
  modified_base 16: mod_base = OTHER; note = 2'-O-methyladenosine-3'-phosphate
  modified_base 17: mod_base = OTHER; note = 2'-O-methyladenosine-3'-phosphate
  modified_base 18: mod_base = OTHER; note = 2'-O-methylguanosine-3'-phosphate
  modified_base 19: mod_base = OTHER; note = 2'-O-methyladenosine-3'-phosphate
  modified_base 20: mod_base = OTHER; note = 2'-O-methyluridine-3'-phosphate
  modified_base 21: mod_base = OTHER; note = 2'-O-methyladenosine
tgcttttgtagcttgaagata

SEQ ID NO: 2319 - RNA, 23 nt, synthetic construct
  source 1..23: mol_type = other RNA
  modified_base 1: mod_base = OTHER; note = 2'-O-methyladenosine-3'-phosphorothioate
  modified_base 2: mod_base = OTHER; note = 2'-fluorouridine-3'-phosphorothioate
  modified_base 3: mod_base = OTHER; note = 2'-fluorocytidine-3'-phosphate
  modified_base 4: mod_base = OTHER; note = 2'-O-methyluridine-3'-phosphate
  modified_base 5: mod_base = OTHER; note = 2'-O-methyluridine-3'-phosphate
  modified_base 6: mod_base = OTHER; note = 2'-fluorocytidine-3'-phosphate
  modified_base 7: mod_base = OTHER; note = 2'-O-methyladenosine-3'-phosphate
  modified_base 8: mod_base = OTHER; note = 2'-fluoroadenosine-3'-phosphate
  modified_base 9: mod_base = OTHER; note = 2'-O-methylguanosine-3'-phosphate
  modified_base 10: mod_base = OTHER; note = 2'-fluorouridine-3'-phosphate
  modified_base 11: mod_base = OTHER; note = 2'-O-methyluridine-3'-phosphate
  modified_base 12: mod_base = OTHER; note = 2'-fluoroadenosine-3'-phosphate
  modified_base 13: mod_base = OTHER; note = 2'-O-methylcytidine-3'-phosphate
  modified_base 14: mod_base = OTHER; note = 2'-fluoroadenosine-3'-phosphate
  modified_base 15: mod_base = OTHER; note = 2'-O-methyladenosine-3'-phosphate
  modified_base 16: mod_base = OTHER; note = 2'-fluoroadenosine-3'-phosphate
  modified_base 17: mod_base = OTHER; note = 2'-O-methyladenosine-3'-phosphate
  modified_base 18: mod_base = OTHER; note = 2'-O-methylguanosine-3'-phosphate
  modified_base 19: mod_base = OTHER; note = 2'-O-methylcytidine-3'-phosphate
  modified_base 20: mod_base = OTHER; note = 2'-O-methyladenosine-3'-phosphate
  modified_base 21: mod_base = OTHER; note = 2'-O-methyladenosine-3'-phosphorothioate
  modified_base 22: mod_base = OTHER; note = 2'-O-methyluridine-3'-phosphorothioate
  modified_base 23: mod_base = OTHER; note = 2'-O-methyluridine
atcttcaagttacaaaagcaatt

SEQ ID NO: 2320 - RNA, 21 nt, synthetic construct
  source 1..21: mol_type = other RNA
  modified_base 1: mod_base = OTHER; note = 2'-O-methyluridine-3'-phosphorothioate
  modified_base 2: mod_base = OTHER; note = 2'-O-methyluridine-3'-phosphorothioate
  modified_base 3: mod_base = OTHER; note = 2'-O-methylguanosine-3'-phosphate
  modified_base 4: mod_base = OTHER; note = 2'-O-methylcytidine-3'-phosphate
  modified_base 5: mod_base = OTHER; note = 2'-O-methyluridine-3'-phosphate
  modified_base 6: mod_base = OTHER; note = 2'-O-methyluridine-3'-phosphate
  modified_base 7: mod_base = OTHER; note = 2'-fluorouridine-3'-phosphate
  modified_base 8: mod_base = OTHER; note = 2'-O-methyluridine-3'-phosphate
  modified_base 9: mod_base = OTHER; note = 2'-fluoroguanosine-3'-phosphate
  modified_base 10: mod_base = OTHER; note = 2'-fluorouridine-3'-phosphate
  modified_base 11: mod_base = OTHER; note = 2'-fluoroadenosine-3'-phosphate
  modified_base 12: mod_base = OTHER; note = 2'-O-methyladenosine-3'-phosphate
  modified_base 13: mod_base = OTHER; note = 2'-O-methylcytidine-3'-phosphate
  modified_base 14: mod_base = OTHER; note = 2'-O-methyluridine-3'-phosphate
  modified_base 15: mod_base = OTHER; note = 2'-O-methyluridine-3'-phosphate
  modified_base 16: mod_base = OTHER; note = 2'-O-methylguanosine-3'-phosphate
  modified_base 17: mod_base = OTHER; note = 2'-O-methyladenosine-3'-phosphate
  modified_base 18: mod_base = OTHER; note = 2'-O-methyladenosine-3'-phosphate
  modified_base 19: mod_base = OTHER; note = 2'-O-methylguanosine-3'-phosphate
  modified_base 20: mod_base = OTHER; note = 2'-O-methyladenosine-3'-phosphate
  modified_base 21: mod_base = OTHER; note = 2'-O-methyluridine
ttgcttttgtaacttgaagat

SEQ ID NO: 2321 - RNA, 23 nt, synthetic construct
  source 1..23: mol_type = other RNA
  modified_base 1: mod_base = OTHER; note = 2'-O-methyladenosine-3'-phosphorothioate
  modified_base 2: mod_base = OTHER; note = 2'-fluorouridine-3'-phosphorothioate
  modified_base 3: mod_base = OTHER; note = 2'-fluorocytidine-3'-phosphate
  modified_base 4: mod_base = OTHER; note = 2'-O-methyluridine-3'-phosphate
  modified_base 5: mod_base = OTHER; note = 2'-O-methyluridine-3'-phosphate
  modified_base 6: mod_base = OTHER; note = 2'-fluorocytidine-3'-phosphate
  modified_base 7: mod_base = OTHER; note = 2'-O-methyladenosine-3'-phosphate
  modified_base 8: mod_base = OTHER; note = 2'-fluoroadenosine-3'-phosphate
  modified_base 9: mod_base = OTHER; note = 2'-O-methylguanosine-3'-phosphate
  modified_base 10: mod_base = OTHER; note = 2'-fluorouridine-3'-phosphate
  modified_base 11: mod_base = OTHER; note = 2'-O-methyluridine-3'-phosphate
  modified_base 12: mod_base = OTHER; note = 2'-fluoroadenosine-3'-phosphate
  modified_base 13: mod_base = OTHER; note = 2'-O-methylcytidine-3'-phosphate
  modified_base 14: mod_base = OTHER; note = 2'-fluoroadenosine-3'-phosphate
  modified_base 15: mod_base = OTHER; note = 2'-O-methyladenosine-3'-phosphate
  modified_base 16: mod_base = OTHER; note = 2'-fluoroadenosine-3'-phosphate
  modified_base 17: mod_base = OTHER; note = 2'-O-methyladenosine-3'-phosphate
  modified_base 18: mod_base = OTHER; note = 2'-O-methylguanosine-3'-phosphate
  modified_base 19: mod_base = OTHER; note = 2'-O-methylcytidine-3'-phosphate
  modified_base 20: mod_base = OTHER; note = 2'-O-methyladenosine-3'-phosphate
  modified_base 21: mod_base = OTHER; note = 2'-O-methyladenosine-3'-phosphorothioate
  modified_base 22: mod_base = OTHER; note = 2'-O-methyluridine-3'-phosphorothioate
  modified_base 23: mod_base = OTHER; note = 2'-O-methyluridine
atcttcaagttacaaaagcaatt

SEQ ID NO: 2322 - RNA, 21 nt, synthetic construct
  source 1..21: mol_type = other RNA
  modified_base 1: mod_base = OTHER; note = 2'-O-methyluridine-3'-phosphorothioate
  modified_base 2: mod_base = OTHER; note = 2'-O-methyluridine-3'-phosphorothioate
  modified_base 3: mod_base = OTHER; note = 2'-O-methylguanosine-3'-phosphate
  modified_base 4: mod_base = OTHER; note = 2'-O-methylcytidine-3'-phosphate
  modified_base 5: mod_base = OTHER; note = 2'-O-methyluridine-3'-phosphate
  modified_base 6: mod_base = OTHER; note = 2'-O-methyluridine-3'-phosphate
  modified_base 7: mod_base = OTHER; note = 2'-fluorouridine-3'-phosphate
  modified_base 8: mod_base = OTHER; note = 2'-O-methyluridine-3'-phosphate
  modified_base 9: mod_base = OTHER; note = 2'-fluoroguanosine-3'-phosphate
  modified_base 10: mod_base = OTHER; note = 2'-fluorouridine-3'-phosphate
  modified_base 11: mod_base = OTHER; note = 2'-fluoroadenosine-3'-phosphate
  modified_base 12: mod_base = OTHER; note = 2'-O-methyladenosine-3'-phosphate
  modified_base 13: mod_base = OTHER; note = 2'-O-methylcytidine-3'-phosphate
  modified_base 14: mod_base = OTHER; note = 2'-O-methyluridine-3'-phosphate
  modified_base 15: mod_base = OTHER; note = 2'-O-methyluridine-3'-phosphate
  modified_base 16: mod_base = OTHER; note = 2'-O-methylguanosine-3'-phosphate
  modified_base 17: mod_base = OTHER; note = 2'-O-methyladenosine-3'-phosphate
  modified_base 18: mod_base = OTHER; note = 2'-O-methyladenosine-3'-phosphate
  modified_base 19: mod_base = OTHER; note = 2'-O-methylguanosine-3'-phosphate
  modified_base 20: mod_base = OTHER; note = 2'-O-methyladenosine-3'-phosphate
  modified_base 21: mod_base = OTHER; note = 2'-O-methylcytidine
ttgcttttgtaacttgaagac

SEQ ID NO: 2323 - RNA, 23 nt, synthetic construct
  source 1..23: mol_type = other RNA
  modified_base 1: mod_base = OTHER; note = 2'-O-methyladenosine-3'-phosphorothioate
  modified_base 2: mod_base = OTHER; note = 2'-fluorouridine-3'-phosphorothioate
  modified_base 3: mod_base = OTHER; note = 2'-O-methylcytidine-3'-phosphate
  modified_base 4: mod_base = OTHER; note = 2'-O-methyluridine-3'-phosphate
  modified_base 5: mod_base = OTHER; note = 2'-O-methyluridine-3'-phosphate
  modified_base 6: mod_base = OTHER; note = 2'-O-methylcytidine-3'-phosphate
  modified_base 7: mod_base = OTHER; note = 2'-O-methyladenosine-3'-phosphate
  modified_base 8: mod_base = OTHER; note = 2'-fluoroadenosine-3'-phosphate
  modified_base 9: mod_base = OTHER; note = 2'-O-methylguanosine-3'-phosphate
  modified_base 10: mod_base = OTHER; note = 2'-O-methyluridine-3'-phosphate
  modified_base 11: mod_base = OTHER; note = 2'-O-methyluridine-3'-phosphate
  modified_base 12: mod_base = OTHER; note = 2'-fluoroadenosine-3'-phosphate
  modified_base 13: mod_base = OTHER; note = 2'-O-methylcytidine-3'-phosphate
  modified_base 14: mod_base = OTHER; note = 2'-fluoroadenosine-3'-phosphate
  modified_base 15: mod_base = OTHER; note = 2'-O-methyladenosine-3'-phosphate
  modified_base 16: mod_base = OTHER; note = 2'-fluoroadenosine-3'-phosphate
  modified_base 17: mod_base = OTHER; note = 2'-O-methyladenosine-3'-phosphate
  modified_base 18: mod_base = OTHER; note = 2'-O-methylguanosine-3'-phosphate
  modified_base 19: mod_base = OTHER; note = 2'-O-methylcytidine-3'-phosphate
  modified_base 20: mod_base = OTHER; note = 2'-O-methyladenosine-3'-phosphate
  modified_base 21: mod_base = OTHER; note = 2'-O-methyladenosine-3'-phosphorothioate
  modified_base 22: mod_base = OTHER; note = 2'-O-methyluridine-3'-phosphorothioate
  modified_base 23: mod_base = OTHER; note = 2'-O-methyluridine
atcttcaagttacaaaagcaatt

SEQ ID NO: 2324 - RNA, 21 nt, synthetic construct
  source 1..21: mol_type = other RNA
  modified_base 1: mod_base = OTHER; note = 2'-O-methyluridine-3'-phosphorothioate
  modified_base 2: mod_base = OTHER; note = 2'-O-methyluridine-3'-phosphorothioate
  modified_base 3: mod_base = OTHER; note = 2'-O-methylguanosine-3'-phosphate
  modified_base 4: mod_base = OTHER; note = 2'-O-methylcytidine-3'-phosphate
  modified_base 5: mod_base = OTHER; note = 2'-O-methyluridine-3'-phosphate
  modified_base 6: mod_base = OTHER; note = 2'-O-methyluridine-3'-phosphate
  modified_base 7: mod_base = OTHER; note = 2'-fluorouridine-3'-phosphate
  modified_base 8: mod_base = OTHER; note = 2'-O-methyluridine-3'-phosphate
  modified_base 9: mod_base = OTHER; note = 2'-fluoroguanosine-3'-phosphate
  modified_base 10: mod_base = OTHER; note = 2'-fluorouridine-3'-phosphate
  modified_base 11: mod_base = OTHER; note = 2'-fluoroadenosine-3'-phosphate
  modified_base 12: mod_base = OTHER; note = 2'-O-methyladenosine-3'-phosphate
  modified_base 13: mod_base = OTHER; note = 2'-O-methylcytidine-3'-phosphate
  modified_base 14: mod_base = OTHER; note = 2'-O-methyluridine-3'-phosphate
  modified_base 15: mod_base = OTHER; note = 2'-O-methyluridine-3'-phosphate
  modified_base 16: mod_base = OTHER; note = 2'-O-methylguanosine-3'-phosphate
  modified_base 17: mod_base = OTHER; note = 2'-O-methyladenosine-3'-phosphate
  modified_base 18: mod_base = OTHER; note = 2'-O-methyladenosine-3'-phosphate
  modified_base 19: mod_base = OTHER; note = 2'-O-methylguanosine-3'-phosphate
  modified_base 20: mod_base = OTHER; note = 2'-O-methyladenosine-3'-phosphate
  modified_base 21: mod_base = OTHER; note = 2'-O-methylcytidine
ttgcttttgtaacttgaagac

SEQ ID NO: 2325 - RNA, 23 nt, synthetic construct
  source 1..23: mol_type = other RNA
  modified_base 1: mod_base = OTHER; note = 2'-O-methyladenosine-3'-phosphorothioate
  modified_base 2: mod_base = OTHER; note = 2'-fluorouridine-3'-phosphorothioate
  modified_base 3: mod_base = OTHER; note = 2'-O-methylcytidine-3'-phosphate
  modified_base 4: mod_base = OTHER; note = 2'-O-methyluridine-3'-phosphate
  modified_base 5: mod_base = OTHER; note = 2'-O-methyluridine-3'-phosphate
  modified_base 6: mod_base = OTHER; note = 2'-O-methylcytidine-3'-phosphate
  modified_base 7: mod_base = OTHER; note = 2'-O-methyladenosine-3'-phosphate
  modified_base 8: mod_base = OTHER; note = 2'-fluoroadenosine-3'-phosphate
  modified_base 9: mod_base = OTHER; note = 2'-O-methylguanosine-3'-phosphate
  modified_base 10: mod_base = OTHER; note = 2'-fluorouridine-3'-phosphate
  modified_base 11: mod_base = OTHER; note = 2'-O-methyluridine-3'-phosphate
  modified_base 12: mod_base = OTHER; note = 2'-O-methyladenosine-3'-phosphate
  modified_base 13: mod_base = OTHER; note = 2'-O-methylcytidine-3'-phosphate
  modified_base 14: mod_base = OTHER; note = 2'-fluoroadenosine-3'-phosphate
  modified_base 15: mod_base = OTHER; note = 2'-O-methyladenosine-3'-phosphate
  modified_base 16: mod_base = OTHER; note = 2'-fluoroadenosine-3'-phosphate
  modified_base 17: mod_base = OTHER; note = 2'-O-methyladenosine-3'-phosphate
  modified_base 18: mod_base = OTHER; note = 2'-O-methylguanosine-3'-phosphate
  modified_base 19: mod_base = OTHER; note = 2'-O-methylcytidine-3'-phosphate
  modified_base 20: mod_base = OTHER; note = 2'-O-methyladenosine-3'-phosphate
  modified_base 21: mod_base = OTHER; note = 2'-O-methyladenosine-3'-phosphorothioate
  modified_base 22: mod_base = OTHER; note = 2'-O-methyluridine-3'-phosphorothioate
  modified_base 23: mod_base = OTHER; note = 2'-O-methyluridine
atcttcaagttacaaaagcaatt

SEQ ID NO: 2326 - RNA, 21 nt, synthetic construct
  source 1..21: mol_type = other RNA
  modified_base 1: mod_base = OTHER; note = 2'-O-methyluridine-3'-phosphorothioate
  modified_base 2: mod_base = OTHER; note = 2'-O-methyluridine-3'-phosphorothioate
  modified_base 3: mod_base = OTHER; note = 2'-O-methylguanosine-3'-phosphate
  modified_base 4: mod_base = OTHER; note = 2'-O-methylcytidine-3'-phosphate
  modified_base 5: mod_base = OTHER; note = 2'-O-methyluridine-3'-phosphate
  modified_base 6: mod_base = OTHER; note = 2'-O-methyluridine-3'-phosphate
  modified_base 7: mod_base = OTHER; note = 2'-fluorouridine-3'-phosphate
  modified_base 8: mod_base = OTHER; note = 2'-O-methyluridine-3'-phosphate
  modified_base 9: mod_base = OTHER; note = 2'-fluoroguanosine-3'-phosphate
  modified_base 10: mod_base = OTHER; note = 2'-fluorouridine-3'-phosphate
  modified_base 11: mod_base = OTHER; note = 2'-fluoroadenosine-3'-phosphate
  modified_base 12: mod_base = OTHER; note = 2'-O-methyladenosine-3'-phosphate
  modified_base 13: mod_base = OTHER; note = 2'-O-methylcytidine-3'-phosphate
  modified_base 14: mod_base = OTHER; note = 2'-O-methyluridine-3'-phosphate
  modified_base 15: mod_base = OTHER; note = 2'-O-methyluridine-3'-phosphate
  modified_base 16: mod_base = OTHER; note = 2'-O-methylguanosine-3'-phosphate
  modified_base 17: mod_base = OTHER; note = 2'-O-methyladenosine-3'-phosphate
  modified_base 18: mod_base = OTHER; note = 2'-O-methyladenosine-3'-phosphate
  modified_base 19: mod_base = OTHER; note = 2'-O-methylguanosine-3'-phosphate
  modified_base 20: mod_base = OTHER; note = 2'-O-methyladenosine-3'-phosphate
  modified_base 21: mod_base = OTHER; note = 2'-O-methyluridine
ttgcttttgtaacttgaagat

SEQ ID NO: 2327 - RNA, 23 nt, synthetic construct
  source 1..23: mol_type = other RNA
  modified_base 1: mod_base = OTHER; note = 2'-O-methyladenosine-3'-phosphorothioate
  modified_base 2: mod_base = OTHER; note = 2'-fluorouridine-3'-phosphorothioate
  modified_base 3: mod_base = OTHER; note = 2'-O-methylcytidine-3'-phosphate
  modified_base 4: mod_base = OTHER; note = 2'-O-methyluridine-3'-phosphate
  modified_base 5: mod_base = OTHER; note = 2'-O-methyluridine-3'-phosphate
  modified_base 6: mod_base = OTHER; note = 2'-O-methylcytidine-3'-phosphate
  modified_base 7: mod_base = OTHER; note = 2'-O-methyladenosine-3'-phosphate
  modified_base 8: mod_base = OTHER; note = 2'-fluoroadenosine-3'-phosphate
  modified_base 9: mod_base = OTHER; note = 2'-O-methylguanosine-3'-phosphate
  modified_base 10: mod_base = OTHER; note = 2'-fluorouridine-3'-phosphate
  modified_base 11: mod_base = OTHER; note = 2'-O-methyluridine-3'-phosphate
  modified_base 12: mod_base = OTHER; note = 2'-O-methyladenosine-3'-phosphate
  modified_base 13: mod_base = OTHER; note = 2'-O-methylcytidine-3'-phosphate
  modified_base 14: mod_base = OTHER; note = 2'-fluoroadenosine-3'-phosphate
  modified_base 15: mod_base = OTHER; note = 2'-O-methyladenosine-3'-phosphate
  modified_base 16: mod_base = OTHER; note = 2'-fluoroadenosine-3'-phosphate
  modified_base 17: mod_base = OTHER; note = 2'-O-methyladenosine-3'-phosphate
  modified_base 18: mod_base = OTHER; note = 2'-O-methylguanosine-3'-phosphate
  modified_base 19: mod_base = OTHER; note = 2'-O-methylcytidine-3'-phosphate
  modified_base 20: mod_base = OTHER; note = 2'-O-methyladenosine-3'-phosphate
  modified_base 21: mod_base = OTHER; note = 2'-O-methyladenosine-3'-phosphorothioate
  modified_base 22: mod_base = OTHER; note = 2'-O-methyluridine-3'-phosphorothioate
  modified_base 23: mod_base = OTHER; note = 2'-O-methyluridine
atcttcaagttacaaaagcaatt

SEQ ID NO: 2328 - RNA, 21 nt, synthetic construct
  source 1..21: mol_type = other RNA
  modified_base 1: mod_base = OTHER; note = 2'-O-methyluridine-3'-phosphorothioate
  modified_base 2: mod_base = OTHER; note = 2'-O-methyluridine-3'-phosphorothioate
  modified_base 3: mod_base = OTHER; note = 2'-O-methylguanosine-3'-phosphate
  modified_base 4: mod_base = OTHER; note = 2'-O-methylcytidine-3'-phosphate
  modified_base 5: mod_base = OTHER; note = 2'-O-methyluridine-3'-phosphate
  modified_base 6: mod_base = OTHER; note = 2'-O-methyluridine-3'-phosphate
  modified_base 7: mod_base = OTHER; note = 2'-fluorouridine-3'-phosphate
  modified_base 8: mod_base = OTHER; note = 2'-O-methyluridine-3'-phosphate
  modified_base 9: mod_base = OTHER; note = 2'-fluoroguanosine-3'-phosphate
  modified_base 10: mod_base = OTHER; note = 2'-fluorouridine-3'-phosphate
  modified_base 11: mod_base = OTHER; note = 2'-fluoroadenosine-3'-phosphate
  modified_base 12: mod_base = OTHER; note = 2'-O-methyladenosine-3'-phosphate
  modified_base 13: mod_base = OTHER; note = 2'-O-methylcytidine-3'-phosphate
  modified_base 14: mod_base = OTHER; note = 2'-O-methyluridine-3'-phosphate
  modified_base 15: mod_base = OTHER; note = 2'-O-methyluridine-3'-phosphate
  modified_base 16: mod_base = OTHER; note = 2'-O-methylguanosine-3'-phosphate
  modified_base 17: mod_base = OTHER; note = 2'-O-methyladenosine-3'-phosphate
  modified_base 18: mod_base = OTHER; note = 2'-O-methyladenosine-3'-phosphate
  modified_base 19: mod_base = OTHER; note = 2'-O-methylguanosine-3'-phosphate
  modified_base 20: mod_base = OTHER; note = 2'-O-methyladenosine-3'-phosphate
  modified_base 21: mod_base = OTHER; note = 2'-O-methylcytidine
ttgcttttgtaacttgaagac

SEQ ID NO: 2329 - RNA, 23 nt, synthetic construct
  source 1..23: mol_type = other RNA
  modified_base 1: mod_base = OTHER; note = 2'-O-methyladenosine-3'-phosphorothioate
  modified_base 2: mod_base = OTHER; note = 2'-fluorouridine-3'-phosphorothioate
  modified_base 3: mod_base = OTHER; note = 2'-O-methylcytidine-3'-phosphate
  modified_base 4: mod_base = OTHER; note = 2'-O-methyluridine-3'-phosphate
  modified_base 5: mod_base = OTHER; note = 2'-O-methyluridine-3'-phosphate
  modified_base 6: mod_base = OTHER; note = 2'-fluorocytidine-3'-phosphate
  modified_base 7: mod_base = OTHER; note = 2'-O-methyladenosine-3'-phosphate
  modified_base 8: mod_base = OTHER; note = 2'-fluoroadenosine-3'-phosphate
  modified_base 9: mod_base = OTHER; note = 2'-O-methylguanosine-3'-phosphate
  modified_base 10: mod_base = OTHER; note = 2'-fluorouridine-3'-phosphate
  modified_base 11: mod_base = OTHER; note = 2'-O-methyluridine-3'-phosphate
  modified_base 12: mod_base = OTHER; note = 2'-fluoroadenosine-3'-phosphate
  modified_base 13: mod_base = OTHER; note = 2'-O-methylcytidine-3'-phosphate
  modified_base 14: mod_base = OTHER; note = 2'-fluoroadenosine-3'-phosphate
  modified_base 15: mod_base = OTHER; note = 2'-O-methyladenosine-3'-phosphate
  modified_base 16: mod_base = OTHER; note = 2'-fluoroadenosine-3'-phosphate
  modified_base 17: mod_base = OTHER; note = 2'-O-methyladenosine-3'-phosphate
  modified_base 18: mod_base = OTHER; note = 2'-O-methylguanosine-3'-phosphate
  modified_base 19: mod_base = OTHER; note = 2'-O-methylcytidine-3'-phosphate
  modified_base 20: mod_base = OTHER; note = 2'-O-methyladenosine-3'-phosphate
  modified_base 21: mod_base = OTHER; note = 2'-O-methyladenosine-3'-phosphorothioate
  modified_base 22: mod_base = OTHER; note = 2'-O-methyluridine-3'-phosphorothioate
  modified_base 23: mod_base = OTHER; note = 2'-O-methyluridine
atcttcaagttacaaaagcaatt

SEQ ID NO: 2330 - RNA, 21 nt, synthetic construct
  source 1..21: mol_type = other RNA
  modified_base 1: mod_base = OTHER; note = 2'-O-methyluridine-3'-phosphorothioate
  modified_base 2: mod_base = OTHER; note = 2'-O-methyluridine-3'-phosphorothioate
  modified_base 3: mod_base = OTHER; note = 2'-O-methylguanosine-3'-phosphate
  modified_base 4: mod_base = OTHER; note = 2'-O-methylcytidine-3'-phosphate
  modified_base 5: mod_base = OTHER; note = 2'-O-methyluridine-3'-phosphate
  modified_base 6: mod_base = OTHER; note = 2'-O-methyluridine-3'-phosphate
  modified_base 7: mod_base = OTHER; note = 2'-fluorouridine-3'-phosphate
  modified_base 8: mod_base = OTHER; note = 2'-O-methyluridine-3'-phosphate
  modified_base 9: mod_base = OTHER; note = 2'-fluoroguanosine-3'-phosphate
  modified_base 10: mod_base = OTHER; note = 2'-fluorouridine-3'-phosphate
  modified_base 11: mod_base = OTHER; note = 2'-fluoroadenosine-3'-phosphate
  modified_base 12: mod_base = OTHER; note = 2'-O-methyladenosine-3'-phosphate
  modified_base 13: mod_base = OTHER; note = 2'-O-methylcytidine-3'-phosphate
  modified_base 14: mod_base = OTHER; note = 2'-O-methyluridine-3'-phosphate
  modified_base 15: mod_base = OTHER; note = 2'-O-methyluridine-3'-phosphate
  modified_base 16: mod_base = OTHER; note = 2'-O-methylguanosine-3'-phosphate
  modified_base 17: mod_base = OTHER; note = 2'-O-methyladenosine-3'-phosphate
  modified_base 18: mod_base = OTHER; note = 2'-O-methyladenosine-3'-phosphate
  modified_base 19: mod_base = OTHER; note = 2'-O-methylguanosine-3'-phosphate
  modified_base 20: mod_base = OTHER; note = 2'-O-methyladenosine-3'-phosphate
  modified_base 21: mod_base = OTHER; note = 2'-O-methylcytidine
ttgcttttgtaacttgaagac

SEQ ID NO: 2331 - RNA, 21 nt, synthetic construct
  source 1..21: mol_type = other RNA
gttttgcttttgtaacttgaa

SEQ ID NO: 2332 - RNA, 23 nt, synthetic construct
  source 1..23: mol_type = other RNA
ttcaagttacaaaagcaaaacag

SEQ ID NO: 2333 - RNA, 21 nt, synthetic construct
  source 1..21: mol_type = other RNA
  modified_base 1: mod_base = OTHER; note = 2'-O-methylguanosine-3'-phosphorothioate
  modified_base 2: mod_base = OTHER; note = 2'-O-methyluridine-3'-phosphorothioate
  modified_base 3: mod_base = OTHER; note = 2'-O-methyluridine-3'-phosphate
  modified_base 4: mod_base = OTHER; note = 2'-O-methyluridine-3'-phosphate
  modified_base 5: mod_base = OTHER; note = 2'-O-methyluridine-3'-phosphate
  modified_base 6: mod_base = OTHER; note = 2'-O-methylguanosine-3'-phosphate
  modified_base 7: mod_base = OTHER; note = 2'-fluorocytidine-3'-phosphate
  modified_base 8: mod_base = OTHER; note = 2'-O-methyluridine-3'-phosphate
  modified_base 9: mod_base = OTHER; note = 2'-fluorouridine-3'-phosphate
  modified_base 10: mod_base = OTHER; note = 2'-fluorouridine-3'-phosphate
  modified_base 11: mod_base = OTHER; note = 2'-fluorouridine-3'-phosphate
  modified_base 12: mod_base = OTHER; note = 2'-O-methylguanosine-3'-phosphate
  modified_base 13: mod_base = OTHER; note = 2'-O-methyluridine-3'-phosphate
  modified_base 14: mod_base = OTHER; note = 2'-O-methyladenosine-3'-phosphate
  modified_base 15: mod_base = OTHER; note = 2'-O-methyladenosine-3'-phosphate
  modified_base 16: mod_base = OTHER; note = 2'-O-methylcytidine-3'-phosphate
  modified_base 17: mod_base = OTHER; note = 2'-O-methyluridine-3'-phosphate
  modified_base 18: mod_base = OTHER; note = 2'-O-methyluridine-3'-phosphate
  modified_base 19: mod_base = OTHER; note = 2'-O-methylguanosine-3'-phosphate
  modified_base 20: mod_base = OTHER; note = 2'-O-methyladenosine-3'-phosphate
  modified_base 21: mod_base = OTHER; note = 2'-O-methyladenosine
gttttgcttttgtaacttgaa

SEQ ID NO: 2334 - RNA, 23 nt, synthetic construct
  source 1..23: mol_type = other RNA
  modified_base 1: mod_base = OTHER; note = 2'-O-methyluridine-3'-phosphorothioate
  modified_base 2: mod_base = OTHER; note = 2'-fluorouridine-3'-phosphorothioate
  modified_base 3: mod_base = OTHER; note = 2'-O-methylcytidine-3'-phosphate
  modified_base 4: mod_base = OTHER; note = 2'-O-methyladenosine-3'-phosphate
  modified_base 5: mod_base = OTHER; note = 2'-O-methyladenosine-3'-phosphate
  modified_base 6: mod_base = OTHER; note = 2'-fluoroguanosine-3'-phosphate
  modified_base 7: mod_base = OTHER; note = 2'-O-methyluridine-3'-phosphate
  modified_base 8: mod_base = OTHER; note = 2'-O-methyluridine-3'-phosphate
  modified_base 9: mod_base = OTHER; note = 2'-O-methyladenosine-3'-phosphate
  modified_base 10: mod_base = OTHER; note = 2'-O-methylcytidine-3'-phosphate
  modified_base 11: mod_base = OTHER; note = 2'-O-methyladenosine-3'-phosphate
  modified_base 12: mod_base = OTHER; note = 2'-O-methyladenosine-3'-phosphate
  modified_base 13: mod_base = OTHER; note = 2'-O-methyladenosine-3'-phosphate
  modified_base 14: mod_base = OTHER; note = 2'-fluoroadenosine-3'-phosphate
  modified_base 15: mod_base = OTHER; note = 2'-O-methylguanosine-3'-phosphate
  modified_base 16: mod_base = OTHER; note = 2'-fluorocytidine-3'-phosphate
  modified_base 17: mod_base = OTHER; note = 2'-O-methyladenosine-3'-phosphate
  modified_base 18: mod_base = OTHER; note = 2'-O-methyladenosine-3'-phosphate
  modified_base 19: mod_base = OTHER; note = 2'-O-methyladenosine-3'-phosphate
  modified_base 20: mod_base = OTHER; note = 2'-O-methyladenosine-3'-phosphate
  modified_base 21: mod_base = OTHER; note = 2'-O-methylcytidine-3'-phosphorothioate
  modified_base 22: mod_base = OTHER; note = 2'-O-methyladenosine-3'-phosphorothioate
  modified_base 23: mod_base = OTHER; note = 2'-O-methylguanosine
ttcaagttacaaaagcaaaacag

SEQ ID NO: 2335 - RNA, 21 nt, synthetic construct
  source 1..21: mol_type = other RNA
  modified_base 1: mod_base = OTHER; note = 2'-fluoroguanosine-3'-phosphorothioate
  modified_base 2: mod_base = OTHER; note = 2'-O-methyluridine-3'-phosphorothioate
  modified_base 3: mod_base = OTHER; note = 2'-fluorouridine-3'-phosphate
  modified_base 4: mod_base = OTHER; note = 2'-O-methyluridine-3'-phosphate
  modified_base 5: mod_base = OTHER; note = 2'-fluorouridine-3'-phosphate
  modified_base 6: mod_base = OTHER; note = 2'-O-methylguanosine-3'-phosphate
  modified_base 7: mod_base = OTHER; note = 2'-fluorocytidine-3'-phosphate
  modified_base 8: mod_base = OTHER; note = 2'-O-methyluridine-3'-phosphate
  modified_base 9: mod_base = OTHER; note = 2'-fluorouridine-3'-phosphate
  modified_base 10: mod_base = OTHER; note = 2'-fluorouridine-3'-phosphate
  modified_base 11: mod_base = OTHER; note = 2'-fluorouridine-3'-phosphate
  modified_base 12: mod_base = OTHER; note = 2'-O-methylguanosine-3'-phosphate
  modified_base 13: mod_base = OTHER; note = 2'-fluorouridine-3'-phosphate
  modified_base 14: mod_base = OTHER; note = 2'-O-methyladenosine-3'-phosphate
  modified_base 15: mod_base = OTHER; note = 2'-fluoroadenosine-3'-phosphate
  modified_base 16: mod_base = OTHER; note = 2'-O-methylcytidine-3'-phosphate
  modified_base 17: mod_base = OTHER; note = 2'-fluorouridine-3'-phosphate
  modified_base 18: mod_base = OTHER; note = 2'-O-methyluridine-3'-phosphate
  modified_base 19: mod_base = OTHER; note = 2'-fluoroguanosine-3'-phosphate
  modified_base 20: mod_base = OTHER; note = 2'-O-methyladenosine-3'-phosphate
  modified_base 21: mod_base = OTHER; note = 2'-fluoroadenosine
gttttgcttttgtaacttgaa

SEQ ID NO: 2336 - RNA, 23 nt, synthetic construct
  source 1..23: mol_type = other RNA
  modified_base 1: mod_base = OTHER; note = 2'-O-methyluridine-3'-phosphorothioate
  modified_base 2: mod_base = OTHER; note = 2'-fluorouridine-3'-phosphorothioate
  modified_base 3: mod_base = OTHER; note = 2'-O-methylcytidine-3'-phosphate
  modified_base 4: mod_base = OTHER; note = 2'-fluoroadenosine-3'-phosphate
  modified_base 5: mod_base = OTHER; note = 2'-O-methyladenosine-3'-phosphate
  modified_base 6: mod_base = OTHER; note = 2'-fluoroguanosine-3'-phosphate
  modified_base 7: mod_base = OTHER; note = 2'-O-methyluridine-3'-phosphate
  modified_base 8: mod_base = OTHER; note = 2'-fluorouridine-3'-phosphate
  modified_base 9: mod_base = OTHER; note = 2'-O-methyladenosine-3'-phosphate
  modified_base 10: mod_base = OTHER; note = 2'-fluorocytidine-3'-phosphate
  modified_base 11: mod_base = OTHER; note = 2'-O-methyladenosine-3'-phosphate
  modified_base 12: mod_base = OTHER; note = 2'-O-methyladenosine-3'-phosphate
  modified_base 13: mod_base = OTHER; note = 2'-O-methyladenosine-3'-phosphate
  modified_base 14: mod_base = OTHER; note = 2'-fluoroadenosine-3'-phosphate
  modified_base 15: mod_base = OTHER; note = 2'-O-methylguanosine-3'-phosphate
  modified_base 16: mod_base = OTHER; note = 2'-fluorocytidine-3'-phosphate
  modified_base 17: mod_base = OTHER; note = 2'-O-methyladenosine-3'-phosphate
  modified_base 18: mod_base = OTHER; note = 2'-fluoroadenosine-3'-phosphate
  modified_base 19: mod_base = OTHER; note = 2'-O-methyladenosine-3'-phosphate
  modified_base 20: mod_base = OTHER; note = 2'-fluoroadenosine-3'-phosphate
  modified_base 21: mod_base = OTHER; note = 2'-O-methylcytidine-3'-phosphorothioate
  modified_base 22: mod_base = OTHER; note = 2'-O-methyladenosine-3'-phosphorothioate
  modified_base 23: mod_base = OTHER; note = 2'-O-methylguanosine
ttcaagttacaaaagcaaaacag

SEQ ID NO: 2337 - RNA, 21 nt, synthetic construct
  source 1..21: mol_type = other RNA
  modified_base 1: mod_base = OTHER; note = 2'-O-methylguanosine-3'-phosphorothioate
  modified_base 2: mod_base = OTHER; note = 2'-O-methyluridine-3'-phosphorothioate
  modified_base 3: mod_base = OTHER; note = 2'-O-methyluridine-3'-phosphate
  modified_base 4: mod_base = OTHER; note = 2'-O-methyluridine-3'-phosphate
  modified_base 5: mod_base = OTHER; note = 2'-O-methyluridine-3'-phosphate
  modified_base 6: mod_base = OTHER; note = 2'-O-methylguanosine-3'-phosphate
  modified_base 7: mod_base = OTHER; note = 2'-fluorocytidine-3'-phosphate
  modified_base 8: mod_base = OTHER; note = 2'-fluorouridine-3'-phosphate
  modified_base 9: mod_base = OTHER; note = 2'-fluorouridine-3'-phosphate
  modified_base 10: mod_base = OTHER; note = 2'-O-methyluridine-3'-phosphate
  modified_base 11: mod_base = OTHER; note = 2'-O-methyluridine-3'-phosphate
  modified_base 12: mod_base = OTHER; note = 2'-O-methylguanosine-3'-phosphate
  modified_base 13: mod_base = OTHER; note = 2'-O-methyluridine-3'-phosphate
  modified_base 14: mod_base = OTHER; note = 2'-O-methyladenosine-3'-phosphate
  modified_base 15: mod_base = OTHER; note = 2'-O-methyladenosine-3'-phosphate
  modified_base 16: mod_base = OTHER; note = 2'-O-methylcytidine-3'-phosphate
  modified_base 17: mod_base = OTHER; note = 2'-O-methyluridine-3'-phosphate
  modified_base 18: mod_base = OTHER; note = 2'-O-methyluridine-3'-phosphate
  modified_base 19: mod_base = OTHER; note = 2'-O-methylguanosine-3'-phosphate
  modified_base 20: mod_base = OTHER; note = 2'-O-methyladenosine-3'-phosphate
  modified_base 21: mod_base = OTHER; note = 2'-O-methyladenosine
gttttgcttttgtaacttgaa

SEQ ID NO: 2338 - RNA, 23 nt, synthetic construct
  source 1..23: mol_type = other RNA
  modified_base 1: mod_base = OTHER; note = 2'-O-methyluridine-3'-phosphorothioate
  modified_base 2: mod_base = OTHER; note = 2'-fluorouridine-3'-phosphorothioate
  modified_base 3: mod_base = OTHER; note = 2'-O-methylcytidine-3'-phosphate
  modified_base 4: mod_base = OTHER; note = 2'-O-methyladenosine-3'-phosphate
  modified_base 5: mod_base = OTHER; note = 2'-O-methyladenosine-3'-phosphate
  modified_base 6: mod_base = OTHER; note = 2'-O-methylguanosine-3'-phosphate
  modified_base 7: mod_base = OTHER; note = 2'-O-methyluridine-3'-phosphate
  modified_base 8: mod_base = OTHER; note = 2'-fluorouridine-3'-phosphate
  modified_base 9: mod_base = OTHER; note = 2'-O-methyladenosine-3'-phosphate
  modified_base 10: mod_base = OTHER; note = 2'-O-methylcytidine-3'-phosphate
  modified_base 11: mod_base = OTHER; note = 2'-O-methyladenosine-3'-phosphate
  modified_base 12: mod_base = OTHER; note = 2'-O-methyladenosine-3'-phosphate
  modified_base 13: mod_base = OTHER; note = 2'-O-methyladenosine-3'-phosphate
  modified_base 14: mod_base = OTHER; note = 2'-O-methyladenosine-3'-phosphate
  modified_base 15: mod_base = OTHER; note = 2'-O-methylguanosine-3'-phosphate
  modified_base 16: mod_base = OTHER; note = 2'-fluorocytidine-3'-phosphate
  modified_base 17: mod_base = OTHER; note = 2'-O-methyladenosine-3'-phosphate
  modified_base 18: mod_base = OTHER; note = 2'-fluoroadenosine-3'-phosphate
  modified_base 19: mod_base = OTHER; note = 2'-O-methyladenosine-3'-phosphate
  modified_base 20: mod_base = OTHER; note = 2'-O-methyladenosine-3'-phosphate
  modified_base 21: mod_base = OTHER; note = 2'-O-methylcytidine-3'-phosphorothioate
  modified_base 22: mod_base = OTHER; note = 2'-O-methyladenosine-3'-phosphorothioate
  modified_base 23: mod_base = OTHER; note = 2'-O-methylguanosine
ttcaagttacaaaagcaaaacag

SEQ ID NO: 2339 - RNA, 21 nt, synthetic construct
  source 1..21: mol_type = other RNA
  modified_base 1: mod_base = OTHER; note = 2'-O-methylguanosine-3'-phosphorothioate
  modified_base 2: mod_base = OTHER; note = 2'-O-methyluridine-3'-phosphorothioate
  modified_base 3: mod_base = OTHER; note = 2'-O-methyluridine-3'-phosphate
  modified_base 4: mod_base = OTHER; note = 2'-O-methyluridine-3'-phosphate
  modified_base 5: mod_base = OTHER; note = 2'-O-methyluridine-3'-phosphate
  modified_base 6: mod_base = OTHER; note = 2'-O-methylguanosine-3'-phosphate
  modified_base 7: mod_base = OTHER; note = 2'-fluorocytidine-3'-phosphate
  modified_base 8: mod_base = OTHER; note = 2'-O-methyluridine-3'-phosphate
  modified_base 9: mod_base = OTHER; note = 2'-fluorouridine-3'-phosphate
  modified_base 10: mod_base = OTHER; note = 2'-fluorouridine-3'-phosphate
  modified_base 11: mod_base = OTHER; note = 2'-fluorouridine-3'-phosphate
  modified_base 12: mod_base = OTHER; note = 2'-O-methylguanosine-3'-phosphate
  modified_base 13: mod_base = OTHER; note = 2'-O-methyluridine-3'-phosphate
  modified_base 14: mod_base = OTHER; note = 2'-O-methyladenosine-3'-phosphate
  modified_base 15: mod_base = OTHER; note = 2'-O-methyladenosine-3'-phosphate
  modified_base 16: mod_base = OTHER; note = 2'-O-methylcytidine-3'-phosphate
  modified_base 17: mod_base = OTHER; note = 2'-O-methyluridine-3'-phosphate
  modified_base 18: mod_base = OTHER; note = 2'-O-methyluridine-3'-phosphate
  modified_base 19: mod_base = OTHER; note = 2'-O-methylguanosine-3'-phosphate
  modified_base 20: mod_base = OTHER; note = 2'-O-methyladenosine-3'-phosphate
  modified_base 21: mod_base = OTHER; note = 2'-O-methyladenosine
gttttgcttttgtaacttgaa

(The sequence listing continues in the following parts.)

What is claimed:

1. A double stranded RNAi (dsRNAi) agent comprising:
a sense strand comprising a nucleotide sequence selected from SEQ ID NOs: 1 to 405 and 1434 to 1440 in Table 1; and
an antisense strand forming a duplex with the sense strand and comprising a nucleotide sequence selected from SEQ ID NOs: 406 to 810 and 1441 to 1447 in Table 1.

2. The dsRNAi agent of claim 1, wherein the sense strand is 21 to 23 nucleotides in length and the antisense strand is 23 to 25 nucleotides in length.

3. The dsRNAi agent of claim 1 or 2, wherein all the nucleotides in the sense strand and the antisense strand are modified nucleotides.

4. The dsRNAi agent of claim 1 through 3, wherein each of the modified nucleotides independently comprises one or more modifications selected from a 2′-deoxy modification, a 2′-O-alkyl modification, a 2′-halo modification, a threofuranosyl nucleotide (TNA) modification, a 2′-5′-linkage modification, a conformationally restricting modification, an abasic modification, a 2′-amino-modification, a 2′-O-allyl modification, 2′-C-alkyl modification, a 2′-O-alkoxyalkyl modification, a morpholino modification, a phosphoramidate modification, a non-natural nucleobase modification, a modification in a tetrahydropyran, a modification containing a 1,5-anhydrohexitol, a modification containing a cyclohexenyl, a modification containing a phosphorothioate group, a modification containing a 5′-vinyl-phosphonate, a modification containing a 5′-phosphate, a modification to form a thermally destabilizing nucleotide, a glycol nucleic acid (GNA) modification, and a 2-O-(N-methylacetamide) modification.

5. The dsRNAi agent of claim 4, wherein each of the modified nucleotides independently comprises one or more modifications selected from 2′-deoxy modification, 2′-O-alkoxyalkyl modification, 2′-O-alkyl modification, 2′-O-allyl modification, 2′-C-allyl modification, 2′-halo modification, modification containing a non-natural nucleobase, GNA modification, and TNA modification.

6. The dsRNAi agent of any one of claims 3 through 5, wherein all the modified nucleotides comprise a modification on a 2′ sugar ring.

7. The dsRNAi agent of claim 6, wherein the modified nucleotides are selected from a 2′-O-alkyl modified nucleotide, a 2′-halo modified nucleotide, a 2′-deoxy modified nucleotide, a 2′-O-alkoxyalkyl modified nucleotide and TNA modification.

8. The dsRNAi agent of any one of claims 3 to 7, wherein one or more of the modified nucleotides further comprises a 3′-phosphorothioate (PS) modification.

9. The dsRNAi agent of any one of claims 4 through 8, wherein each of the modified nucleotides independently comprises one or more modifications selected from 2′-deoxy modification, 2′-O-methyl (2′-OMe) modification, 2′-fluoro (2′-F) modification, 2′-O-methoxyethyl (2′-MOE) modification, the modification containing a non-natural nucleobase, TNA, GNA, 3′-phosphorothioate (PS) modification, and 5′-vinyl-phosphonate (5′-VP) modification.

10. The dsRNAi agent of any one of claims 1 to 9, wherein the sense strand comprises one or two 2′-MOE modified nucleotides positioned at the 1t and/or 2^{nd} nucleotides from the 5′-end of the sense strand.

11. The dsRNAi agent of any one of claims 1 to 10, wherein the sense strand comprises one or two 2′-MOE modified nucleotides positioned at the 1^{st} and/or 2^{nd} nucleotides from the 3′-end of the sense strand.

12. The dsRNAi agent of any one of claims 1 to 9, wherein the sense strand comprises one or two TNAs positioned at the 1^{st} and/or 2^{nd} nucleotides from the 5′-end of the sense strand.

13. The dsRNAi agent of any one of claims 1 to 10, wherein the sense strand comprises one or two TNAs positioned at the 1^{st} and/or 2^{nd} nucleotides from the 3′-end of the sense strand.

14. The dsRNAi agent of any one of claims 1 through 13, wherein the antisense strand comprises a 5′-VP group at the 1^{st} nucleotide from 5′ end of the antisense strand.

15. The dsRNAi agent of any one of claims 1 through 13, wherein the antisense strand comprises a 5′-(E)-VP group at the 1^{st} nucleotide from 5′ end of the antisense strand.

16. The dsRNAi agent of any one of claims 1 through 13, wherein the antisense strand comprises a 5′-(E)-VP-2′-OMe nucleotide at the 1^{st} position from 5′ end of the antisense strand.

17. The dsRNAi agent of any one of claims 1 and 16, wherein each of the sense strand and the antisense strand independently comprises two, three, four, five or six 2′-F modified nucleotides.

18. The dsRNAi agent of any one of claims 1 through 17, wherein the sense strand comprises one or two 3′-PS group at the 1^{st} and/or 2^{nd} nucleotides from 5′-end of the sense strand.

19. The dsRNAi agent of any one of claims 1 through 18, wherein the antisense strand comprises one or two 3′-PS group at the 1^{st} and/or 2^{nd} nucleotides from 5′-end of the antisense strand, and/or one or two 3′-PS group at the 1^{st} and/or 2^{nd} nucleotides from 3′-end of the antisense strand.

20. The dsRNAi agent of any one of claims 1 through 19, wherein the sense strand is 21 nucleotides in length and the antisense strand is 23 nucleotides in length.

21. The dsRNAi agent of claim 20, wherein the sense strand comprises one to four 2′-MOE modified nucleotides positioned at the 1^{st}, 2^{nd}, 20^{th}, and/or 21^{st} nucleotides from the 5′-end of the sense strand.

22. The dsRNAi agent of claim 21, wherein the sense strand comprises only four 2′-MOE modified nucleotides.

23. The dsRNAi agent of any one of claims 21 through 22, wherein the sense strand does not comprise a 2′-MOE modified nucleotide at the 3^{rd} to 19^{th} positions from 5′-end of the sense strand.

24. The dsRNAi agent of claim 20, wherein the sense strand comprises one to four TNAs positioned at the 1^{st}, 2^{nd}, 20^{th}, and/or 21^{st} nucleotides from the 5′-end of the sense strand.

25. The dsRNAi agent of any one of claims 20 through 24, wherein the sense strand comprises two, three, or four 2′-F modified nucleotides positioned at the 7^{th}, 9^{th}, 10^{th}, and/or 11^{th} nucleotide from 5′-end of the sense strand.

26. The dsRNAi agent of claim 25, wherein the sense strand comprises 2′-F modified nucleotides positioned at the 7^{th}, 9^{th}, 10^{th}, and 11^{th} nucleotides from 5′-end of the sense strand.

27. The dsRNAi agent of claim 25 or 26, wherein the remaining nucleotides in the sense strand comprise 2′-OMe modified modification.

28. The dsRNAi agent of any one of claims 20 through 27, wherein the antisense strand comprises a 5′-(E)-VP group at the 1^{st} nucleotide from 5′ end of the antisense strand.

29. The dsRNAi agent of any one of claims 18 through 25, wherein the antisense strand comprises two, three, or four 2′-F modified nucleotides positioned at the 2^{nd}, 6^{th}, 14^{th}, and/or 16^{th} nucleotides from 5′-end of the antisense strand.

30. The dsRNAi agent of claim 29, wherein the antisense strand comprises 2′-F modified nucleotides positioned at the 2^{nd}, 6^{th}, 14^{th}, and 16^{th} nucleotides from 5′-end of the antisense strand.

31. The dsRNAi agent of any one of claims 20 through 30, wherein the antisense strand comprises 2′-F modifications positioned at the 2nd, 6th, 14th, and 16th nucleotides from the 5′ end; and (i) a GNA positioned at the 5^{th} nucleotide from 5′ end, or (ii) a TNA positioned at the 3rd nucleotide from the 5′ end.

32. The dsRNAi agent of any one of claims 28 through 31, wherein the remaining nucleotides in antisense strand comprise 2′-OMe modified modifications.

33. The dsRNAi agent of any one of claims 20 through 32, wherein the sense strand comprises one to eight 3′-PS group at the 1^{st}, 2^{nd}, 3^{rd}, 4^{th}, 17^{th}, 18^{th}, 19^{th} and/or 20^{th} nucleotides from 5′-end of the sense strand.

34. The dsRNAi agent of any one of claims 20 through 33, wherein the antisense strand comprises one to eight 3′-PS group at the 1^{st}, 2^{nd}, 3^{rd}, 4^{th}, 19^{th}, 20^{th}, 21^{st} and/or 22^{nd} nucleotides from 5′-end of the antisense strand.

35. The dsRNAi agent of any one of claims 18, 19, 33 and 34, wherein at least one of the 3′-PS groups in each sense strand and antisense strand has a stereopure Rp configuration.

36. The dsRNAi agent of any one of claims 18, 19, 33 and 34, wherein at least one of the 3′-PS groups in each sense strand and antisense strand has a stereopure Sp configuration.

37. A double stranded RNAi (dsRNAi) agent comprising:
a sense strand having a nucleotide sequence selected from SEQ ID NOs: 812 to 1052 in Table 2 and SEQ ID NOs: 1294 to 1297, 1448 to 1462, and 1481 to 1482 in Table 3; and
an antisense strand forming a duplex with the sense strand and having a nucleotide sequence selected from SEQ ID NOs: 1053 to 1293 in Table 2 and 1298 to 1301, 1463 to 1477, and 2600 to 2605 in Table 3.

38. The dsRNAi agent of any one of claims 1 through 37, further comprising a ligand.

39. The dsRNAi agent of claim 38, wherein the ligand comprises a N-acetylgalactosamine (GalNAc) moiety.

40. The dsRNAi agent of claim 38 or 39, wherein the ligand has a structure of: [chemical structure]
wherein:
each L¹ is independently a linker which may be same or different in each occurrence;
L² is a linker;
n is an integer from 1 to 3; and [symbol]
is an attachment point to the sense strand or an antisense strand.

41. The dsRNAi agent of claim 40, wherein the ligand comprises the following structure of [chemical structure]
wherein:
each p1, p2, p3, q1, q2, r1, r2 and r3 is independently an integer from 0 to 12;
each n1, n2, and n3 is independently an integer from 1 to 3; and
“*” is an attachment point to L².

42. The dsRNAi agent of claim 38 or 39, wherein the ligand has a structure of: [chemical structure]
wherein:
each L¹¹, L¹², L¹³, L¹⁴, and L¹⁵ is an independently a linker;
L² is a linker; [symbol]
is an attachment point to the sense strand or the antisense strand.

43. The dsRNAi agent of claim 42, wherein the ligand has a structure of: [chemical structure]
wherein:
each p11 and q11 is independently an integer from 0 to 12;
each z1, z2, and z3 is independently an integer of 0 to 12; and [symbol]
is an attachment point to the sense strand or the antisense strand.

44. The dsRNAi agent of any one of claims 38 through 43, wherein the ligand comprises the following structure: [chemical structure]
wherein [symbol]
is an attachment point to the sense strand or the antisense strand.

45. The dsRNAi agent of claim 44, wherein the ligand is conjugated to 3′ end of the sense strand to form the following structure: [chemical structure]
or a pharmaceutically acceptable salt,
wherein W is —OH or —SH.

46. The dsRNAi agent of claim 44, wherein the ligand is conjugated to 5′ end of the sense strand to form the following structure: [chemical structure]
or a pharmaceutically acceptable salt,
wherein W is —OH or —SH.

47. The dsRNAi agent of claim 45 or 46, wherein W is —OH.

48. The dsRNAi agent of any one of claims 1 through 47, wherein the dsRNAi agent is in a pharmaceutically acceptable salt form.

49. The dsRNAi agent of claim 45, wherein the pharmaceutically acceptable salt is a sodium salt.

50. A pharmaceutical composition comprising the dsRNAi agent of any one of claims 1 through 49, and a pharmaceutically acceptable carrier.

51. The pharmaceutical composition of claim 50, wherein the composition is in an aqueous solution form.

52. The pharmaceutical composition of any of claims 50 through 51, further comprising an additional therapeutic agent selected from a proprotein convertase subtilisin kexin 9 (PCSK9) inhibitor, a lysophosphatidic acid (LPA) receptor inhibitor, an angiotensinogen (AGT) inhibitor, a fibrate, a bile acid sequestrant, niacin, an antiplatelet agent, an angiotensin converting enzyme inhibitor, an angiotensin II receptor antagonist, an acylCoA cholesterol acetyltransferase (ACAT) inhibitor, a cholesterol absorption inhibitor, a cholesterol ester transfer protein (CETP) inhibitor, a microsomal triglyceride transfer protein (MTTP) inhibitor, a cholesterol modulator, a bile acid modulator, a peroxisome proliferation activated receptor (PPAR) agonist, a gene-based therapy, a composite vascular protectant, a glycoprotein IIb/IIIa inhibitor, aspirin or an aspirin-like compound, an IBAT inhibitor, a squalene synthase inhibitor, a monocyte chemoattractant protein (MCP)-I inhibitor, and a combination thereof.

53. The pharmaceutical composition of claim 52, wherein the additional therapeutic agent comprises a PCSK9 inhibitor.

54. The pharmaceutical composition of claim 53, wherein the PCSK9 inhibitor is a second dsRNAi agent.

55. The pharmaceutical composition of claim 54, wherein the second dsRNAi agent comprises inclisiran.

56. A combination of (i) the dsRNAi agent of any one of claims 1 through 49, and (ii) a second agent selected from a proprotein convertase subtilisin kexin 9 (PCSK9) inhibitor, a lysophosphatidic acid (LPA) receptor inhibitor, an angiotensinogen (AGT) inhibitor, a fibrate, a bile acid sequestrant, niacin, an antiplatelet agent, an angiotensin converting enzyme inhibitor, an angiotensin II receptor antagonist, an acylCoA cholesterol acetyltransferase (ACAT) inhibitor, a cholesterol absorption inhibitor, a cholesterol ester transfer protein (CETP) inhibitor, a microsomal triglyceride transfer protein (MTTP) inhibitor, a cholesterol modulator, a bile acid modulator, a peroxisome proliferation activated receptor (PPAR) agonist, a gene-based therapy, a composite vascular protectant, a glycoprotein IIb/IIIa inhibitor, aspirin or an aspirin-like compound, an IBAT inhibitor, a squalene synthase inhibitor, a monocyte chemoattractant protein (MCP)-I inhibitor, and a combination thereof.

57. The combination of claim 56, wherein the second agent is a second dsRNAi agent.

58. The combination of claim 57, wherein the second dsRNAi agent is a dsRNA agent that targets one or more of the genes selected from the group consisting of PCSK9, LPA, AGT, ACE, ACE2, AGTR1, AGTR2, ACAT, CETP, MTTP, PPAR, IBAT, FDFT1, ERG9, SQS1, Ccl2, CCR2, CCL7, CCL8, CCL13, and CCL16.

59. The combination of any one of claims 56 to 58, wherein the second dsRNAi agent comprises inclisiran.

60. A pharmaceutical composition comprising the combination of any one of claims 56 through 59.

61. The pharmaceutical composition of claim 60, wherein the second dsRNAi agent is in a pharmaceutically acceptable salt form.

62. The pharmaceutical composition of claim 61, wherein the pharmaceutically acceptable salt of the second dsRNAi agent is a sodium salt.

63. The pharmaceutical composition of any one of claims 60 to 62, wherein the dsRNAi agent and the second agent are formulated in the same composition.

64. The pharmaceutical composition of any one of claims 60 to 63, wherein the dsRNAi agent and the second agent are formulated in the separate compositions.

65. A method of inhibiting expression of 3-hydroxy-3-methylglutaryl-CoA reductase (HMGCR) in a subject comprising:
administering to the subject the dsRNAi agent of any one of claims 1 through 49 or a pharmaceutically acceptable salt thereof, or the pharmaceutical composition of any one of claims 50 through 55.

66. A method of lowering a level of low-density lipoprotein cholesterol (LDL-C) in a subject, comprising:
administering to the subject the dsRNAi agent of any one of claims 1 through 49 or a pharmaceutically acceptable salt thereof, or the pharmaceutical composition of any one of claims 50 through 55.

67. A method of treating or preventing an HMGCR-associated disorder or disease in a subject, comprising:
administering to the subject the dsRNAi agent of any one of claims 1 through 49 or a pharmaceutically acceptable salt thereof, or the pharmaceutical composition of any one of claims 50 through 55.

68. The method of claim 67, wherein the HMGCR-associated disorder or disease is hyperlipidemia, hypercholesterolemia, hypertriglyceridemia, mixed hyperlipidemia, primary hyperlipidemia, heterozygous familiar hypercholesterolemia (HeFH), homozygous familiar hypercholesterolemia (HoFH), congestive heart disease (CHD) or atherosclerosis.

69. A method of treating or preventing hyperlipidemia in a subject, comprising:
administering to the subject the dsRNAi agent of any one of claims 1 through 49 or a pharmaceutically acceptable salt thereof, or the pharmaceutical composition of any one of claims 50 through 55.

70. The method of claim 69, wherein the hyperlipidemia is hypercholesterolemia, or hypertriglyceridemia.

71. A method of treating or preventing atherosclerotic cardiovascular disease (ASCVD) in a subject, comprising:
administering to the subject the dsRNAi agent of any one of claims 1 through 49 or a pharmaceutically acceptable salt thereof, or the pharmaceutical composition of any one of claims 50 through 55.

72. The method of any one of claims 65 through 71, wherein the dsRNAi agent or the pharmaceutical composition is administered subcutaneously or intravenously.

73. The method of any one of claims 62 through 72, further comprising administering to the subject an additional therapeutic agent selected from a proprotein convertase subtilisin kexin 9 (PCSK9) inhibitor, a lysophosphatidic acid (LPA) receptor inhibitor, an angiotensinogen (AGT) inhibitor, a fibrate, a bile acid sequestrant, niacin, an antiplatelet agent, an angiotensin converting enzyme inhibitor, an angiotensin II receptor antagonist, an acylCoA cholesterol acetyltransferase (ACAT) inhibitor, a cholesterol absorption inhibitor, a cholesterol ester transfer protein (CETP) inhibitor, a microsomal triglyceride transfer protein (MTTP) inhibitor, a cholesterol modulator, a bile acid modulator, a peroxisome proliferation activated receptor (PPAR) agonist, a gene-based therapy, a composite vascular protectant, a glycoprotein IIb/IIIa inhibitor, aspirin or an aspirin-like compound, an IBAT inhibitor, a squalene synthase inhibitor, a monocyte chemoattractant protein (MCP)-I inhibitor, and a combination thereof.

74. The method of claim 73, wherein the additional therapeutic agent is a second dsRNAi agent.

75. The method of claim 74, wherein the second dsRNAi agent comprises a PCSK9 inhibitor.

76. The method of claim 75, wherein the second dsRNAi agent comprises inclisiran.

77. The method of any one of claims 73 through 76, wherein the dsRNAi agent or the pharmaceutical composition and the additional therapeutic agent are administered simultaneously.

78. The method of any one of claims 73 through 76, wherein the dsRNAi agent or the pharmaceutical composition and the additional therapeutic agent are administered subsequently.

79. The method of claim 78, wherein the dsRNAi agent is administered before administering the additional therapeutic agent.

80. The method of claim 78, wherein the additional therapeutic agent is administered before administering the dsRNAi agent.

81. The method of any one of claims 73 through 80, wherein the additional therapeutic agent is administered subcutaneously or intravenously.

82. The method of any one of claims 65 through 81, wherein the subject is a human.

83. The method of any one of claims 65 through 82, wherein the subject has or is diagnosed with hyperlipidemia, hypercholesterolemia, hypertriglyceridemia, mixed hyperlipidemia, primary hyperlipidemia, heterozygous familiar hypercholesterolemia (HeFH), homozygous familiar hypercholesterolemia (HoFH), congestive heart disease (CHD) or atherosclerosis.

84. The method of any one of claims 65 through 83, wherein the subject does not have a muscle side effect after the administrating the dsRNAi agent of any one of claims 1 through 49 or a pharmaceutically acceptable salt thereof, or the pharmaceutical composition of any one of claims 50 through 55.

85. A method of lowering a level of low-density lipoprotein cholesterol (LDL-C) in a subject, comprising:
administering to the subject the pharmaceutical composition of any one of claims 60 through 64.

86. A method of treating or preventing an HMGCR-associated disorder or disease in a subject, comprising:
administering to the subject the pharmaceutical composition of any one of claims 60 through 64.

87. The method of claim 86, wherein the HMGCR-associated disorder or disease is hyperlipidemia, hypercholesterolemia, hypertriglyceridemia, mixed hyperlipidemia, primary hyperlipidemia, heterozygous familiar hypercholesterolemia (HeFH), homozygous familiar hypercholesterolemia (HoFH), congestive heart disease (CHD) or atherosclerosis.

88. A method of treating or preventing hyperlipidemia in a subject, comprising:
administering to the subject the pharmaceutical composition of any one of claims 60 through 64.

89. A method of treating or preventing atherosclerotic cardiovascular disease (ASCVD) in a subject, comprising:
administering to the subject the pharmaceutical composition of any one of claims 60 through 64.

90. The method of any one of claims 85 through 89, wherein the dsRNAi agent and the second agent is administered subcutaneously or intravenously.

91. The method of any one of claims 85 through 89, wherein the dsRNAi agent and the second agent are administered simultaneously.

92. The method of any one of claims 85 through 91, wherein the dsRNAi agent and the second agent are administered subsequently.

93. The method of claim 92, wherein the dsRNAi agent is administered before administering the second agent.

94. The method of claim 92, wherein the second agent is administered before administering the dsRNAi agent.

95. The method of any one of claims 85 through 94, wherein the subject is a human.

96. The method of any one of claims 85 through 95, wherein the subject has or is diagnosed with hyperlipidemia, hypercholesterolemia, hypertriglyceridemia, mixed hyperlipidemia, primary hyperlipidemia, heterozygous familiar hypercholesterolemia (HeFH), homozygous familiar hypercholesterolemia (HoFH), congestive heart disease (CHD) or atherosclerosis.

97. The method of any one of claims 85 through 96, wherein the subject does not have a muscle side effect after the administrating the pharmaceutical composition of any one of claims 60 through 64.

98. A method of reducing the risk of a major adverse cardiovascular event in a subject, comprising administering to the subject the dsRNAi agent of any one of claims 1 through 49 or a pharmaceutically acceptable salt thereof, the pharmaceutical composition of any one of claims 50 through 55, the combination of any one of claims 56 through 59, or the pharmaceutical composition of any one of claims 60 through 64.

99. The method of claim 98, wherein the major adverse cardiovascular event is cardiovascular death, non-fatal myocardial infarction, non-fatal ischemic stroke, or urgent coronary revascularization.

100. The method of claim 98, wherein the subject has an established cardiovascular disease.

101. The method of claim 98, where the subject has not experienced a major atherosclerotic cardiovascular disease (ASCVD) event.

102. A kit comprising the dsRNAi agent of any one of claims 1 through 49 or a pharmaceutically acceptable salt thereof, or the pharmaceutical composition of any one of claims 50 through 55.

103. The kit of claim 102, further comprising an additional therapeutic agent selected from a proprotein convertase subtilisin kexin 9 (PCSK9) inhibitor, a fibrate, a bile acid sequestrant, niacin, an antiplatelet agent, an angiotensin converting enzyme inhibitor, an angiotensin II receptor antagonist, an acylCoA cholesterol acetyltransferase (ACAT) inhibitor, a cholesterol absorption inhibitor, a cholesterol ester transfer protein (CETP) inhibitor, a microsomal triglyceride transfer protein (MTTP) inhibitor, a cholesterol modulator, a bile acid modulator, a peroxisome proliferation activated receptor (PPAR) agonist, a gene-based therapy, a composite vascular protectant, a glycoprotein IIb/IIIa inhibitor, aspirin or an aspirin-like compound, an IBAT inhibitor, a squalene synthase inhibitor, a monocyte chemoattractant protein (MCP)-I inhibitor, and a combination thereof.

104. The kit of claim 103, wherein the additional therapeutic agent is a second dsRNAi agent.

105. The kit of claim 104, wherein the second dsRNAi agent is a dsRNA agent that targets one or more of the genes selected from the group consisting of PCSK9, LPA, AGT, ACE, ACE2, AGTR1, AGTR2, ACAT, CETP, MTTP, PPAR, IBAT, FDFT1, ERG9, SQS1, Ccl2, CCR2, CCL7, CCL8, CCL13, and CCL16.

106. The kit of claim 105, wherein the second dsRNAi agent comprises the PCSK9 inhibitor.

107. The kit of claim 106, wherein the second dsRNAi agent comprises inclisiran.

108. The kit of any one of claims 103 through 107, wherein the dsRNAi agent and the additional therapeutic agent are contained in a single vial.

109. The kit of any one of claims 103 through 107, wherein the dsRNAi agent and the additional therapeutic agent are contained in separate vials.

110. The kit of any one of claims 102 through 109, further comprising one or more applicators.

111. The kit of claim 110, wherein the one or more applicators comprises a syringe.

112. A kit comprising the pharmaceutical composition of any one of claims 60 through 64.

113. The kit of claim 112, wherein the dsRNAi agent and the second agent are contained in a single vial.

114. The kit of claim 112, wherein the dsRNAi agent and the second agent are contained in separate vials.

115. The kit of any one of claims 103 through 114, further comprising one or more applicators.

116. The kit of claim 115, wherein the one or more applicators are syringes.
